United States Patent Application Publication US 2011/0183924 A1 - sequence listing, part 59

SEQ ID NO: 193042 - DNA, 388 bp, Homo sapiens
gctcaggaggggagagcaagaccagcctgcagcttcatgaatcaggtcagctgggccatctggagcagacaggtgtgggtcgtgcccccgaatctcatttctctagacaggatttgctgcctcgatgctgatcttgagcatttaaaacatgtctctgcacccacgtttccgtcctgcaagggatgattgggttgtggtagagcttaaatgaggtaatgcatgcacggaccccagctctgagccacaccactcggatggctccatcagtgtgggtgccctgccctggtgggatgaactgggaggcccttctaactttatcccatcctagattcccaaagaccaccccatgcctcagtcttgggcagcatttccatttcccccccctacg

SEQ ID NO: 193043 - DNA, 375 bp, Homo sapiens
ctgcaaaactatcttgaagagaaaacatggcaacatctaatacagcagaagatgtggatcatcccctataatccaacaattccattcctagataaatactctagagaaaatactgcacgtgtgcagacagaaaagtgcatattcactttaatgtgtattagaaatctaccaaaatgtatcctgatggcagaatggattacggtaaatcttcaaactggataaatatataagcagtgaaattaaaaaacttacagttacctttcacaatacaacatcaaaaaaggagaaacaggcaagcaagaagaagacaggcagggcacggtggctctcgcctgtaatcccagcactttgcaaggccgaggcaggtggatcact

SEQ ID NO: 193044 - DNA, 718 bp, Homo sapiens
cctcaggttgtccagctaaaaggggagtaatctgcaggtgctaatataagtgcaatgctcctataggagctcctgtagtatctttgcaaagatgtagggaccaactgtgtacagtccatcttctagttcacaataaagcattggtctttccaagtgaccttgaatcttaatctgtgcactatcctggcttagagatgtggatatcccagtgataccaggttcttatagtttttcttgtcttttcttcttttttgagacagagtcttgctctgtcggccaggctggagtgcagtggcatgctcttggcttgctgcaacctccgcctcctgggctcaagcaattctccttactcagcctcccaagtagctgagattacagatgtgtgccaccacgcccagctaatttttgaatttttcgtagagacagggtttcaccatgttggtcatgctggtcttgaactcctaacctcaggtaatccgcccgcctaggcctcccatcctatagtttttcaacactaaacctctgtgtatagtcttagaaaagtccagatattctcacatgtcctgagagaaatctacagccacatccctgaatttcactgatccagggtcaatcttcctcagtgttttcttctggaaaaacacagtctactttgatttttaggtgtgcaacaattcttctttcacaagataattcttttggggaggggcagaaagca

SEQ ID NO: 193045 - DNA, 591 bp, Homo sapiens
atagcaatgcacagttacaggaaacgctaaagtagaaagtgtgagagctgttggagcatgtctgtgaggattaagttcctgggatgagcacagtggtgtcactgggcctcacaaagagaacaaactgtagctttgaaaagtgctgaaccatgaaatatattttagatttaaatttggaataacaggaatagtaaaagaataggttcaccacttggacatgatggtgtgataggatagatatggagaaaagaaagaccaattcacatcttcatttacttctatttttttctttctagaagagctaataatcttcaaattgggacagggaggacaagacatatgaatatgaacaactaattaattcctaaggtagatgaggagaaaatagaaggtctaggcactgtcactgccccagacacagatgtagaacttcttaggtattaaagaatgtgaagatttggccctggaaatggtggagttctgcaggcacttatggagcttaagaagaatctgaggatggagaggtattgagattttcaacaaaggtacaaagatttttggaagttcagaacaacagtattgatgttagga

SEQ ID NO: 193046 - DNA, 603 bp, Homo sapiens
aagctgaccatagaggaccccgatgtgcgtgcatgtttatcatgtcacttctgaaaatccttcactgaccatccccatctaaacagaattctctacttgacatttctgcattttctgctccctcagaatagaagctccagaaccgtatgtatcgccaacacttaaaacaccaccttccagagtatcactcaataaaatatttgttgaatcaatgaatactgttagtctccaatgtttgaaatttgccaaccctacccatcagatcaaagggtatactgacaagagtaaaaatggcgttcagtggtgggtctgtcctttagagaaaaagaaaccaaagttaggtatgtacgaccctccaagagaaatggcagagaaccaacccagccaggaaggaaaaactaaaggaaaaacatttgctgggaagattaaatgagaacacgaaacacccagcacaggcttcacgtacaaaaatattcaataaattacatgttgtatagagctgttcaaatcttggtcatctatgattagaaagaatctaacaggaggaaacaattaatttaaaaaaaaaatctgagaaactatcgaagtaaagaccagcttctt

SEQ ID NO: 193047 - DNA, 447 bp, Homo sapiens
atgggctcttttttggttccacatgaattttagaattatttttttaattctgtgaagaataatggtggtattttgatggggattgcattgaatctgtagattgcttttggcagtatggtcattctcgcaatatcaactctacccatccatgagtatgggatgtgtttcgcagtatcagctctacccatccatgagcatgggatgtgtttccatttgttcatgttgtctatgatttctttctttctatctttctttctttttctctcttttttttttctttttgatgtagtctcactcttgttgctcaggctgcagtgcaatggtgcgatctcggctcactgcaacttccgcctcccaggttcaagcgattctcctgcctcggcctcccaagtatctgggactacaggtgcacatcaccatgcccagctaatttttgtatttttagta

SEQ ID NO: 193048 - DNA, 306 bp, Homo sapiens
cgtacctgtattccctgatctgacaattcacagtttcagctactactggaaaatgactcaaagaattaaagtgttgaaatagatgcccctaactcctttgctagaataaacaaggattgtgggtagaatgtaaattattaaaatgcattaactttctcctggacaagtctggtgctaatcacctttgccgcgaggaaagataaatgggttgtgcgtgttgcaggctgaactggcacctgacgaaatcgtgaagtagcaaagtttgtcttgatgattcctgttccagaacatctcctattccctttc

SEQ ID NO: 193049 - DNA, 494 bp, Homo sapiens
tgaggtcatgagtgagggtcaggatgtgaagtgctcttataagaaaaagagaaaccagagctctcgctctctccaccacatgcggactcagcaagaaggcggccatctgtaagccaggaagagagtccccaccagtgaatcaaaactactggcaccttgatgttggacttcccaatctctagaactgtgagaactaaatttctgttgttcaagccacctagtctatagttgttttttaaaatagcagcttgagctacgacaaggggcaactaggatcagaggtgatgaaagaataaaaatgagccagctgagagccctggagggtcactcactaactttttctaagtaatagagaaagcattggcaaatgttaactgcaaactgtctcttcacagctggcctgagagcctgcatttctgttctgccctgggggccaagaaggatgttcctctgtaggagggaggccctaaattgtttccactttcacatgtgtc

SEQ ID NO: 193050 - DNA, 262 bp, Homo sapiens
attttacatattaacaaacataaaagtagacattaaaacttatgattaattaataagattaataattaagatttagtcttcagtttatagatacactatctgaaaatgagcatttcaaagttccaagaaaagacccacccctcctttttttttttgtttttgagacaaagcctcactgtcatccaggctggagtgcaatggtgcaatcatgtctcactgaagcctcaaccttccaggctcaggtgatcctcccaccttagcc

SEQ ID NO: 193051 - DNA, 360 bp, Homo sapiens
cgatcaatgttcactgttctgcaattttgaaaattcctctcctgccaaccttttcaacataggtttcacaattgttctgcatcttgttttggccactttcccgttccttgtgacaacacaaatattatctaccctagttatgtgatcacatttacttaccaattgtcccattgcccccagaatataaattgtctgtatttaaagataactatagtgcgttcttagtttcacttttttgttttttaatctcaggttttagccctctcctaatcacatgtgtactacctttcactgtttatgatcattttccttgatagagaagcagaaacaaaataggattcaagatgttctgctgtttac

SEQ ID NO: 193052 - DNA, 344 bp, Homo sapiens
ttcgtgcgaggcactgagtcaggtacagagacaagcaatgcagttcctcttcaagtatgatggaagaggaatacattataaggacacagaagtggaatattaaggcacactgaggagttaggaaagacttataattcctaaatttattcttgagttttgaaagagataggcagaaaaagtttccatgtaggtacagagacatgaaatcacatgtagattaagggaaggagtatgagacagggaaatggccaaatcaagaaggcttttatgtaccaagtaaatagtttgaactatatttcaaaattaggagtaccgttgaaagattataaacagggacatataat

SEQ ID NO: 193053 - DNA, 704 bp, Homo sapiens
gtaaataacacattttcaaggcagagtttagaggattgaatactgggtagcaagaccagaagtggagataatgatatcagatcattattacatacaaccagacagtctgtctcttatataatttatttgcctatgacgttgtagataaagaacattatcctgtacatatcctaattttttcatttttgaatccttaaaacagttctgagaaataagttagttattctactaaacctaaattactcaagaagatattgagactcacgaaagatgcatactttgaggaagtttagcttggactcaatgtgttgtaagttcggggctgccgggcgcaatggctcacacatgtaatcccagcagtttgggaggccgaggcgagcagatcacctgaggtcaggagttcaagaccagcctggccaacctggtgaaataccgtctctactaaaaatacagaaaattagcagggtgtggtggcaggtacccgtagtcccagctactcgggatgctgaggcaggagaatcgcttcaacctgggaggcggaggttgcagtgagtggaaatcacgccattgcactccagcctgggcaacaagagcgaaactctgtctcaaaacaacaacaacaacaacaacaacaacaaaaatctttggggtcaaggttctaatcatcatggtatgctgttcctcacaatataaaattatgtgcc

SEQ ID NO: 193054 - DNA, 344 bp, Homo sapiens
cagatataggctcagtctttcatcagctcctgagtggtagaaagggataggagtctgagggcagtctccatctccacatgcattttcttgttatgttttcaaatcaccctcccagaggccagcttcagcaagtaggaagaataagcagtcccagtagagaaatgccgcacccctaattctaaaatgcttccctgctttgaggggaactgtccatgcttttggaaagttagcttagaaaaagtccctgggggcccatggactattggataatgtcacaggtatttagtttctagcccggatgctattgctgttcttagtccaagacccacagctatgaaaaggct

SEQ ID NO: 193055 - DNA, 251 bp, Homo sapiens
ttaaaattcacaggctgacaatggaataaacagaacaaatccatgaaagtttttttctcttagaaaaaacaaagaagtcactgtaggattctgctgatgtgtttaagctttgtgagtgggttttaaataatattaaatttacacaggatgtgttactttctaggatcctaacaattagaaaaggaaaagtggtatatttcagctagaatgtatattgctagcatagaataaggactcagtaaatgtttgca

SEQ ID NO: 193056 - DNA, 308 bp, Homo sapiens
ttcagatgtagcattcaaaaatctgtggcggagaaatttgtcctcgtttttataagctataccctgtaaatgaattgtagaaaaccagatagtgaaatcatctgactgggtgaaataagcccaaccaatcaggataatgaatctgctttcttcactaggatataaagaaattagaatttggtataaactctatgaaagggatatgatggaccaaacaaaaaacaaaaaacaaaaaacaaaaaacaaaaaaacactctaaatgcaatatagtgggtaaaaaaaaacccctcaaaaacaaaaaaacaaaa

SEQ ID NO: 193057 - DNA, 592 bp, Homo sapiens
taaatatcaacaacagtattttggcacaaagtaggtgcctaataaatggaatcattagtattagccccttttggtgttattttatattaatatgtcctttattttagtggtttttcaaactgcaggtatcaaatcatgagtggattgtgaaactaatgtacacaactttgagatacaactagaattttttagtgataaagaatagagtagaattgaatttatccaagtatttcacagaagtgtttttatgcgaaacttctcttcagtatataatatctaggcagacagagtgtatatactggatgacaatgtaaaataacctcttaactatgggttgtatccaaaaactcctccaaaaaacaggattatattggatacttgtctcatagtttccaagtcttttgatactatagtggctaagacaccttggttcaaatcccaactccattaattactactatatgactttaactgcctggcttttactgtataacctcctatgacttactttcctcacctatgaaatgggtgataattattaacgagaataatatgaaatattatatgctttaatatgtgtaaaccacttagc

SEQ ID NO: 193058 - DNA, 377 bp, Homo sapiens
aaatgttcaccatggcattgaagtacctcaatctatcccttttcatgttcccattcacacatcttatgttgcagtcaaattctataatttgctcttccacaaacatgagataagctttccaatcctcgtgctctgctcatgctgttcccacttcctgggatgatattgcctggtctccaattgtccaaaccatactcattttcttaagttccatttcaacttctaaatgaaatcttccatatctctgccagaagtcagtattcttcttctaaattcatacattactctgttctcaacaatcagctactagattctgcatatatgtatatgtctgatctccctattatatgacaagctttcttatggtaggaacgaca

SEQ ID NO: 193059 - DNA, 678 bp, Homo sapiens
gattaagggagtttagtcaacaatgtgttgaagccacttataacgactataccttgagctgtgtgaactaatgtaaatatagtataggctgaaggacaaggtggacaacagtcctgcctagctctgcaatggtcaggctacccgtggagattggagaaagtcaaagccacattatgtgagtcacattgggacaactggagatgtttttcctgaaaaagagaagacttgggaaacatgacccatcttgaaatatatgaatggctgtcacatgaaggagggattaatagacttgttctggatggaagctaatggaagatacatttttgctaacctgaagtttacgtaaagcttaaaccctgagcttatgaaacaagctaattctagaggtaataaacttcccatcactaagttcaaatggagtctgtgtaactccttgacactagggtgttctgcaggggattcagcattgtaaaaggggttgcacaagatgacttttagagctccttttagacctgagattctattattcactgatacagatataaatcactggagctctcatttaagcagtttcttttgctgccccataactaggtgatggggtagatttaattcaataaacatttactgaaacttaaccaggtaccagatcttacactagatattggaagaatagat

SEQ ID NO: 193060 - DNA, 339 bp, Homo sapiens
agacattttagcagtcctggaacagataacataaaaacttgacaagaaagttgggtggctaggaggatgtggggcttatgaggtacagataggaattgtgagatactaaaattcatctagtcttatctggtcttcttctttcaacagcatctgttttgaaaagctattcctttgtgctaaaatctgtcgctgtaatttctaccccatagcacacttaggagtaaatttaatctcaaagatggttactattctccttactgctcttcccccacaaaatttttcttctgggaggctaaaaatgtgtgatgcctttaaaacaatatgtgtatagtatagtgc

SEQ ID NO: 193061 - DNA, 341 bp, Homo sapiens
caggatgtatctgctcaatctgtctgtggtgatgttttggtgcacgctgatgcctatttcctttcactgcggagcttgtacactacacacttagcaggaagttcagacctaagacgctgcatcctggacattctgccccctgaagatattggtttgtttcttatcttctgtcgactgtgtgtgtgtgtgtgtgtgtgtgtgtgagtgaaagagagacctttttattgttgccaagaaaaatctctcattagtgtaaaacaaagttgcgtggctgtttttttcttccttataattttagtttgagtagaaaaccatgttgcactgacatctgcaactctgag

SEQ ID NO: 193062 - DNA, 660 bp, Homo sapiens
ccaaccctatagcacaagtactatcactttaaaaaataaactgaggctcagaaaggtttaataatttacctacccccagaagttcaagaacaggtaaaagtaattgaaggtggcaggagtcagaataatagttatgtggggtagacactaacaaggaatggccatgagggtgtctcctaggcaggagtgttttaaatcttgatcttgacctgggtaagttacatagcggcatgtctgggtaaaaattcatcaagctgtgcatttaagactctggactttatgcatcccaatctatactaaaggagaaacaaaacaaaacaaataaataagaaaaacaaacaaacaaacaaaattcccaaaaactaaaaataaaggaaaaacaggctgggtatggtggctcaagcctgtaattccagcactttgggaggccaaggtgggcagatcacttgaggttaagagttcaagaccagcctggccaacatggcaaaaccctgtctctacttaaaataaacaaattagctgggcatcgtggtgctcacctgtaatcccagctactcgggaggctgaggcaggaaaattgcttgaacccgggaggcagaggttgcagtgagctgagattgtgtcactgcactccagcctggatgacaagagtgagactgt

SEQ ID NO: 193063 - DNA, 366 bp, Homo sapiens
tcctcgtggatctgtgtataaacagctactcacatttcacagctacacacttcccagctgtgatcggggacaggggagagatggagtttgagtcttctgagcacccctcagggtaccccattctcctattccatagcagctgcacaccagaaaagctaggcagcttgtcaggggggggtggaaaagtcacaattcacctcccgccaggagtggggaaagagagtgacagtaccaagaagagtgacaggtgaaaagaaaaatataactcctgtcttgcagaatcgctgggctaagactacaccaacaccagtccttcatcccacatcctattaaataaatctgaatttaggtggttatgataccgcg

SEQ ID NO: 193064 - DNA, 380 bp, Homo sapiens
tgggcaccaggagaccaaactgctgcagaatcagagatatgtctgagatcacagcagaaagagaggaagtagaaacgggattccgctgtgggccttctgccccagctgactgaatttccacacactccatatatgaaaatttcttttcctaaagcatggtagaatgaatgctgctgggccccaccctatcccctttaccatctgagtgttggctgataacactcacagctgtctgctctctctggagaactggactgtaaccacccacctcctccacagcagacctgggtcaatgactaactggcagaggggtatgaagagctggtgcctttgccttgaggtgggactaatgttggtgcagtttatgctacagagcttct

SEQ ID NO: 193065 - DNA, 199 bp, Homo sapiens
aagccacctgaccttacctcccattagctgtccctgtaccatctaactaaaatgtacagatacatacttgtggccaggcacggtggctcacgcctgtaatcacagcactttgggaggccaaggcaggcggatcacctgaggtcaggagtttcagactagtctggccaacatggagaaaccccgtttctactaaaaatgc

SEQ ID NO: 193066 - DNA, 333 bp, Homo sapiens
tccaggcatttttaacagaagcaaagtgacacttttatagaggtataatatagtgacacagctcttttccaatactattaaaaatcaaatgtaaccaaaataattcctaaagtaggtgatccctaccctcttatggagtcaagatccctttgagaatctgatgtaagcaataaactctcagcaaaatgcacatatacataatttagcacatgattttaggagttcttggatccctgccgtccatctgtggactctaggggttcaaggatcccaggcctgctctagaatgtgaagaaatgggctttaagctgttggctgaagttcttcgagatg

SEQ ID NO: 193067 - DNA, 433 bp, Homo sapiens
tgtatgaatccccctctttactaaaaatacaaaaaaaattacctggacgtggtagtgtgtgcctgtagtcccagctaatttttggtgtttttagtagagatggggtttcaccatgttggccaggctggtctccaactcctgacctcaggtgatccgcctgccttggtctcccaaagtgctaggattacaggcgtgagccactacgtttggctgcttatcagctttttaccactttgtcgccactacattttggaattttcctttgagaattaggcaaaatgcccagactcccccccggcccccgctttagagggagaggggagcaattagactattcctttgtttccctatagaaggtggggctgagattactgctttgatatctggaatgtaatttagggaagaaaatttaggtcttggcctttctttggaa

SEQ ID NO: 193068 - DNA, 301 bp, Homo sapiens
gaggcaggtttcatcatgttgccccaggctagaacttcttaaaagtttatgtaactatccattcagataactaataaagttccaggtctgaacaatatactgtagaaaaatcacagttaaaatcagcagaactggcccacatctgcaatgttaggtaaaatatgtcctcttgcatgaattctgtgtttatcttggagtttcacacatggtggtcaggtaaagaagcttctgatgcaggctgggtgtgggggctcatgcctgtaatcccaacactttgggaagctgaggcgggcagagcact

SEQ ID NO: 193069 - DNA, 458 bp, Homo sapiens
gggactgagggcgtgagggtgggcgagaataagggtcaggggactggaagcgaggggtaacgggtgatgggcaaaaagcttcagcagacagaggccggggtgtcagtggagactgggagctggactgggactgaggactggcaggcactcgggagaaagggtcggagggcagtgagcgagggggcagagcacagcagctctcagggggcggaggttggggccgaggagtcaatgggggctgagcatatgggtcagtgtaggagccagggcgaaagatgtctgggtgacttggaggagaaggtgccaaagcctgggcagggggtggctcctggggccttaggcccaagcccgggctctggggctctacctgagatgcccgaggggtcaggggggctttgaagacatcaggtgtctttaactccaggccacccaggtgggtgcctgaggagggtgagtca

SEQ ID NO: 193070 - DNA, 203 bp, Homo sapiens
tctagtagaggagacgggaaataaaattaacaagtaagcatagtgtgtggtcaggtggtcataagtgctatggaggacagtaaatctctacctgtctacagaggtagagagtggaccactgcatataggatggccagaaaagccctcaccaataaggggatgtttgaggagatgcaaggggagagagggaaggagtcatgagg

SEQ ID NO: 193071 - DNA, 236 bp, Homo sapiens
tcaggctaaatatgatgaatgagacattgtatttcagtaattcatgcaacaagtggttttatgttttgttgtttttaaaactttgtatcaaacactttcaaatatctatggaaatagaaagaatagtctaaggagcacaaaaaaagaaagaatagtctaaggagcatgcagccccacacttatcaattcatggcccatccccatcctttttcatctaaatttccactcatgcttca

SEQ ID NO: 193072 - DNA, 156 bp, Homo sapiens
tggtgggctgagcagagatagatgaccagacagcaaaatgacacaaaaagttggcaatgaaaagaacaagaggttaagactgagactgagtgttggggaggaggctaataggtctcaggattttatttttttgaaacacattctcgctgtatcacc

SEQ ID NO: 193073 - DNA, 371 bp, Homo sapiens
ctttaaagaagattattttcaaaaagaaagaaacttaccaatatctggagaggggcagaaagcacgtgttgcttgccctaagtctccatcctacaaataccaggagagtttgtcctgattttgaaaggatttaggaggtaacatcctgcttttgtcaacgcatggtgtttgctttgacttttgtttggcatcttatttcacctacaagatcagtgggagctaaaatttattgagcgcacctgctaagtatcaggtcctgtgctataaacatcactctgtctcacagccaggaaagatagaattattcacttagaaataaaaagtcagagttctgttttgttagagaaatcttagtgtaattgcataaatat

SEQ ID NO: 193074 - DNA, 249 bp, Homo sapiens
acctgaatgctctttcaggtttggttggagaaagcaagctgacgagaggctgggagaacaagagctttatataacctcctggagagggagcaggcctgttagtagtccttggagttccagggagtaggatggggatgaggggaacacagagtctcctgaaggccacattagctctcctgaggcagagcagtagatgcagccctgtgagtggccatctaccctcagggcccagaggaggccagcactgca

SEQ ID NO: 193075 - DNA, 507 bp, Homo sapiens
agatggagacgatggagacggtgcagacggtgcagacgctgccccagcgcattcggagcggagccccagggaacggctgagggaacaggaagcagagaaaacgggagcgtgcgcagccgcaaggacgaccgcacccgaacacagggtgcaagccaggctgacggctgactgcaggagcgaatcaaatccccgccgtcctgcagggggaatcccagcctcgtcgtcactaaaacccaaaccagaatcacacacacttcatgctcctgcagggctggatccgcgtcttggagggcctgaaatttctacgttttgcaaagacgctcttttaatacaaaagaaaaaagaaataatacaaaagtagaaagtgaaaaaagaaaaatgcaggtaaaaggtccttcgtccacctctctgccctgggatccgcggctgcaggtggcgcggcgcgggcggtgctgggaccggggacccgcccaggaccggctgcctctggcgccacctggcggccgc

SEQ ID NO: 193076 - DNA, 487 bp, Homo sapiens
tctggcttccagaattgtgagataatgaatttctgttgttttaagtcaccaagtttgaggtaatttgttacagcggccccaggaaacaagtacagtgtccaaacctaaccttgatccagcagcacaagggagcttgttagaaatgagattctggggccttaccagattcagtcagtctggagtggcacgaagaaatgaaatcgcagtaagggtctgcaggtggttctgatgcaccagcatccattgttcatgctccccttttagccctattttcttttcatccaatttacttcaacttgggcaaaatgcatgctcacgtttgcaaccacctcccatatgtcattgcactgtacatctgaatcttcaccccagctccctttcagcactgaagtccattttggatgtctgttgattgagggagccacctgcattttcctcaggcttctcagagggagcacagacttcacaaccttcattatccacctcc

SEQ ID NO: 193077 - DNA, 458 bp, Homo sapiens
ccttttcaaagtctcctttgcctgaagaacctcctctgcatggggctggaccatgcctctccctgcctgcccttcactggttctgctctgccttcagcacaacccacatccggccttaaagggagttattaattccctcctgccccagaagtgccgggcgggaaagctctggacgcagtatttctgaagcagattggacagaaatctgcaggcctgcaaactgcagtcaacaaaacgccattgagcagagagaatggagcatttggcacaaatcagctgcttgccctctggccctggaggaggcagccagggtcaaggctgccctgggaagccctgatgctggtcgcttgttgagccctcagcccggttactggcttccctccttgacatggtctcaactggacatgagcctttgtccccagctctgtcctatgggccagcatctctttggctctgca

SEQ ID NO: 193078 - DNA, 515 bp, Homo sapiens
taatgagtgttaataaaatgaaagatgaagaaatgtaaagacaatcaatattaaaataaatgtgtccactataggaatattgtcagcaaagattgactaaataaatagtgaggatcatggaatgtgaagaccagaagtacataaaaataattagttttgaacttaagagaaatcttcaaatgtatcagggaagaatgcttgtactgtttggatgaagaaaaaatactgatcataaaatatcctgatatattttgaagaccatggatgactattatatactacatacactggcaaaatttaagtgacaaacagaatgaagtaaagctgtctgtggagtggagaagaaatttacataagaattgtaatcgattatttaaaatagtttaatttaaatgtgcattttaattacaaaataatatgagataaagtttgtcttacaaaatatttttatatctatttccacctatttagaattattgcacttctaacaaggggctaaaatggggcaagctttt

SEQ ID NO: 193079 - DNA, 1011 bp, Homo sapiens
agcgggagtttgtgagagtccttggtggaggaggttggaaagcgttctccctcccacaaaacccggtgcagagggagggagagccaggtccgtagcgtgggtccaagaaactatggatcctggaagtgagcacacttttgtgtcttaaaaagtttggtgtctcgttttgaggtgaaaaatgaatgagataagtgctttttaaaaagaagtcttctattgttcaacagttatgaacaaggactatcaaaaattttggtcatcaccttcagatcctgtacattttgaagtggatacttctcatgaaaaagtagaaagcatgtcagaatcggataccatgaatgtcagcaatctttctcaaggtgtaatgctttcacattctccaatctgtatggaaaccaccggcaccacttgtgacttgcctcagaacgaaataaagaattttgaaagggaaaatgagtatgaatccacactttgtgaagatgcttatggcacactagacaatttgttaaatgactgcagttccttcaaaagaaatacagaattatggggagattcctgagatgtcagtcagttatgaaaaggaagtcacagcagagggtgtggagaggccagaaattgtctcaacttggtcttcggcaggcatttcctggaggagtgaagcatgtcgggagaactgtgagatgcctgactgggagcaaagtgctgaaagcttacaacctgttcaagaggacatggctttaaatgaagtcttgcagaaattaaaacatactaacagaaagcaggaagtgcgaatccaagaactccagtgtagtaacctgtatttagagaagagggttaaagaactacagatgaagattaccaaacagcaagtgttcattgatgtcatcaataagctaaaggagaatgttgaagaattaattgaagacaaatacaaaataatcctagagaagaatgatactaaaaagacattgcagaatttggaagaggttttagctaacacgcaaaaacatc

SEQ ID NO: 193080 - DNA, 1415 bp, Homo sapiens
agcgggagtttgtgagagtccttggtggaggaggttggaaagcgttctccctcccacaaaacccggtgcagagggagggagagccaggtccgtagcgtgggtccaagaaactatggatcctggaagtgagcacacttttgtgtcttaaaaagtttggtgtctcgttttgaggtgaaaaatgaatgagataagtgctttttaaaaagaagtcttctattgttcaacagttatgaacaaggactatcaaaaattttggtcatcaccttcagatcctgtacattttgaagtggatacttctcatgaaaaagtagaaagcatgtcagaatcggataccatgaatgtcagcaatctttctcaaggtgtaatgctttcacattctccaatctgtatggaaaccaccggcaccacttgtgacttgcctcagaacgaaataaagaattttgaaagggaaaatgagtatgaatccacactttgtgaagatgcttatggcacactagacaatttgttaaatgataacaacattgaaaattactcaacgaatgcactaattcagccagttgacaccatcagcatatcttccttgagacaatttgaaaccgtttgcaaatttcactgggtagaagcatttgatgatgaaatgacagagaagccagaatttcaaagtcaagtgtataattatgcaaaagacaacaatataaagcaagactcatttaaggaagaaaatccaatggaaactagtgtttctgcaaatacagaccaacttggtaacgagtattttagacagcctcctcctagaagcccgcctctaatccactgcagtggagagatgctgaaatttacagaaaagtcactggctaaaagtattgccaaggaatctgccctcaaccctagccaacctccaagcttcttatgtaagactgcagttccttcaaaagaaatacagaattatggggagattcctgagatgtcagtcagttatgaaaaggaagtcacagcagagggtgtggagaggccagaaattgtctcaacttggtcttcggcaggcatttcctggaggagtgaagcatgtcgggagaactgtgagatgcctgactgggagcaaagtgctgaaagcttacaacctgttcaagaggacatggctttaaatgaagtcttgcagaaattaaaacatactaacagaaagcaggaagtgcgaatccaagaactccagtgtagtaacctgtatttagagaagagggttaaagaactacagatgaagattaccaaacagcaagtgttcattgatgtcatcaataagctaaaggagaatgttgaagaattaattgaagacaaatacaaaataatcctagagaagaatgatactaaaaagacattgcagaatttggaagaggttttagctaacacgcaaaaacatc

SEQ ID NO: 193081 - DNA, 1394 bp, Homo sapiens
agcgggagtttgtgagagtccttggtggaggaggttggaaagcgttctccctcccacaaaacccggtgcagagggagggagagccaggtccgtagcgtgggtccaagaaactatggatcctggaagtgagcacacttttgtgtcttaaaaagtttggtgtctcgttttgaggtgaaaaatgaatgagataagtgctttttaaaaagttatgaacaaggactatcaaaaattttggtcatcaccttcagatcctgtacattttgaagtggatacttctcatgaaaaagtagaaagcatgtcagaatcggataccatgaatgtcagcaatctttctcaaggtgtaatgctttcacattctccaatctgtatggaaaccaccggcaccacttgtgacttgcctcagaacgaaataaagaattttgaaagggaaaatgagtatgaatccacactttgtgaagatgcttatggcacactagacaatttgttaaatgataacaacattgaaaattactcaacgaatgcactaattcagccagttgacaccatcagcatatcttccttgagacaatttgaaaccgtttgcaaatttcactgggtagaagcatttgatgatgaaatgacagagaagccagaatttcaaagtcaagtgtataattatgcaaaagacaacaatataaagcaagactcatttaaggaagaaaatccaatggaaactagtgtttctgcaaatacagaccaacttggtaacgagtattttagacagcctcctcctagaagcccgcctctaatccactgcagtggagagatgctgaaatttacagaaaagtcactggctaaaagtattgccaaggaatctgccctcaaccctagccaacctccaagcttcttatgtaagactgcagttccttcaaaagaaatacagaattatggggagattcctgagatgtcagtcagttatgaaaaggaagtcacagcagagggtgtggagaggccagaaattgtctcaacttggtcttcggcaggcatttcctggaggagtgaagcatgtcgggagaactgtgagatgcctgactgggagcaaagtgctgaaagcttacaacctgttcaagaggacatggctttaaatgaagtcttgcagaaattaaaacatactaacagaaagcaggaagtgcgaatccaagaactccagtgtagtaacctgtatttagagaagagggttaaagaactacagatgaagattaccaaacagcaagtgttcattgatgtcatcaataagctaaaggagaatgttgaagaattaattgaagacaaatacaaaataatcctagagaagaatgatactaaaaagacattgcagaatttggaagaggttttagctaacacgcaaaaacatc

SEQ ID NO: 193082 - DNA, 647 bp, Homo sapiens
attaatggcctcttggtatccaagtcctttgttgtatgacccatccattctcccctgactcccaaggtgtcaggacatgcttgactggctcctgaatttgctctctgcgcatgggcagtacagtcaagcctcacagtgaacccaggtcagctttcaggacaaagaaagtggcctggctgactaggcacagtaaagccagggctgggtaggtacatacttgtgctgatcacgtatgtcttatatctctgtgagagtgcagtcccaacaggaaggtttaatcactggggactgcccaatgctgtgacagggcacagagctctgggttgctgtgggggtgactgcattgaccactgttagtggtttgctgtgttgacactctgtgctgtgtgaccatggctcctgccatcaagaagtagagtctgtttctccacctctgaatccaggctggtcctgtgacttgctttgtcctgtagacaagtgtagtgcaacttcctgtgagccagtttgaagcataggccttggaagcaaaactttacctccacctgtcttaggttttcagctggggctctgctgtgatttgattgtgtctcccaaagttggaaccttgatccccagtgttgtgaggtgaggcttgatggaaagtaaat

SEQ ID NO: 193083 - DNA, 653 bp, Homo sapiens
gtgtatacacttcagatcaaaacgacatgttgagtagaatttacctctcacattttaatgtgttcaatgaactgaagattttgttaatgcagattatttttacagaaaatctggaataaagtctgagttgctgaatttctaacaagctcaccagtaatgccaatgtttttgatccaaaaagaatattttgtcaaacattcagtaaatgaaggaagctgtgtttttcccagtttttttgtcctgtaaacaaagatgagagctttcattttccaaagacagatatatgcaaagaaaacctaaggaagaagggcagctgccagattaaatgtgatggcatcagctgcataaagatagttaataataaagaaaaaataatcaactctatagtaaaacagtctgtcagagagttctttaaccaagtgaatcattaacatcaactgcactaggacaaatttttatgatgtgctggtgcatacagaaagacatagcctcactgatgtgatcttgctacctaaaagtagattacagtctgaatttaaccataaagaaacatcagttttattcaaagtttaaggtactgatgactcatgggttctgtaattttttttttctttttaaagagacggagtctcaatctgtcccccaggctggag

SEQ ID NO: 193084 - DNA, 317 bp, Homo sapiens
ctgccctttcccctcaattctggcctgaagtgggacttgtgcggggtggtgggacaggccagaccacagccccatcctcaggctagcacagttatcaatggacaaatgagatgttcaataaacgtttttataatctgaactcagatgcatagctgcacacacacacgcacacacaaatacagattcgtgttaacacatttgctgagcgcattctatgccaggtcctgcaaggccctgaagactcaaagtagagttagattgctgccctcaaggggcccaggatctggtgaggagtgtgtacagaggaggcagataca

SEQ ID NO: 193085 - DNA, 167 bp, Homo sapiens
tgtgacttctttttttgctcctgaaattattgatcaaggggatttctgaatgattttgtgttggatttagctaaaaagagttttattttcctcctgctgctgaaatgatctcacataccttcatcttagcaagtcctttagatttcatttgggaattaagatatgaa

SEQ ID NO: 193086 - DNA, 618 bp, Homo sapiens
aataaaagcaaaatgagatactactacatacgcactagaatggccaaaatccagatcactgacaacaccaaattctggtgaagatgttgaacaacaggagttattgtccattggtgatggtaatacagaatggcacagccactttgaaagacagtttgacagtttcttataaaattaaacatactcttaccatatgattcagccatccagttccttggcatttacaaaatgagttcaaaacatatatctgttcaaaaacctgcacactgatatttatagcagctttattcataatttcccaaacttggaagcaaccaacatatccttcagtaggtgaaagaataaattatggcgcacctagacaatggaatattattcagcactgtaaagaaatgagctatcaatacatgaaaggacatggaggaaactgaaatgcatatttctaagtgaaagaagccaatcatatgattccaactatatgacattctggaaaaggcaaaactatggagacataaaaagatcagtggttgtcaggggttgagggtaaggagggataaataggcagagtgcagaggatttttaagacagtgaaactattctgtaggagacagaagggtg

SEQ ID NO: 193087 - DNA, 544 bp, Homo sapiens
atacaataaaaccggtgaattgcacacttttaagtgcttaaagtgaacattatgttatgcaaatttaatcccacctccaaaaaaaattcacctccaagatttactaagcctaagcttgtgtgtgtgtggaggacttagagatgggcctggcgcccagacccctaactcctcaggttccagatctttgtacaagtcagcaacctctcgaatggattcctgggtatgtgtataaagcactagaacacacagtgggcctcaggagcaccggaatcagcgcgaaaacgcagaatgcaaaccgtactttgcaccattatttgcaacttgacagtgaccgccgccgtcactgcatgtttaagggaacccggagctgtttccaacccaggtctgacgtccttcacagtgctttgtgtgaactggcagggggagaaacgacggctggggaacgaacggggttattcgtcccatcaatggcctcagaagcatccttatcacctgcttccagagctcccgacccaaatttcctcctcaagaccgacgcggccgc

SEQ ID NO: 193088 - DNA, 364 bp, Homo sapiens
cctggctaatttttgtatttttagtagagatgagagttcgctgtgttggccaggctggtctcgaactcctgacctcagttgatcctctcacctcagcctcccaagtagctgggactacaggcatgcaccaccacactcagctaatttttttggaaattttttggtggaaacaagatctcactgtgttgcccaggctgctctcaaactcctaggcttaaatgatcttcctgtctcagcctccccagtcaccctgtcccttcattgagactctctttcctcgtgtattaaatggagaaaggaatctcatcatgttcaacggcaggagaaccacctggaagtttcacatgaggaatttttcctggca

SEQ ID NO: 193089 - DNA, 288 bp, Homo sapiens
agacccgtcgccaaaggcatttctgtaaagcatctaagtgacacgcgcaagccagacctggggtcacagcagccattgttagagttgctgagataaaaggcagttctgtttgctatttttgaaaaaattacacttaatggctgggtgcagtggctcaatccggtaattccaacactttgggaggttgaggcaggaagatcacttcagcccaggaggtcaagaccagccaggacggccgggcgcggtggctagcgcctgtgatcccaacactttgggaggctgaggcgg

SEQ ID NO: 193090 - DNA, 538 bp, Homo sapiens
tttttagtgacaggatgagagagcccttcatgttcagagggaccgagttggcgagaagcgccggagagttggagagtctgtgggtcagaacatccggcttctactgatggaaggccacgactccccagtggaatgagggcctaggcaaagaaaatgagagagccctcggggtagtgacactgtcttgggaacatggagtgctaggaaacgaaaactggaagactaggatgaactctgcaagtaaaaaaatgacactacttacacatccttctcatcccatcctcgttttttcgagaccttaaagagatctccttggttagggaccttcggttttggaaaggcactgtttttcctttttgtcaaacactcagctttcaggccacacttttttgagacagagtcttgctttctcaaagaccaacccaggctgggcttgaactgctgagctcaagcgatcctcgtgccttggcctcccaaagtgctgggattacaggtataagccaccgctcccggcctcaggtcacacattttaaagcct

SEQ ID NO: 193091 - DNA, 582 bp, Homo sapiens
gcttgttccagaggaacccatgcgcgacgcttccatcaacagcactaataatctggaatctaatgatctataatctttctctccagtttctgtccatacgctcttggtctcctcccctagggcatatgaagaaccgaatgcatagtgagtccataaaacaaatggtgtgtagatattaatatcagggtgtcaacttgtttatgcttttacctgaaagctgaagtaatctgcaactggacattaacaatagataaattaccatcttttctttctcatttcttattttatgttattatgcattcttttaaattcccacatttactggaagtgtagaagcgctttaataatgagcttttcactgatgatcttattacataaactcaggaaggaaaaatacacataaatcttgggaggacagttcatgaagactcatcatgcagacttgttaacaagagttggaatttccaaaaaaaattaatgccagatggtatcatagttttggggtttttttgttggggcagtgttcttgttttgtttatgccctgtattatcaagaaggaaaagtacaatgttgatggaagc

SEQ ID NO: 193092 - DNA, 339 bp, Homo sapiens
tctcatggacagtggtttaatatcctgttaccaaatatctcacttatttaatataaaaatttggtaaagtcattattacaatgtatttgatggtgggattggttctagaaagggaactgattcttgcttaatccatacccaacattgtattagtgtcacctggggagcttttaaaaaattattcctggatccccaaccccaggcattccagcggcatgaagctggtgttgaacctaggaatcgtaatttttaacaagctacctacttaatttttaggcagccagtctggctgcagtttagaaccattgaagtgtgtgtcttttatttcaaatttatgaa

SEQ ID NO: 193093 - DNA, 244 bp, Homo sapiens
aagcgccagctctccatcttccagcaatccatattgatttaactgtattcgtaaaattatgaatgaggacattcctctacggccataccaccctgactgtgcctgatcttgtctgatcttggaagctaagcagggtcaggcctggttagtacttggatgggaggacattcgtggtaagaaggcacaaccctcctctctctcattaagtggttctttggtcaaaaagattaaaaagattttcatt

SEQ ID NO: 193094 - DNA, 286 bp, Homo sapiens
ttttcttatgtgctagaaattacactgcttcttggcatagtcaccgataggtcatagaaaaaaatgccatatttagctaaagaagagaaggaaacttcagaaatagtctttccagattaataaaagaaaaaagtttcttatttcaataaaatattcatctttactaaacttgcaggtttctatgtaccacaaggttgaataaccgagctgcaaaatgtttgagaacattgcatattcccagccacatcgactctcttgattagtgactgcaggcaatgtctatact

SEQ ID NO: 193095 - DNA, 1022 bp, Homo sapiens
tgtaagcccaggacagtcttgaccacttataaaatggagcaatatcagagttagtgggaatataaatgaggtaagtattggaatattttaatcgcagaatagtacattatgcacccataaaatattcactattattattgtaaagtgtataatgatatattctgcagccatcaaattcagtttaaaattaaatggaatgctgaattttttattaatatgtggataaatgtttaaaatcagataaacaacaattatagtatgatctcattttgtacaagtaatcatgtatttttaatgtataaacacattgtaatttaggatttagctcaaactttttttattcatcagtacaattcactaataaaaaagtaaagtgaagtgaataatatcaaagaaattaagttttaatttctgcaatggtagaaatagatgtgattttaaatttttaattaatttattcttttatatattgtttttcaacacactttatcaagtacctacacttttttgtggccctgtttcagatgctggggatgctatggtcaataagatggctaagttctctcccctgctggggctttcatggaggtatatagtcaacaggtaaatgaattaacgtggaagatcatttccataggactagtgctatagaaacacaaacagaataatgacatagcaagtgattgggtaggggcaagaggagggatgcagaagttcctgtatgtgaagatggtcagggaagatctgaggagctaataaataaaccataatcaggatgatgtcactgaaacaaagctgtgaagagcaatttgctcaaaggcctgagatgaaaacaggctctatccatctaacaatggaaaggtgacctgatcagagtgcaggcacctggaagggtagggagagtttgcaacagcacatcccccttttcgcaaaaaagcatcagcaagcacaaacaaagaacaacaacacacaaccagacaacagagaaaacagggacgatcactggacatccacggacacca

SEQ ID NO: 193096 - DNA, 843 bp, Homo sapiens
aaaaaagaaaaaaacttgttactaagtacactgatgctataaaataaaaggagtcctttaaggaactagagacaaaagaaaaaaattaattcattgacccattacactggtgaattttggctccaaaggtgttcaggttggtaatcaatctatgacttataaagaaaaagaccttgagacattatcaaattactcttattgagagtccaagagactgtagtttagtgaaaagcaacagatttacagtcagatagacttaaaagctaagtttgaatttgagttatggcctggataacttattaaaactgataagccacaatctcttcatttgttattgtaatgagtcaaccagggaaaatatataaggctgggcacggtggctcacgcttgtagacccagcactttgggaggccaaaggagggcggatcacttgaggtcaggagttcaagaccatcctggccaacatggcaaaaatccatttctactaaaaatacaaaaattagccgggcatggtggcaggcgcctgtaatcccagctacttgggaggctgaggcaggagaatctcctgaacccaggaggtggaggttgcagtgagccaagatcacgccactgcactccagcctgggtaacagagagatactctgtctcaaaaaaaaaaaaaagaaaaatacataagcatatgccaagaggtcaaaaaattagttaccatttaaaaatgttgggccctatatagcagaccaaaactaaaaactctacagccaaagtcctctcaatgagaagtagaaaaagaaaagctacctatggagttgtgcccctacgcaggcttggccgtgccatatgcag

SEQ ID NO: 193097 - DNA, 682 bp, Homo sapiens
ctgactatatcaagcagctaccaagatggcgcagtgaaggtgatgcgcagtggagactgttcccctcgccgctccctggttcctgcagagagtcctgttggcagctcgttggaacaatggttttcccctggagtttgaggagcttgtcttgggtgtggtgcatccctacaccatgtgtacagtttccagactgctatgattttatctctcagcaatgcgccaagaggttttagtgaaaatttaaaaaccgccaaatcgcctatcaaaccgagtttgaaaagagacctcttgggaaaggacaagctaactattctaagtggtctacgatccaaagcatttcctgggctgagtgtttatcaaagctgagctttacttccaaactaagcttgggaaggatctgggagtgtttcccagctgactgggggcggggagaagaggaggatgcgagtgttaaagaacagagaaaatatcactctcttttcttttacacagttatctgctgaaatctgtctatagatatggcttgcaaactaggtgttgttttggaggagagagaggataggtctgctaagtgttaatttagaaattatatacaatatcttaattttattttgggaatggaacattgggtaagattagcttttaaatggatcagctttactcttcaaggttagaaaaatgc

SEQ ID NO: 193098 - DNA, 573 bp, Homo sapiens
attatcttggtagtcctggacacaaaaagtcctcaaaatctctgagtagtaagtgaataaatctgactggtctgcaaaccatgagagaggaatatcaggagatgaggctgcatcagaagagtagtgaataaatgaagggctttgggtgccacgaggatgataagaaggcagagaagggttttattcaagagccaaagaggaacattatcagatttcataaaggttactctgttggcagagtagaggatagattagagacaacaacccacaggaaagaagagaagttcagcagctattgtgagagtttagaaaagagaacacggtctaaaccaaaggagtgaaacagaagataaattagtgattgacaggatatgagtcccaggtgttctgcactttaacttctataggatctaaaatttcatactggagcaacactgaatgctggaatatgagagagtaaattctagcttgagcaaacttttaatggctcaaaaacagaagattcagtcttaactgtgaggttatccgctaggttgttcaccacactctttgagaaaacctcccaaatactct

SEQ ID NO: 193099 - DNA, 284 bp, Homo sapiens
ggggttctcccgtatcatttctggcagcaaatttaatgatggctattcatagagcattggtatgtatcagtttgcagttgtagctatacaggttgggcaataagacttggcactgaaagagtggcaagccctcacttagtgtcagcctccactgtgcctcaagggccactcaccatgagactagccccagatccagccccacaccttccagagcactgcatcctgagaggcacctccacagacttgatgcacacctctgtcccctcaggcacattccaaaaggc

SEQ ID NO: 193100 - DNA, 427 bp, Homo sapiens
tatggcatgggcaatggcagtagcagtgatgggacaaccatttgctcccatacaggctatgctgatgttggaagtagtttgatgggctgggagggccagtccccaggcctataggtagcacatgtgggtgggtgccagctgtggttgtagcagcaggttggattggcccaaccttagactttggaaggattgctcaggtgtgaatggtggtagactgtgttgtatgagccccactttacagtttgccttttctagactgtcatgtaattggaatcatataggccgtggccttcttagactggcttctttcacttggcaatatgtttttaaggttcctttgtgtctttgcatggcttaatagctcatttctttttgctgctgaataatattcttttgtacagatgtaccctagtttgtttattcattt

SEQ ID NO: 193101 - DNA, 194 bp, Homo sapiens
cttgacacaacttcagggttaaaattacaagcaatctatgtaagaatctttaaatgttaatgagaatttcaaattttcacatgaatgcaaacacaaataattaccagcaaataaaaagttaaggttgccaggcatgggaggccaaggcaggtggatcacttgaggccagaagttccagaccagcctggccaata

SEQ ID NO: 193102 - DNA, 478 bp, Homo sapiens
taagatgccccatggttcttcatggtgtgctttcttcctcactgcaacgaaccaagaaacccaacttgttcaactacaagtgtgttcctttggccaaaaggcactgacacaaggaagcttttcctgtctgccccaggctggctgaggactgccaccttctctgttccaaagatgtcctgtaccttacagcactgcattatgcaggctatattgtattgaaattctgtccatccatgtctgtctccctctggagaccttgggccccacaggaaccatgttttatttttttcctcttattcatttttaagtcctcagctgacaaagaacctaggtcatagtaaagtttcaaaaaaaaatgtttaaagaatgaatgagtagatgctgcacatttcttgggtccaagatttaaagatgcagcttcacgtaacacatcattttacaacactgtcaactataacgtcatgtgctttaagaatgc

SEQ ID NO: 193103 - DNA, 574 bp, Homo sapiens
ccaagggagtcatctttgcatttgcacagaggagatgggaaaatcacaaagcccttaaggtccagaagaaatgagtgtcactacgttgggctcccaggctgtgcaacaagctgtggacggagatgtccgggcagggagcccggtccagctccccacccatcgcatcatggagtcagccgtctcctctggggactgcaccctctgggtgctgagaaatccaaatggctctttctcatgcagccgccccaagtgggcaggatggcccttctcttgatttgtttcctgcttactttgtgagagtcaaagtgcatccttcaggaccaaagtggccaaggggccagcatgttatttagagtgatcaaaatggaccattttcaacttggccctatttcagctccagagctgtggtttccacttgcttttacttatctgtattttctaacatttctttagcaaatttgtattactttggcaattagaaaaaatgaccagtaatttttataaaaggatttgtgtttgatttcctttcagaaaggcactttcatttattaaaagatcacaatgagaagtgaaa

SEQ ID NO: 193104 - DNA, 546 bp, Homo sapiens
aatgtaaatattgaatctgcaaacccaactctatgaagtcatgtctttttgctgaatatgaatcttttaaaggccacagaagaaaaccttgctcaagactacctgttcctctgttagtcagagtcattatcactaagttcttagaaccagcaagttttagaaccattgtcagtttcttttgctgttgttgaaagcaacatttattaaatagctacatggtcacaaggtttgatatccattctgtcatttgattgtatttctgcaactctgagtactcctgttttggcacattactgctagctttgtgaaatgtcaggtcttgttttctgaaactaccataggtggagatccaggctctcctgccttgttagatccctgaatactgcccaaactggagctgtttacctttgactttcctgtgggcctcttggatttgttctgttctggcgtctagcaatcagatattttctacttaggatgttgtcctttcagcctcactgctgaatgagaagcaatttcagagctgccattccatacatctaactt

SEQ ID NO: 193105 - DNA, 384 bp, Homo sapiens
tcgatcaaacccaaaattagtagaagaggccagcaatttgagaggctgaggccggctagattgcttgagcccagtaatttgagaccagccttggcaatcatggcaaaacctcatcgctataaaaaatacaaaacttagccaggcgtggtggtgcacacctgtagtcccagctactcaggagtctgaggtaggaaaagatttcttaaacacaatgaaaaaaactgacaaactggactaaattaaaggtagggccaggtgcagtgttcacatctgtaaccccaacactttgggaggccaaggcaggaggttcacttgagcccaggagtagttcaggactaagctggccaacatagggagcttctgtttctagaagaaaaaaaaatt

SEQ ID NO: 193106 - DNA, 296 bp, Homo sapiens
acagggataggaagtaaatgattatattgttatatactggctggattcattttatattggatgatttttttcatcttatatgcccctaccataccaaaagtacctattctagtacttaggccacaaacttggaatgtagtggagcatagtatcatggtaaaacccaggccgaatttgggccaggtgaacaagagcacaaaggattgagggtgtttatgaaaagttggatcatgaaacctagatcatgcatctaggctgatttaaggaaggaagtggcagaagagggcttttagtaa

SEQ ID NO: 193107 - DNA, 180 bp, Homo sapiens
ttaggcacaattccactcttcgctattctaagccaaattcatcctagacagagcaacagtagccacgggttcttctccactcctatgaaatatcccaagtgaggtaaatattttcacattccagctgcttgtaaaggtgtgaaacaggacgcaattaaggtcccagaacattttacttaa

SEQ ID NO: 193108 - DNA, 203 bp, Homo sapiens
acagtaatgtcagtgggatctttgagccagggcagaacactagcatttaagtgtcctaaagtaaattagaataaatgctttcttaataccaactgcttctctttcgctgggtgagttagagaacgttcaagtttggcatctgtctcaggtagaaggcaactgagaatacagctctgagtcagatatctgtgcacttgacacat

SEQ ID NO: 193109 - DNA, 454 bp, Homo sapiens
cacttgggttttacactttttcatagtgtatgtcttggcattaatgaatcaccttatattaaacagaattgggagcgataataggactgcgctcataagacagaagactgaaagcaatttgatgaggatcttatccttctttcctttttatggaattccagaaaaaacctctatcactggattatagttgatttcaaaagtttcttttacagtcattttccttatatccatggccaattaccaaactaaaaatggctccctctgttctatatgaaagtttcataattccaaagttcaatattcatcactaagtcctcaacgagggaagatttgaatacttgttttaagaaagttttttttttttttaaatcctcaaggtaaaagtattttcaaagtaatcaaacctgggcttactcagtggaaaagtggtaattagtatggtctcttttgtgaa

SEQ ID NO: 193110 - DNA, 230 bp, Homo sapiens
cctgacctcgtgatccacctgcctcggcctcccaaagtgctgggattacaggcgcgagccactgcgcctggccaagaatttactcttataattaacaatcctatatttagcatggttttagaagaaaaaaaataaagattagcccacttaaaagctatttagttatttaaatgcaaaaataaaacattctcttgtgttccagctgtggatgagaggggtaccggagctct

SEQ ID NO: 193111 - DNA, 304 bp, Homo sapiens
cagttggaaagcgaagagttgccactaaattgccggatataaagatgaaagatatcttgataaaacagggaaacgatgcaggagtgtgttatctaagctttagtgccttgatcctgtgcattcaatttttgtttcttcaagacatttaagctatgaggtgcaaagaaagtattagtgaatatctattatgtgtcaggcagttgctgaagtaaatcaatggacagtatttctcctaaccttcaaaaagtagttttctttctccttctctactccttaccagctgttctttcttctgtgctcctga

SEQ ID NO: 193112 - DNA, 219 bp, Homo sapiens
  misc_feature (25)..(26): n is a, c, g, or t
attacgaacttcgagtctcgtaccnnaacattcgtgtcagtgcatgcttggatacaaatattaatgaaacaccgtccctgtcttccaggaccttatagtagtggaggaggccaacttaaagtattatagcaagggacagtaatgggagacaggaggaggacaggggctcagggcagcaaggatagggggcagggctggtgaggaggacacgaatgttca

SEQ ID NO: 193113 - DNA, 385 bp, Homo sapiens
tcatatgggtgccattcaccaagatagagtgccaaagtcaaagctactttagaaaacactgggatgggtttggtcctgcacttaatgaatctgagatgcctgaaagacagctatgagctgaggtgtctataaggggactgaatgtaagggtctgagctcatgagagaggtctaggaatgggtggagagctaatgataaaatatattacacaccagctccaagagctttggaaagacagaagtggaaccattaactctctggaagcctgggaaggattctcaaagaagatgacatcggattggagtctggaaggagaaaggagggacctccagggaacaggtgagatgggatgaggagggagagaggagcattcctagcacaggga

SEQ ID NO: 193114 - DNA, 662 bp, Homo sapiens
ttcctccaagagtgtttcctttgcattcacaacttggctagttgtttagctcaagaggcctagcttttggcctgtctcaacttcctcactaagcttaatcatttctagcttttgatttaaagtaagtcgtttccttttatttgaacacctaggggccattttagagttataattagcccaatttctatatcattttgtctcagggaatagaagcgtgagggagggagagagttgggggaatggctggttggtagagtggtcagaatacacacaacatttataaataaagttagccatctaatatggttgtgattcgtggtacctcacaatgattatgatagtaacataaaagctcactgaccacaggtcaccgtaacagatataataataatgatctttgaaatattgtgagaattaccaacatgtgacacagagacatgaagtaaacatatcctcttggaaaaatggcaccaatagacttgttcaatgtaggattgctacagacgtgcaatttgtaaaagcacaatatctatgaagctcagtaaaagtgaagtgcagtaaaacgagatacgcctgtactttgatcctaacttagctgtattcatcactcatgctgtgcaacattttccaagttgatttctaccaaacgttgtttccaggtg

SEQ ID NO: 193115 - DNA, 508 bp, Homo sapiens
ttataattaaactcttatttcaaaagagaggctttaaaagtcaatgaaccaaacagaaataagccctcacatcttcaatatcatactctcttgatgatggacttgtaagacacaaagccccatgtctaacagtgtaaggagagtaaaaggactacttaaatattaagccatgttataagatggtgttgctgtgattgatgtattatcttttatttatggtaatggcattttgagatcaagttctgctccttgaattttcatgtaataagagtctgtggtgaagatgcagcaacagagaagctgctacttgcatcaaatttatttttagttcttttcaacttggttaagaatgattagactcacgcttttattctattcttgaccaaagtgtgggtaatcccagcactttgggaggctgcggcaggcagatcacgaggtcaggagatcgagaccatcctggctaacatggtgaaaccccatctctactaaaaatacaaaaaaattagcc

SEQ ID NO: 193116 - DNA, 429 bp, Homo sapiens
tgcctcagcctcctgagtagctgggattacatgtgtgcaccaccatgcccagctaatttttgcatttttagtagagatggggtttctccatgttaaccaggccggtctaaaactcctgacctcaggtgatccgcccgccttggcctcccaaagtgctgggattacaggtgtgagccactgcgcccggcctgtctactggaattttgagtgggcattcctccatctccctaactagatggataagcttcttgagtcaggaatctttttgtattcacatctctcaatagagtacaggatcttgcacatagttggcccttggtaaatgaaaggtcattattttctttttctgctgtcctatggttgactctttaggccacagcaacatcctggacttgaatctgcagagaagtattccctggtgcttgtctg

SEQ ID NO: 193117 - DNA, 423 bp, Homo sapiens
  misc_feature (3)..(3): n is a, c, g, or t
  misc_feature (33)..(33): n is a, c, g, or t
ggnccccccccccccaaaaaggggtttttcccnccaaaaggggtttttattagcggccagcacccgaaaagaaagtagagaagttctccatattttatttagcctaagtttagtcttttgtatcatgacagatcctagaaagataaagctgaatgaggctgaattgaaatccccactccagaatcctcaccacaaactcctggcattattcacctagggcccttcacaagcataccactttgatcttcaaaagacacagggatataactttgaagtcttttgacatcctagtaatctacttcacacagatttatgagtgtgtacctctggttaccagcatcatctgtcgcattccctgttcttacatcttttctagctctgtacttgattcacttttcccttacttaaaagaaaaaaaaagcg

SEQ ID NO: 193118 - DNA, 188 bp, Homo sapiens
ttgaagaaatagtgattatcaaataacctggcaacagaggaaacaaatcacaaatgcctaatcatttgtttctttgattcaaaccaataacctgtcttcttaaccttgatattttttagaaggaaatttgcaaatcaaagtctatagtcacacacatacaggaatctctatctccacattcagaaaat

SEQ ID NO: 193119 - DNA, 424 bp, Homo sapiens
tgatgttatcgcccaacacaaggagactcaatcaaatgaccattcccagcataagaaatgagtacgctctttagagagccagtcgcttctactacactcccaactttcaaccctcactttccgtcatcacaaacagataaaaagacatcagtggaggatatgatgttcaaatctttcccagtctcttacatcgaagtatgtcaggagctctgttacacaacaatgtaactgcaaatagttgaccaccactcccggagtaagtcaatgcatttttgctaatcaaatgtttacaaaggaacaagatgcacaaaactccgtctaactctcacaaggagtcagccaggagttctaaaaattcatgtgcagttatgcacttcacccgcatcgtcacttggtgttggggataagagatcctctaggcaaa

SEQ ID NO: 193120 - DNA, 297 bp, Homo sapiens
ccaatttgtacaaaatttctaagatacacaatttgcgagatttttcaaattgttccaaatcttcaaaaacctttctaatatatatgtatatttttaaatttgcatataagtggacccacacagttcaaacccatattgtttagggttacctatttgttctattagttactgaaagtagtatggaaaccttcaacttgtaactatatgtttttctgtttcttctttagcctatcgattttgtttcattcaaagttttgaaactgtttttagatgcatgtatgtatgggtagtcacaga

SEQ ID NO: 193121 - DNA, 652 bp, Homo sapiens
tttcaaatattattatttcactcagcctcttccttgagtttcaaagaagaaactgggatgcagggtaggaatgtgcaaggaagtgaatccgctgttagcttgatggagtttgttttgtaggtgacctgccctttctctgtagctaactttaaaattctttctttcattttgaccttagaaaatctgatgatgatgtgtgttggcaatggtctcctgtagaatcttgctagggttctctgtatttcctgaatttgactgttgacctctctagcagggttggggaagttttaatggatatcctgaaatatgctttccaagttgtttactttctcctcctcccttttatggatgccagtgattcataggtttggcctttttacataatcccatacctcatagaggttttgttcattcatcttcattcctttttctttatttttgtctgactgtattatttcagagaaccagtgaatttatttctcagcttggtctattttgctgttaatcttgtgattacatgtgaaattcttgtattgtgtttttcagctctgtcagatctgttagcttcctttttataccagctatttcattcttcagctcctttatcattttattatcattcttagttgccttggattaggtttttccatgc

SEQ ID NO: 193122 - DNA, 292 bp, Homo sapiens
ctttgggttcttaacatccaaagagtccatctgaaaccaagttaaagcggcctgcagattgaatctttgttctccatcctcttaaagtgatacgccccacctccactatagcacattccaacataacactgttcacaggtatgctcgcttccccaactggagctagctcctcaaaggtggggtttgttctttcttcgagtctccaggatctagcagaatgtctaacatatatacagtatgtttgtggtaaatgtttgttaaaagagtgaatgaattaagatgaatttatatt

SEQ ID NO: 193123 - DNA, 414 bp, Homo sapiens
ggcaggataatctcttgaaccgggggggtgggggttgcagcgagccgagatcgcaccactgtactccagcctgggcaacaagagcaaaacttaaaaagaaattcaagtgaattgaatccagaaaagtgtgtgtatgcatatattatatattatatatatagcatatatataaaatatatgtagtatgtatataaaatacattgggaccaagcaaggtttattgcaggtacacagggctagttcaatgtcagaaaatctaccaataaaattcaccaccttcatgcaagacaaaccaaaacaaaacaaaacaaaacccaacatcttaacaaatgttgtaggatgaatgcagaaaaagcatttattagtccatgataacaatttttatcaaataagaaaataaaagtgaacttctta

SEQ ID NO: 193124 - DNA, 172 bp, Homo sapiens
ttctgccacccagagggtttctcttattgtagggctagcgttctccaaggatgaaggtgaggggccatagggcatctgtgatgcctgcaaggtaccctaggagctgggcttggtgtcctggtaacttgagaagacaccaagctcatggcagctacctgggcctatgggtgat

SEQ ID NO: 193125 - DNA, 317 bp, Homo sapiens
aaatgtgcaaatccagcctctctgttgcttttccttttggaatatttctaatgcaccaaatgcggatggtgaagctctagattcattttccccaggaaaacatgttttctttgcttgcttaagtgaagctcagtggcaaaagttttggctgactaggagagttgatgttggcaaatgtgggtagagctgatgaatgccatgatcctcaccaatagtttgtacaccctaagaaattactaataacactgatgacaataatagatgctaccatttaattagtatatactgggtgcaaggcattacgctaagcacttgac

SEQ ID NO: 193126 - DNA, 489 bp, Homo sapiens
tttcactcactcattcatttgttccatcatacactcacaggtttttgtttcatgtgccaagctagtgaggaacagagacaaggcacccatacaaggaaaggaaccattacattacagaatagaaaattcccttttctcgaaactgtggtctcctgaaggcagtccccttcacctggatacagtgtggcacttcttagatacttatgaaatagtagttgaattaatgaaggcaacaggctcagagaaggtaaataaattgctcaatggaaactgctgattagtttacagcagagctaggcctgaattcaggggctcttctaccacactgagctatccttcttctgttacgaagacactgagtaacgggacttgcctaattggataaccaatttggaattggggacttcctgagttcttcattgctgagcaatgtctggaaagtggctggatctccagggttacctgaattattaaaaggtaagaaaactc

SEQ ID NO: 193127 - DNA, 461 bp, Homo sapiens
gcagacagcagactctgcagcttcagaggctggcagtgcagtgagctgggctctaaaaggcagaaaggttctgggacaagggacagcatgggaaaaagccgaggcgtgtgttgggagcagtggggttttgggtgggttgtctcctggagagggagtggggagaactgggagatggagccgggggcaggcttgatccagactgggaggtgcaggaatgccggggtgtgaagagcgtggtctttattctgggggctggggagccacagcacaatcttgagcagggcagaggtcctttgggagggtaagctcacaaaaactcagggaggcagcttggatgcatgcacgctccggccttgaccttgactgtggtctgttgtatccacagcacctgcatactgttttttcccgtttaaatgagctcacttcataagaaataaaactacagtgaaaacaacactgga

SEQ ID NO: 193128 - DNA, 377 bp, Homo sapiens
tcgatctcggcacccgtcagacgctgaactatgtgaattagaattgtaattactagatactagtttaaatcttttgacattaacattaaactgtttttcacctacaaagatgacaatttcatatggttcttctactgaatagatcacaagggaaagaattaacgtctttctgatatctactcgtgaacatgatgtatctctccatttacttaggtttcttcaatatctttattaaagttgtaactccatgcaggtattcaatatatgttgtaagatttactcctagatatcttgcttttttttttttttttttttgggcgggggaaaagggaactttttcctaataataaaccttcaagttggggggaatgcccaac

SEQ ID NO: 193129 - DNA, 537 bp, Homo sapiens
tcgatctcggcacccgtcagacgctgaactatgtgaattagaattgtaattactagatactagtttaaatcttttgacattaacattaaactgtttttcacctacaaagatgacaatttcatatggttcttctactgaatagatcacaagggaaagaattaacgtctttctgatatctactcgtgaacatgatgtatctctccatttacttaggtttcttcaatatctttattaaagttgtaactccatgcaggtattcaatatacgctgaactatgtgtgcttttttttttttttttttcccaaaaatgaatttttgcctctgtggccaagcttgagtaaaaagggggcgatctggtttaattgaaacttcggcctcggggttcaaggaaattctttggcctaaaactctggagaggttgggattacgggggggcacaaccacccggggttaattttggctttttaagaaaagtgggcttttcgcattgtggcccaggcgggtctaaaactcttgtcctaaggggattaaccccct

SEQ ID NO: 193130 - DNA, 211 bp, Homo sapiens
atcaatgtggacttaattttccattttaaactgttatcctttttcctgttgtcttctcccattcatgaaacagtaacgccaaaaacacagtctaaccattagctttttacatgtagaagctgttggcacagtttgtgagtgagcaaataaaaggtgtggatggaaaagaaatggaatttggcaaagttggtattgatgcaagtggttcctt

SEQ ID NO: 193131 - DNA, 159 bp, Homo sapiens
aaactgtgacaggcagagaagttttcagatggaggaaaaagcacctgaaagacgacaggtttattttttgagcatttcaaatatggaggtacctgagatatccaggtggagattgtcaggtttgtagtctgagacatgggagcaaattgtaaactagaa

SEQ ID NO: 193132 - DNA, 332 bp, Homo sapiens
ctttacataaaatcagttaactatacacatttgtgcctatttcaggattctcttctgttacgtggatctaaatgtgtctccttacaacaatgctaaactgtcgttactacgagagctttatagtcagtcttaagaccaggtagtgtgagtttctcagcttcattctttttcaaaattgtttccaatattctaggctccctgtatttccacataaacgttagaagtagcttgtcagtgtctaaaaagagcctgctggggttttgatgattacaatgaatcttacaacaatttgggaagagatgacatcttaacaatattgagtcttccaatac

SEQ ID NO: 193133 - DNA, 216 bp, Homo sapiens
gcctgttgaactctaacctgttcagtatacatttgaacttcttatgtttctcctttgttgtgtctgtccttgattaaatcacctgactttctttaattcagcagaaatttactgtcttttctgtgctagacattcttgtaagtactggggaaacagccatgaacaaaaacagttaaaaaattttttcagctaatatttcttgattgggtgcggaga

SEQ ID NO: 193134 - DNA, 643 bp, Homo sapiens
ctcccagttttgtgtcatctgcaaatctgataaacaaaagctttcattttcatctatgccgaaaaatatgtaggatgagaatgggctaaataacactagtgctctcctggcaggtaggtaattaactcaatctttggctacagttgcttcaatcagctataaatccatgcaacaaggaagtcgggcgcagtggcagaagctggaagactgcctagttgccaagtatctgatgtgctcttgctattggaaatacaacaaggaatgacacagacaacgttcttgtccaatggcacttgcttacactgtaaacaagtaaaaaaagaaaacaagattaggctgggtgtggtggctcatgtctataatcccagaactttgggaggctgagatgggcggatcacttgaggtcaggagtttagtccaggctgggtgacagcgagccctcgtcacttaaagccaacctaagagaagagcttatccttttggaaaaacaatagaagacaattctgaaaaccaaattctgaacataggctagtatagcaagcaagcagggatagcatagagccatttgctcaacttccagaaagagtactctgttcatctctcaaaaatctgaaaagggccggtgcgtggtggtcgcgctgta

SEQ ID NO: 193135 - DNA, 577 bp, Homo sapiens
ttgtatattcatgcatgcattggtagcattgtaaatgctctttactacttcagctacttaccctgagaaggtcttacacacccctcatttttactttatcgtttaaggctctcagatctaactcaaatgtgtcaccatctttttcctgtagctcgtactaataacatttgaacccctcccttatcccaacttctgtagcattactttactcatttttattcctatagcatttcctcaactctaatatgtctattttttacattttaacctctgaaattagggtacttcttacaattcatgggatcttagttttgattaaacaaggtacttccattctggtggagaattgagattctgtgcttgccttgcttctggaactttcattcttgggtccatatctctaattcctcttccagcacgacaactaataatttgtgctcaaatgttgctaaatggaattaaaatactgtgtctggcttttactatattcaggggaatttcaagggcatgatttgttctgaaatctatcaataataacaataatgattagcatttagagagtctttattttgtgcta

SEQ ID NO: 193136 - DNA, 581 bp, Homo sapiens
tcatgtgcatgtatcaaatcagctgaggatattattaaatggagattcagattcaatagttctggggtggcctctgggattatcagtttctaacaagctcttaggtgttatcaattctcctggtccccagaccatagttagagtaaaagagtatagactgcatttagcttccagattttctctttcaaggaaaggagacagaactgtcattgtaattcttcctgtggtccaggcactctaacgttcatcgtctcttctaatgctcttacaaatcctgtgaggttggtgataatagaagttacctcctgaagacgacattcacaagcaggaccgaccgtgtagaccagttttctcaaactgaataatgtacttcactttttaataaggaaaaaaatctcttagctcctcagtttttgcttaatttatatttattataatgttatctaaatatatataaacataaaactaggtataaatgctttatgtttatatgtcttgcacaagtataaaaccaaaacaagtttatgggttaacacaagcaaaactataaaactaataaaatttaaaatagtattaaatag

SEQ ID NO: 193137 - DNA, 554 bp, Homo sapiens
gccggttatataaatgatgtcaaatccaccaatggactaacacgcagctaagataaaggatgggacaactccatgtgtgactcattctatttgaattatggcatatttacatattacatttttaaaactttcaatgtcaaagaaagcaaagaaagaagaaacaaattacaaattttaggagtaaacactaactcaaatgtaaatagtatggtactaactgaacatgtgtcagctcaattttgagtctctacaagtcagtctaaatatgctgcgcagacaccaaaaagatcagtagtaaaattatttattagtcctccacctccagaaattgtttttgcctttgcatgacctgtgctttattactgcaacatagtcatatttgatagcttaaagaagagacattaccacttaggagttgcttcatatatttcctggtcagatttgaccaaagaggatgctattgccatgagacaacaaaataaataaataaatgtgttctattataatgggaagctgactctgaagactatagatactatacaaatgtttcaact

SEQ ID NO: 193138 - DNA, 387 bp, Homo sapiens
tttgctatcatgacgggtgtgctcttatagctgtcttaggtagctcgtctggtttcgggggtcttagctttggctctccttgcaaagttatttctagttaattcattatgcagaaggtataggggttagtccttgctatattatgcttggttataatttttcatctttcccttgcggtactatatctattgcgccaggtttcaatttctatcgcctatactttatttgggtaaatggtttggctaaggttgtctgatggtagaaccgactagtcggttctaccatatgaggacagatgcaatgagggctgtgtgcctaaatgaatacttttactcttgactaaattagtctggcataaacacaagactgctagctttcagtacaatt

SEQ ID NO: 193139 - DNA, 197 bp, Homo sapiens
ctagtatattagattagatcgatggaaaaaatgcaaacaacaacgctttgatttccttggaaatttcatttgttgaactaagaaaaagtatccctaaaaaatttacatgagcacaaagtagagtgaagggttttgtgtatatgactatgtatcttaatactctaaggtgtttgccaacagtttcttaataccgaggt

SEQ ID NO: 193140 - DNA, 197 bp, Homo sapiens
tcaaggttctacaattttcaaaggcacagctttaacaggctactgaatacctacctgtctagtgctgtggtcaaagacagtttgcacacaggggtcagcactgaactttttttttgttttttgagacaccgtcttagtcacccaggctggattcatcgcaaaataaataaataaaataaaataaaaggaggttggct

SEQ ID NO: 193141 - DNA, 118 bp, Homo sapiens
aacaatgatatccgtctttgaacaaagagagttgaaagactggcaaagaaaaaaaaagaagcaaagtgtaaatacccgtttaaccacaactggccagactttgtgaagttactgttag

SEQ ID NO: 193142 - DNA, 311 bp, Homo sapiens
agaatcaggggactagagtggatttcatctactctaagtggaagtagaaatgtggatgtagacatccatttaaagccaagttttcaaatacaagtcacctttgctgcttggtgacactagacagtgctacagatgtcttattcatctttgtgcttttagcatggtgcccagcacctggagctcactcaggtaatatttgtgttattgccatgagtaacatgtagaccaataatgaatcaacagatcattttctgcagattatcatcatttgtggccttctgtttctcattttcttagttgggtagtcacag

SEQ ID NO: 193143 - DNA, 209 bp, Homo sapiens
gccagctgggaaggaagacaacctaacaaatttggtcttctttccctttgttttgctttttacccctaacagccttttgcttatccaaaggatatggacaccactggaatgtctctctttgtcctgacacgaaaataaaaattaatcgggtaattttaatacagtacattcttcaagaaggtgccaggtcgccgctgtttccccaaacg

SEQ ID NO: 193144 - DNA, 335 bp, Homo sapiens
ctaagggtgtggcctggttcaattactattgagttctgccaggaagaccaggattctttttatcaaaggcaaatagcttgccagaggcattttgatttgataagaacataccaaaatatagcattagctgtccctgacacattactccactgtttgttcaagagtggtgacatttaaacagcagtaagtgtagaggaaagaaaggcagcctgagaaaaggtgtgagtttcctgtgtcctggtagcatcaatttcagccatgatacacttggcaaggactgttatcaaaacactgacacagatggtgtcaaagtgaaggagggggacctcgttgtc

SEQ ID NO: 193145 - DNA, 200 bp, Homo sapiens
gcactttgggaagccaaggcctgaggtcaggagttcaagaccagcctcaaactgtcttcaaggagaaaccagacctctactaggagaaaccccatctctattaaaaatacaaaattagccgggcgtggtggcacatgtcaataatctcagctactcgggaggcggaggtaggagaattcgcttgaacccaggaggcggag

SEQ ID NO: 193146 - DNA, 340 bp, Homo sapiens
tcctcagccaatcaaatgtgaaattctgtcaattcagcttctgaaaactgataacttgcatttgtttctccacttcttccttaatttgaatgttcaccctctaacctggactaatgcagagtcattaacagctctccctctctttggtttactctgttccttccagtccatcctaaatgcacgcgtgtcctaaacctgacttgtcactccgtgcataaaggcattttaagttcctctactgttcaaagaatttggaccatccttttaatacaattcatatagagagactcatggtttctgcatgggtcttctcatatccaggcactgcagaaaataactg

SEQ ID NO: 193147 - DNA, 354 bp, Homo sapiens
tttgatggatgtagtctattctaatataatgtctttcaagtgtttgaaagttactacttattcaaaactcaactgtctggcagcttttcttatcctgaactctgtgaagaacttcggggacaggaggtaaaatgtctttgaagagtaagaaatccaaaacttcatgtatttacatgttctggtcttgtctcataggattcttctttctccttacataccctcctttaaatccgtacctcccccggtcttctccatcttgcaaatggcaccaatgtccatcctagacattgatcatcccagaagtctaggagttgattcttctcatttcttcagttctgttgtgcaagtcttcaa

SEQ ID NO: 193148 - DNA, 235 bp, Homo sapiens
  misc_feature (1)..(1): n is a, c, g, or t
ntattatcccaacaccccaggttcctctttatctatgatcctccgtggtacttctacaaccacctgtacctactctatccgtgttgggcgtgatgttatcgcccaacacgccccaacacaggcagagctaggattcaaatctatcttacctagttccaaagctcatccatgctcttctctctatacctcaccatctctgaacaagagttcaggctgggtgtagtggctcacatct

SEQ ID NO: 193149 - DNA, 335 bp, Homo sapiens
ctgggcatccagcaagactccgtctcaaaaaaaataataatatgttttaacataaataaacatttatataataaaactcattgctgtcacaaggccaacatacaatccattatatgaaaaatttgagggactgaataatttattgaggatctttttgtgtgccaagccctcaggtgggtagtgtgatttttcattttacagacagaaaactgaggtccagagacgttaagtaactttcccaggatcacacagctggcaagtggtggtgagttctttagactgtagagcctatgttcttttttcttatatcagaatttcctaaactgtgttccact

SEQ ID NO: 193150 - DNA, 300 bp, Homo sapiens
agctgttcagaggatccccgaggaggcgaggtgctctggaaggcgtgtgcatgtgacccaggccatgtcactgccaccatctccatccaggctgtgggtactgggagcccggaagcgccaaagcttccaactttgccatgcgcttgtgcctttaattgggggatttcaaagctgtgagtggaaatccattcagatctgagctgtttgctgaatccgagatttctgtccagggggattgggcgaacgtaatgtcttatgcattctaggtgatgctcaaagatcttgggggtaccgagctcg

SEQ ID NO: 193151 - DNA, 395 bp, Homo sapiens
ccaactcctttcaccattctgacttacagtttggaaacactggtttaatctgttcccttccatggtatagatctagaaaaaatgacagtaattaaaatcatgcccaaacaaaacacacttgattaatgaccaagtcatgactagaatccacattcatgataaagggcctctttgcactgaacactctgaggcaggagttgaactgccttttcctttcctcttctttcctcttctcctccattcgctgaatcccacaatgtgtcagataaaagtagtgaccagaagacaagatccaatccatggaaaagtggagaagtggagaatcagagaaatctgtggtcacagacatgacacaggacggagtgactgcaaacacgtgggcagagtgaaaggaa

SEQ ID NO: 193152 - DNA, 455 bp, Homo sapiens
tgaaaccctgtgtctttaaaaaatccatttttaaaaagaactcttattcacatactttaagtaaaatgctcaaatgtaaaggaaaaatgaaaacaatatgtgataatatgcctttcaagatacagatgcttaggaagttatttaaagaagtaatgaagaagtcagatactctataaatgtgatggcttcaaatgcaagtccataacagacatgttgtattgaagttcagataccacaagcagtattgccgtcaatgttgtttctttttgaacagctcatagtttcaagttccaagcaattgtattactggtgatttcagtgtgtatgttaaaatcatgcaaaagtacttagtacctatataaaaattgatttagcttctacactcaagtaattataaacaggtttttcttttgggacatttgacagttatgtgaaaggtgagtcttcgttgtgta

SEQ ID NO: 193153 - DNA, 434 bp, Homo sapiens
aaaggcaagacttccgcttccagaaaaggtgaagtaacgagagcaatatttatcctcatacctgaaacaactaagaaactggatgaaatatataaaacagtttttaagatactggccacaggcagcatgggacagtgatgtgatccctgagacacggcaaatgaagaaggtggcctatgactggcctagcttgctgcctagggaaagtttcccagtcacagaacagggagggaaacccagggggaactcagaggaatacctttacttgaggagccagagctagattctgaaaaggccaaggaatcagaatttgcagcatacagtagtaccaagagagaaaagagctgcacagagaaagaactccagagatctgtaggagaccctctgagtattcagctgagttcaaaaacagcacgtttatgtgagaaaactgc

SEQ ID NO: 193154 - DNA, 552 bp, Homo sapiens
ttcagagaattttaagaaatcagagcttctctgggctcccatgatatgctgcctttccccatcatggcacttgccttgctataatcacacctgtccacttgtctgggtctctaatacctgagggtagcaactcaatttcccactggtagcactgggcttagcacagaatgtaagagcccaggactcctgtgataagattacccaggctctggtgagtaactgagtattcttatataagtcactcaacttcttggggtctcagtttcttcatctaaaaaataagagtcttggctgggtgcagtggcttatgcctgtaatcccggcagtttgggaggctgaggcgagcggatcacaaggtcaggagatcgagaccatcctggctaacaaggtgaaaccccgtctctactaaaaatataaaaaattagccaggcgtggtggcaggcgcctgtagtcccagctactcaggaggctgaggcaggagaattgcttgaacccaggaggcagaggctgcagtgagtcgagatggtgccactgcactccagcctggtgaca

SEQ ID NO: 193155 - DNA, 259 bp, Homo sapiens
tttatgaagcagtacaccatcatagatactatgagctgaaagttcaccaaactctctatcccaaaataacaataaggtatttatgaagtgattcgttccaactatttgaggcaaaaattgtccagcaagtgagagagaacagaaggaatagttggcaaaatagggaatttgaagtctgaggttatgcataaggaatgtgttatgggcctatagtagaaatctcaaatcagggattagggaatgtttactcagttctgtt

SEQ ID NO: 193156 - DNA, 619 bp, Homo sapiens
ataaaaaatttttgctgaaagcactgttttgagagaccaactctgtatcatctagggatgtactcttattatagtgtctgacctgatccagaggtgaagaagtacctctatgcagtcctttaatgttacttctcattaaatgtcacttctcattaaatgtcacttctcagttgggctattactggtagtatgacaggtgatatcttgagattgtctccttttcagaggacctggaattccctatgctttaaaaaccatgcaggtataacaggaaattttttttatttttgttgtcttgttatgaaacatatgtaatttaaaatgaggatcatatttgcttttttctttttagataaggtgttgcaatgacaaataagtagcatattgcaaatacaaacagtattttgttttggaaaatagtttaccagttgtcccagtgccttcgttgagtaatactttttgtcctaagttttgatgccatctctattaatattttgtgtatacaactgcttttcccagttcacttatttatgatagtacctatattttaatattggaaggaacagtccatctttactctttaaataggtttttggcttttcttaattacattcatttt

SEQ ID NO: 193157 - DNA, 411 bp, Homo sapiens
caaaacgttggggttcatgttacctcttttgtccagtggtttgtgtgttcccttctcactgaattggatttgacattcaatttgaattgacagtgaacttcggggtaattcctttcagaaacctgaatcattttaggatctgggaagcattactctgtggcaggggctcttaaccaaaaagcccatcgctagaattctagggtctctgaatttggatgggaggaaaaacaaaacaaaacaaaacaaaaccctttattttcactgtgccctagctgaaatttagcatttccttcaattatgaatatagacagcaaataatggttgtatttgaaatgtgaaattgtacttgtgaaacatgctactggcccctagattttatgctagtagtcctattattcagtgttattaatg

SEQ ID NO: 193158 - DNA, 398 bp, Homo sapiens
caaattgaaggaagtgggtgagagagatgctgctaattacatctatgaataaagtgacacagtgcaccggctctgagcagagaccaacacaactcgagagagaaaatcagtctgtcatatttgtacaaatatgtgcacttcgatgataattaccatagtcattgtttactattgctgcattatattaattatctattcagtgatattaaatacataactctaaacatcatccccgaacaaattaccttttatcaattgaaacaaaccaattaaaaatttcaaaatgcaaccatgtaatcaacggcttactacacgataattatgaccaaaatgccaattaatgtgttaatatatgacctcaaatctacagaaacaaacaacaaaaaaaagcagcctca

SEQ ID NO: 193159 - DNA, 476 bp, Homo sapiens
tgattctcctgccttggcctcccaaagcgctgggattataggtgtgagccactgtgactggcctctttttccttaaaaaaataatttactactgtcagtgtaccatacctgttacctgttttcttatttctttctgatcttctgtgggcttgaagatcatataagcaagcttttatgtttgtagtttctaatctagaagtgaataggatcatatatgaggagaacataaatcacccagtaatttacctgtagttatacaaagtagttattaggttggtgcaaaagtaatggtggttttgcaattatgaatgacacctttttaaagttgaggagaaatctctttgggtatttaacttggaggtagaatttgaatagcaagatggattttattttttctaaggtttggaggatgtgtaccataactgatttgtatgtcatttttgttgttttgattcaccttttacaattcagaattt

SEQ ID NO: 193160 - DNA, 435 bp, Homo sapiens
gattttaggatcaatctgtcaatttctgcaaaaacatttaaaaacataaagaaaaaaaaaaagccagctaggatactgttaggagttggattaaatttgtgtgtcagtttggagagtgctgccatcttaacaatattaagtctttcaactcatgaacatgactttccacttatttagacctttcttttttttcaaaattcttttatagctttcattatgtaatttcatgctttaagcttattcctataattttctttttgatgagattataaatggaattgttatcctaattccattttgggatggtcactgctagaaatacaagtgacttttgtatgttcatcttgtatcctgcaaccctgctaattcattttgtttagttacaatgtttttgtgtgtagattccctaggttttcctataaacaagatcatgcc

SEQ ID NO: 193161 - DNA, 397 bp, Homo sapiens
aaatttgattttttccctacaataagctctatgctaaagctcattacatttgattttgacaatctgtttttataccacagttgcaaaaaattaatcacattctttacttcatgagacattatcattattgtttcctacaagtttctctggttttacttgtttcatttttttattccttatcccttgtcacagacaggcatgctaatgtgtttgatataggttctttactcttaaagaattcttacaagataagaaggttgttttctgagtgtgtgtatgtgtatatacgtgagtgtatacattttgcttaaagagtattgtgctataaatctaattttatttctaatttttttcacagagcataacatccttcatacattcccacattgctgtaggt

SEQ ID NO: 193162 - DNA, 287 bp, Homo sapiens
caatctctacagaagagttgggctaacaggcttcagcaaagagagctcccctgagataagcttttattgcgcagataagaataatctcattagtatgtcatttatttgattgtaaagaggaaggtggaacccttattgtacatttacttaaccgccttcctataatcttaatctcattctagtgaccccatgtgcccaaacaccctcttttcacgggacaaggaaagacatcgtaccaaatcctgggttatcccaacttcaaagtcacaatcttccaaataaacctt

SEQ ID NO: 193163 - DNA, 580 bp, Homo sapiens
gaggtaggactgatattcagcgggaggttaagaccacctgcgggaccgtgagggctgtacagagaggatttgttacaaagtgggcagctgagtggtaataatggtggtggggcggtaatggtggtgtggggtggacaggaaggaggtgatgtggtgctctgggaaacagcccagactttcgcctcagacccgggttcaaatctcagcttttccactgttttaccagcgagcatgtgatgttttcaacttttcatctttatctgtaaaatggggttaataaggggttaacaattacctcctgctttgggttgttgtgaaatagatacaaaggcataccttgttttattgcactctgcagatattatggagttatttttaacaaatggaaggtttgtggcaactctgaataagtctgtcagcaccatttttccaacagcatgtgcttacttcatgtctctgtgtcatattttggtaattttcacaatatttcaaacttcattattattacatctgttatggtgatctgtgatcagtgctatttaatgttattcttaaaattgtttcggaacaccatgagcca

SEQ ID NO: 193164 - DNA, 346 bp, Homo sapiens
ctgggagtggcgggcagggatctgcggggagcgttgctggttcaagctggggctttcctatggatgatgtcctgtgaagggtagatcctggagggacagacaggtgtctgatctttggcaggcagggatgtctcatttgtacattataggtattcagtatctcttgctggcttaggcttcataatgtctcatttgtacatcatagccttcagtacctcttgctgatttggttaacccagttgttataccacgatattgatttttcatgccattttctttaggaagattggaagatcattgaggatagggactgtgaccttttctttttttctaccccagtacccaa

SEQ ID NO: 193165 - DNA, 447 bp, Homo sapiens
tttaaaaataagcatcttggataaattcaggtgcaaacagacaccacacaagaggaagtaacaagatgacatgatgaagatgagtgcttttgaacaggggccagacgatcagaaagacaacatataagcagcaatgccagaaaacaaactaacattaaaaacttagaaattctggcagaaaggttccaattattcaagactgcttttgacttccttttatgacaggaacccttctatgatatctgccctgaaactaaagcaaatggttaaagtgtagaaacatttgtagagaaacgaaaaagcaaaaaagaagtcaggcagaaattgtatttctgtaaagctacgccaaatgttcctgccactccttctacctctgtcaccccctgagataagagtaacgattcttcttcttcctcctccttagcctactcaatgtgaagaagagga

SEQ ID NO: 193166 - DNA, 352 bp, Homo sapiens
cacagtctaactctggtcatccatttggcgaagggaatgtcctattaacaaaaaagccgtggaaagctgaaaatgtttatctggaaattccacctcgtgaataattaaacaacaagccctcatggtgaatgagtaatatgaaatacgaaggactatactatcaaactcctgtctccctagtctcttacaaccccataatgttcaataccaactacatgctatcgatgcccaaatacatatatttaaactttagtcttttctctctttttttttttgagacggagtctcgttctgtcgctcaggctggagtgcaggggcgagatcttggctcactgcaacctccgcctcccag

SEQ ID NO: 193167 - DNA, 138 bp, Homo sapiens
cagtatccttctaagacatgagtacagagcatgtctcttttctcaaaacttccagcatctacatctcacccagaggataaacaaagtcaatacaaaaactctaaggcccttgaagacctggcccctttacctttctga

SEQ ID NO: 193168 - DNA, 609 bp, Homo sapiens
gatgcatgtcggtcaaagtgtaacataagcaggctggtatgaaacttaaaagatcttggagtccatggatatctgaatcactccacagtaagatggtatttcagaggaggaagaaaattctttctttcatacacatactaaagggctttccatgtttttgtgaaggccacaaatggaaaaaactaccactggcagaaaaaacacaacactgtggtatcaagtacactgccaaagttccaattgaagcaattgaatgttggtgtattttttttaaatcacttgcaagcattttggcatctggagtaaaagaagttgttcctattagtttgtaatccaagtaagggtcttatttcctcaattaaatttgcataaatttatcctgaatacataattttccttatgatgaatactgtattttcatgcaaatatctacaattaatgtaaagttccaatttactttcttctttactagtgaccaaatactatatggcaccttcaacttgttgaaccctacatcatataacttagatgattactgactctatgcatatttttccaagcttttaaaagcaaaatgtggccaggtgcggtggctcacgcctgtaatcc

SEQ ID NO: 193169 - DNA, 147 bp, Homo sapiens
gctctgggccagccaagaatgataatctgttctgctaagacctctaaaacaggcagggccttcttttccattcctgcctaatgccttctggtgaccacttatgatctggtggtccattcacgctgtcgcttattgctacatgcatca

SEQ ID NO: 193170 - DNA, 467 bp, Homo sapiens
cattactagagagagaagtggaacaaagaatacaaaagaaaacaacagtttatatgattttagaatatatggacacacaacattttcttcccacacggaacacgctggttctctaagatacaattctagtcattcttctcactctaaatactctctttgaaggctgcacttacttctgtagtcttaattaccagttctacatgctgatggcgtgtgtgtgtgtgtcctcttaaatttccaacccgtatctccaactacctactgactatcaggatgttccacaggcccttcacattcaaaatgtcagaaactaaacatattctctttttcccttttctgcccccaactcctgcctcctctctgtaatccccaaattggtttagggtaataacatcgacccagccaactaagctcgagaataaaatggggctcctttctcttccccatgaccctcatccaaatggctg

SEQ ID NO: 193171 - DNA, 356 bp, Homo sapiens
ccccaggcttggtcggcgaatcacttaatccactcatcccttcgtcttttcatagaattaggaaagatatttagctcaggccctagaatcagactaatgctgactcgttcttgtctcgaagggctttctacaatttactgcattcagctccatactattaataataatgttgctgcttttcttaaaatccatgttggaaatgtaagaaaatgtaaagaaaattttatttcatatttcattttacatctccaaagcccccaccatctccagaaagagtacaatgatcattttctttgtctctttatatttgaacaatcatcacaacactaaaactacttcgccgttgtgctaagacc

SEQ ID NO: 193172 - DNA, 263 bp, Homo sapiens
gtaggtgcttcctaactgtcagtcccttcttttttctattcattcattcaacaaataatttttcctagatcagcagttaccagcataatctgggaaacctccccaacctcctctccagggaatctttgagatcaaaactattctcatagtaagatgtggcagacagaataatggctctccaaagatatccacgtcctaatccctagaacctgtgaatatgttatcttacatggcaagggagaattaaggttgcagatggatta

SEQ ID NO: 193173 - DNA, 389 bp, Homo sapiens
ggaattgggccccagtcatcaagaatgttatgacctgcccagatacaagcaactaactatataatactgtgtaaaatgtgaagtcctacacaactattttccagttaacatttcagcatttaaaaaaatatacatcagtttagtagtatatatacttttttttctttttttgggtaggggggcagtcttgctctgtcatctaggctggagtgcagtggcgtgatctcagctcactgcaacctccgcctcccaggctcaagcaattcttgtgcctcagcctctcgagtagatgggactacaggtgcataccaccatccccagctaagtttttgtattttttgtagaaacggggtttcaccatgttggccaggctggtctcaaactcctga

SEQ ID NO: 193174 - DNA, 352 bp, Homo sapiens
tctcagtttagagtctgtaatattttgatacatcaacaagggggacctagtccttaaatggaacttctctatattcagaagctctccaagcctttctttctaggatttagaaattcataatgtgagagatcagcatctcctaattttaaagtgttcctagtgtatgtaaccatcagtggcgggtatctactgaacagtgaggaagttttcaaaaattaaacactgtctgattttctgcagagtttttattcagaatgtgcttggacttcccagccccttctcagctttcttgtttttggcagatgcttcaagtaaagctttcttcttcaggtacctacgccatagggtcgtt

SEQ ID NO: 193175 - DNA, 508 bp, Homo sapiens
gcaggatcttgctatattacccagactgatctcgaactcctgggctcaagtgatcctcccaccttggcctcccaaagtggtgggattatagacatgagccactgcacctggccccaaggattccttcttacaaccacagtatgtgatcttcttttcttattgagaactttcaccttttcacttaagaaagcactttatggcttctctatggtgtatccaaattgccagtgccactcctcttgtgctttagggccatggaagtaaagtaagggtcacttgaccacaagcactgtgattccaagacagtgaatttgatcacagagatggctactaagtgacctgcaggcggggacgctggcaaagagaaaagtcgcatccagggcgggacagggtgggatggccccagatttcatcatgctacttggaagggcatgaaatttagaacttaggaattgtttctggaattttccattgaatatttttgaaccaacgttgaccaagggtaact

SEQ ID NO: 193176 - DNA, 391 bp, Homo sapiens
cttctgttagttgcattagttactacttgaaccatattttagaaactaattttctctgtttgaactaatctgtttagaaatgggtttaaaagtcctgcagtgaaagtcctgcgttcaggcttctgtgtatcgtttgttatagttaatgacatcccttgcattccttatactgctttaggtgttagtggcttcatcagttgtagcaggggaatcccagaaacctgaactcaaggcttggcaggtaggaaaacattccttgagaaatacactttcagtttatattttaatgtttattccccttgttaacaaagattacaaatgatcctcaggattagggactggagggaggagtgtttgtgggtatgtggatccattgccctggagttaaagc

SEQ ID NO: 193177 - DNA, 150 bp, Homo sapiens
acccgtaaatagccactacactcttagcctgagcaacagaacgaaaccctgtctcttatttttcaaagtttgaataaaggaatctaacagatgccaacttgtggacctaggttagatattggtttggtccaaatagctgtgaatgatatt

SEQ ID NO: 193178 - DNA, 401 bp, Homo sapiens
gggttgggtgtttcgtcttttgataggtttcggcctgcttctcagggatattccagtttctatcccacaaattttttcgataacaccagtttcagagcatctaagaaccactaaaggctttcaattttcaaagaatgttctgctaacaccacttgtataaataattccaggcatttgctttaaaaaagtcaacattttaagcaaggctcagtggtgaaatgatattacaccctggattcctcttctttagttggttttgtggtgtcacaaccagtaatctgaagccctgtggtgggaatctttggagaagaaaagattaatagtacttcaagaatacattttgaaacatacaaaaccagagtatttgcctatcaaaagacgaggggatactctagagacga

SEQ ID NO: 193179 - DNA, 199 bp, Homo sapiens
atgttaatctcctttggcaacaccctcaacagacacatccaggatcaatacttcatatccttcgatctaatcaagttgacactcagtattaaccagcatagctgggatggagagactatgcttagagggggtgtttttatttagaaatgttattctggcagggtgcaaacatcagcattttcatgccttgaggtaactt

SEQ ID NO: 193180 - DNA, 208 bp, Homo sapiens
tgatacatgcatataatcaaatcagggtacttgggaacccttaaatatttatctttatgctaagaacatgcaagttactctcttttagctattttgaaatgtacagtcaattagtgttaactaaagtcactctaagggttaaagttttagatgctaaattcagttttgggatttaagtgggtagttatttaaagtaggtagcatactg

SEQ ID NO: 193181 - DNA, 466 bp, Homo sapiens
tattcatactggagtcttgcattctcctaatctggactgttcgttctagagacctactgcataggtactatcctaggactacctttcatcgtcttcatggaatttatgttgttctctagtattggactctgtttcctggatcctgtgtggtgatagctgcctgaggaaggttccattggaagtaaatatttcataatcttccatgtctgaaaaatgccttcatattgtattgatagtttgtctggacatagtattctagatttgaaactattttcctcttagaatttagaaggcattatgttgtcttttaacttacagtgttgctgttaagacatctgacaccattctgagtctcagtccttttattacagcctttctctctatatctggaagcttttagaatgttttatttattcccaatgtcctgaaatgttatgattgttgactttgtgtgggtcattattta

SEQ ID NO: 193182 - DNA, 469 bp, Homo sapiens
gttccccactggcaatgccaatgctggatagagagcccttgtcaggtgccagagtaaagcagaaaagcttcctctcccctgctccctgcacaaatgccacagtgcctataggacttgaccaacaaaggcaggcaaggaaggtcaggagcaactagaagcatttaacatgtggaaaccaacaaccaagacaaatgctggctgtcctgaacctgttacctgccaaggtcatttcatttccctcctggaagttcaggcttcgctgctgcagtttacaaaataccacaagggtaaagagtttgccccccctccccgagtggtgctgctgctggagttggaacagggcttccctctgctggtgtgaaatgacttgagatgggatcaggtgtggcaaggggagtagcagatgctgaaggccgcatggcaggcttttcattcggaactgagaccagggaagagtcagctaggcaat

SEQ ID NO: 193183 - DNA, 372 bp, Homo sapiens
ccggacactgggttagactgatggctgcctcattcgactattcatacaacctgagcagctacttcatctctctgtgcttcagttttttgtatagggggacactggttcctattttgcaggtctgtctgtacgatacagtgagataatgtacagaaagccctttgtcacaaggcctgcacgcagtgaccgctacattctatcgccagtcctctgcatatctgtacacactgcctctgctcattttgtagtgcgtgcctgtgctttattcatgccaaacttcaccttcttgttctccaccatcaggtcacagatgtatttgactgacaggtatcgaagcagcttgatgtcatagcctctgaccttatcaaaaag

SEQ ID NO: 193184 - DNA, 278 bp, Homo sapiens
ataagaggagctgttatgattcccatttggtcggcagaggacagtggagactcagggaggctcgttacctgccatggtcacagctggaaagcaggctgccgacaggtttgggcatcattatccatgtattgaagtgactctccaagccacaaacaaaatttttaactgaaagagatgaactgtcctcctaagtctcacatggctggggggagtaagatgatgctgacacccaccaactcatcctattagacataaacgcatgctttcattaggcccgc

SEQ ID NO: 193185 - DNA, 214 bp, Homo sapiens
actttccagcactattaaacacttatcagttgaagacaaaatttaaaaaaattaaagtcaaaaatttaagacaaaattaaagtctctcatttcaaaccacaactctcattaatactaagagtaataaacaaaatagtcttagaaattctactctgctagcccaaagaacagaaaagtcttcaacaaactatcttcaattgtttagttcaacata

SEQ ID NO: 193186 - DNA, 402 bp, Homo sapiens
tggatgttgcaggttcgaatctagcaggatcccgcaactatgcctcgatgatcactctaacatactctagcctgggcgccagagtgagaccttctctctcttgaaaaaaaaaaaaaaattagaacaacaaacgaacttccctttcttttcagtatcccttagggagggtgtatcctcagaaattcttacagtatgagcattagggtgttttcatcccagctctttttgaaatgaagaatagtacaacagtggagcatcgttcaataatgtgtgcagggagtggatggaagccttcaacaatatttgataacacaaaaaggaaattgtgatccatgttaactaataaaggaaatgataactgcaatttaaaaaagcaaaaaacatcaatttaggaaaacttta

SEQ ID NO: 193187 - DNA, 142 bp, Homo sapiens
actccatatgggcccttggttgagtaggaaggcaagtgacactagagtgtcgatgggctgggagaatagcagggaatatgagattagagtgtgtaatggctgattcagcaagagtgaaggaaagggaaaaacgaatgtggag

SEQ ID NO: 193188 - DNA, 281 bp, Homo sapiens
taggtttcaagcaggaaatagaacacaaggcaaatcaaccgtcatataagggtgtcaacttatcttaaatacttttggaattaataagatatagaggcatacataaagataggccacagatcagtcagtggctgatttctatttctggctgtaaatggactagtttatttcaaactaaggcctacactgtgaataatgaaaaaaactggattagaaaaatatatatatctaaaggcattggagcactaccaagagctaaagatctaagaatgaaaggaaac

SEQ ID NO: 193189 - DNA, 256 bp, Homo sapiens
tccttgtcacagaaccatgctgtgctcattctcaccttcatgctgtttgactgtcctcactgttgtgctcatggactgcatttttcttccatactgagtccaatgcatttgttcattgagccattcttagtcattttatcaagctcttaccgacctctctgtaaactggatataccagcacactgttttcaccgtaagttggcaattaattatatttggtcttatgttaactgtttcatggattagttatctccct

SEQ ID NO: 193190 - DNA, 627 bp, Homo sapiens
tgcaggccagcccattcctttcttgcccttgacacatgcttctcataccccattcctttctcatattgatgtcttgattcatttctcttcctcttgctttggaaagtgtgtgtttcctattgctgctgtcatgagtttagtggcttaaaacaacagaaacttattctcttacagttctggaggtcagaagtctgaaaggagtcttgcagggctcaaatcaaggtgtgagcagggctggccccttctgaaggctccctggaagaattcattccttcctcttccagcttctaggggccgccacattccttggattgtagccacatcactccaatctttgcttccatcgtaggtgccatctcctcttctgtggtcacatgtccttctgcctccctcttacaaggaccctcaggactacattgagatcacccagataatccaggataatcttcttatctcaaggagcttaccttaatcacatttcccaggttccttttgccttataaggtaatattcacgatttcagggattaggacgtggatatctgtgcagacagttatccagcctaccactcatagtaacaaaatgtaattcaaagattgggagccttagagacagacagggagtccc

SEQ ID NO: 193191 - DNA, 296 bp, Homo sapiens
tatataaatgcagtcaatttttaaatatcaatttattctcatctaattcaacagaatttttgttattctgaatatttaaatttttttagtttttcacgtatataaattatcatttgcaaataaagataattttaacttttcctttctacattttctactttttccttctataattgtgttagtacttcagaaaaatgttagtaattgttgtggttgtagatatacttgtcttatccacactttaatgggacacttctatttgttttcccagtaagcataatgttggttttttgttg

SEQ ID NO: 193192 - DNA, 228 bp, Homo sapiens
ggagagcagtctgcgtgaggacgtaagcacaggtccttctctggaggcaggagaatgaaaatcatcccacgggtcggggccgggtcagtgaggaagggagggaaggagttctgagaatgtcaatctgcaggacaacttctagtttccaccttttgcatgagggatttccaagtgccccagggcctgggagtccccattcatcaaccctgggtgctaccagggacaggg

SEQ ID NO: 193193 - DNA, 532 bp, Homo sapiens
tcagcatatctgaagttatcaacctcagatacgatacttattatcttttatatggtttgttttccaattctgtcagttaacccaataccaccttttatggcttctgttcacctcagtgcagaaccaagtgtagaatcatgcattacatttacttgtcatatctttttagtctcctttaatttggcatagttcttcagccttcttctatatttatgaattgacattctaaaatataggtctttttaaaaatggaatgtccctcatgttatgtttatgtaatgtttcctcttgtttagttttaggttatgtgttcccagtgggaatgttatgtaactgatattgtgccctcagggtttcacatctggaggcacatggcgtccatctgcttctcagttttgatgctaattttgatcatctagtcaaggtgttagtcgatttctttatgctattttttccccttgctactgtgggcaatctgtggggagacattttaattccatacagatgccttgctcctcattaaaatatttcc

SEQ ID NO: 193194 - DNA, 424 bp, Homo sapiens
agtatcttgtctgggatgtagttatgggcacagctgcaaacccagaggagagcatctaagatcacccgttgattccttgaatgatgtgaatttcctctatatcatcttcaacaggagactgtctagtgagcctcttcttaagcaccttcgtggccaggggactcattacctcctcttgtgtcgagtggcttgatgaggcaagaggaggtagaggatcagggagagcggttccccctgagtccttgcttcagtggcatttcttttctgactacaagaaccaaagagtgagtagaggatgatgccattttgggatgcttactgccagatgtgattctgccttccctaaggcagtagtttaaagtaaataaaagcttgttgggctctgaagttggactgtgtggattcagatcccagccttaccaca

SEQ ID NO: 193195 - DNA, 612 bp, Homo sapiens
gtggttcctatagctattggcatggcccctcttgaaaaaagtcttccttactatgctttaacaagtgtcaaaaataatttttctgtgtgtattttaatatgttatttctcccttgggccaacataactaggaagaaaacttcaaataatgcttaagagaagtttatactaccttttggtctttaaaattttcatttctggataaacttagttttatctcagggaagtgctgtccttcctctagctctaggatcaaaattactgtagtaggctcaataaagtttttcaaagacatcaggtcctagtctctagaacccctaaatgttaaccgtatttggaaaaagggtctttgcagatgtgattaaagattttgagatagggaggttataaaagtaagccctaaatatgatcataaatgtcctaataagagggaaacaggagctttgccataggcagaggagaaggcagtatgaccatagaggcagagactgaagtgatgaagtcagaatgcctgcagccccaaggctggaaaaggcaaggaacagattctgaaggaagcacggctctgccaacactttgattttggtccggtgatactgattttgaatttctg

SEQ ID NO: 193196 - DNA, 414 bp, Homo sapiens
tagacactcatacaaatcatgcttacaggactggcttacttagaagagtcagtagtctttcaataccaaattacaaatacagattaaatgtcttcccttctgtctcctctggatttaacatgtttacagagagaaagcaagagaacacagttgtggtataatcatataaagatattttaaattccctagttcaccagaatcagaacatttgttcaggctgaaaactaggattcaacttgctttctgttaagttgcaattgaaatgtgatcctgtcagtgaaaatacagctttcttctttgaacctctcaagttaaatgactatgaaattccattatactatgaaatatattatcacctttttgagggggatttttatggctactggtagaaaatgttactaatagtcacagtca

SEQ ID NO: 193197 - DNA, 466 bp, Homo sapiens
aattctcctgcctcagcctcccgagtagctgggactacaggtatgagccaccgcacccagctagtttttgtatttttttagtagagatggggtttctccgtggtcgtcaggctggcctcgaactcctgacctcaactgatccacctatctcagcctcccaaagtgctgggattacaagcgtgagccaccacgcccggcatgtttccagatatttttactctctggtgtttattaaacttaacccaggcagactgagtctcagccatgttagagattttcctggattagctgccttgtagtacaatctagaatttttagtgttcaatttatttcttgaactaatcattcaagtagattgaaggaagagttactggaagggtaggaagaagcatggcttgtgatgaagggtgcattttgacaagtattcttctggctctttgccatcctctccttttcctgttactgc

SEQ ID NO: 193198 - DNA, 563 bp, Homo sapiens
gccaactttgagattaacacaaaacttgtaactaattattacaatgcttatgtgtgcttctatatatgtgcagatagatacatacataatgcatgtattttatagatttgcatgaagtagaaacaacattttccagaaggatgaaataaatgattaaatttaaagaattcagtgtaaagaatttagttttatgaagtgagggatgtcctgtattaagaattaattacaggctgggtatggtggctcacacccacaatcctaatactttgggaggccaaggcaggtggatcacctgaggtcagtagtttaagaccaggcctggccaacatgataaaaccccgccactgctaaaaatacaaaaattagccgggtgtggtggcacatgcctgtaatctcagctactcaggaagctgtggcaggagaatcgcttgaacctaggaggcagaggctgcagtgagccaagatcacgtcactgcactccagtctgagcaacagagtgaaaacccttactcaaaaaagggggggctaatatctaccatgtacaaggaaattacccaattgat

SEQ ID NO: 193199 - DNA, 729 bp, Homo sapiens
taggctatgaaatcctgagccaaggcatcatgtctgatgatgctcaacactactaacactacttgcaatcacaattacacatcagacattgttttatttggtaatccccaagtgatttttgttggccagggatcctatcttaaatttttgagtagaatacttagcacaatgctatgcatttattaaatgcataaaaaaactgaacattaatggaacagacatattttctgttctcaggagcaaacaatacaaacatatcattaatagcaaagacagctaaatatatgtaggcctcaacacttccttagagttcccattgtgtatacctatactcatcaaactttcttagaaaacaataagtaacatggaaatgtttttgaaagttcttataattcatctattaaattccaatagctttagcagtacacttctaaacttctcaggtcacaaggcaggaagggcaagaaataaggggagaatacatataaaataggaatttcaagcaaaacagtaacatttttggatgaaaattacttaagtattgactatataccacacactgttcttaattcatgccactggaggaaagtagaaatttggatatttcaacaacaaaaaaatctttttttgagacaggagtctcactcttgttgcccaggctggagtgcaatggtgcaatctcggctcactgcaacctctgccttctgggttcaagcgattctcctgcct

SEQ ID NO: 193200 - DNA, 408 bp, Homo sapiens
cttgatagtggataactgagtgacgcaggtagtttgtatgagaagtgcagtaaccacatggtgaatggaagatgatgctgtacacttgcctggagttcatagctgggacactgtggttaccaggacacagcttccagaatggctgactaaacctagaaaatgcagactccgctgggtctttgtgtttctgttttttaaacgggaaaataaattctgtcatttactttcaaagagttagtgggagtgacataaaattgttgataaaaatctttggaagtctcagtgaggggatctgctatattgaaataatgaaataattgatgaaattatttcattcgtaaacagtctaagggccaagggaagagaagagtgacacagactctcctttccttgagatcttagaatcac

SEQ ID NO: 193201 - DNA, 417 bp, Homo sapiens
ttaaggaacagagctgggatgaatatttgagtctaattccaaaacattctggaataactcaatatgtggttttccatttctcccaaaaacaggtacctgcttttttcagtggcttgtgttccagctgacagctccagggcctgtttgaataattcgaagacaatccttagttaggaaagcaagctttaattatcactggggaacagaaggccgcatcttcgaggaatttggcagacctcagcagggggcaaccacaggcctttggcaaaagatcacttttcaacaacattgtcaattccagtgacccccgaccttccacctgcaggtccctgaacagctgctgttctgtgggaagcagtggcagtctgtcttcctttaaaaggcacatgcacactctgtccctgctgcctgctgaga

SEQ ID NO: 193202 - DNA, 178 bp, Homo sapiens
agggtttcaccatgttggccaggatgagctcaatctcctgaccttgtgatccgcctgcctcagcctaaccaaagtgctgagattacaagcgtgagccaccgtgcctggcctgtgctggcttttaagatgttgagataccaggggttggtcacagccatggccaggggcctgattgctc

SEQ ID NO: 193203 - DNA, 225 bp, Homo sapiens
cctctcctcatccaagaatgaaatcattattcatcacccccaatagcctcctgaaatataaatcagaatatatgaaaattctgtgggggttggattacttccattaattacgcatgaaagactctcaacaaaattttaccttgaagagctattatcaggaggacagtatcctttcgctcttggtaatcagggtgtcttcacacccctctccagcttgtcaattgt

SEQ ID NO: 193204 - DNA, 710 bp, Homo sapiens
ctagtcccttaaggtgtaaagttagagtactggtttcagatctttcttcttttttaatgtaggtgtttacagctataaatttccccctgggcactgcattcactgtatcccataagttgttgtatgttgtattttcattctcattcatctaaaagcattttctaattcccctagtgatttcttctttgacactcattggttctttaagagtatgttcttaatttccacacatttgcaaaatctccagtttttctcattattgatttctagctttgttccatttgatcaaacatactttgtataattccagcattttaaaatgttttaaaataattgttttatggcctaatatatgctctaacctggagaatatcccatgtacacttaagaagaatgcgtattgtgctgttgtggggtatagtgttctgtatgtttattggatctagttggtttacagtgttgttgaacactatttccttactgatcttctgtctagttgttctatccattgtttaatgtggcatacagaggtctccaaatattgttgtagaactgtctactatttgtttttaattccatcagtgttcacttcatatattttggagctctgttgtttgatgcatacttgtttatcattgttatatcttctttatgaattaaccctttatcagtaaaaatttccttcttcatttttatgacaattttttact

SEQ ID NO: 193205 - DNA, 171 bp, Homo sapiens
ggctttcaaatctcttgtttaccatctcctaccatgagttcctatcacaaaagtttatcatggtgagcttaacagagacaacttaaggggaaaaaaacttttagagcacttactggcaactaacattcgctgttcttcatttgtttcactcacctgctatggtagaaatct

SEQ ID NO: 193206 - DNA, 131 bp, Homo sapiens
ccacctcagcctcccaaagtgctgggattacaggtgtgagccaccgtgcgcggcctccaccttctttaagattctcaggagttgcttcggtaaacccaaagaccacagatgagtgaaaaagaactcagcag

SEQ ID NO: 193207 - DNA, 279 bp, Homo sapiens
tccagcctgggcgccagattaagatgccatctcaaacaaacagacaaacaaaaacaaagaatacaatgcttttaaggtttctgttattcttctgtgggttcaaggaaagatggtattgggtctgggtctcttggggccaagtctagttttaatcactgtggctaccccctgttcctgttcagctgcctctggtgaggtggtggggatggcaggctgcccttccccaacctgtggcagacatccccaatcaacgatagcactttcccctgcatgacatca

SEQ ID NO: 193208 - DNA, 369 bp, Homo sapiens
agatggttggacgagactgcagttaaagggcagaagtccagtcctcaagcaggcaagggaggcggcacgcagagaccagaggcccgcaagcatacaggagcacacagctcgacagattgtcattttctaattgcagtgcagtacacagaggtcccagaatggacaggaagggctcgtaggtgggcctggaactaaccctgatgttctgagttcatggccatctgtttcattttatgcatacaaaaaaacttactccagcaaaaggaagaaaatgaaaaaaaaagtattattttaataaacggagttttaaaaggtcatacataagagtttgtaaagatacaagcacaccacagcgttgtgtaggtgaca

SEQ ID NO: 193209 - DNA, 147 bp, Homo sapiens
gtgactgctgcagttctagattttctacatagttggatacaaaagaaaggaacaattcctgcctctgtgccaaaacttccatattccttagggttttgacaagaatttggattaccttgacctagggaataggagtgaggataatca

SEQ ID NO: 193210 - DNA, 143 bp, Homo sapiens
ccagaagggccttatagccactatctgtgcaggtcctactgctctgatggctcatgagatcagttttggaagtaaagttacaacactcccgcttgctaaggacaaaatgatgaatggaagccattacacctactctgagaatc

SEQ ID NO: 193211 - DNA, 787 bp, Homo sapiens
aaaggtatgtctgctgtttactttgcgatcttaaaaatcattcaatcttttaacggaaacttcaaatagcaaagtattctgtttcgtgttttaaaaactgtatgaacgttgcctatgccccattgcaaggtcaaataccttgtcttcaagtccatttagaagtatcacactgaggtttagcagtcttggcgataatgactaaatcatgtaaactagggcaactgaaacggtctagcatatcaggtagcagtctttcttaaagacaagagtctccgctcagcagacaggctgctgtatctttcatggtccggctaaagacagcctgaccctgaatgcaattagtaatgctttgtctgcattcaggagcctctcagtcttctcaatgcactagttacctacaacttagccaggtctctaacatttttcggagtcctcatatgactataaaactctcaggctgtcgctcagagaaatgagggaaggcaaaaataaagagttagtgttcagtgttcttctgagatgctcataatctttaatttcccttttactaatcaagaaaagaaatgcactatttccattttagaaatggcataaagagattttcctccaaagccattctttgccaactacaccattcttccctaagggtgtgggagagagagcaggcaatcactgtattaaacaaagttcaaatgaatttatccccataaaagtaaaaacagtccatcaaagtgtctgtttcaaaaatatatggcctggccaggtgcagtggctcatgcctgtaatc

SEQ ID NO: 193212 - DNA, 468 bp, Homo sapiens
ggtgagcaggtggagaggaaatgaggctaagacagtaactgggagccaagtcatatgtgatcttgtgggccactctaagggctttggctttttccctgagagatatgtaaagccactgaacaattttgaacagaagagttatataatttggatttacgttttgaaaggatcactccggcttcctgtttagaataaactgtagacaggcaagggcaaaagcagggcaatcagttaggctattatctcaccaggcaagagacgatggtaacgtggatcagggtggtaggtgcagaggtaatgaaaagtatctgaatgttggatttgttttaaaggtagaaccgacaggatatgctgacagattccatgtaagtgaaacttgttaaatttaaaatgcctattagatatctaaaatgttaattaagaggttagatatgcaagtctaaaattcaggtacttttcattacctct

SEQ ID NO: 193213 - DNA, 309 bp, Homo sapiens
cacgaagaaaatataaagtaggctaacaggataatcccaaaagcaaagtccttgagcagatggggtagtaggggatccagaatataagtctctgaaaacatggaatgaaacagaaattaactaattccacatatttagattatgagttcatttaaatgatatggaacaccactaagtctgactacttaactgtggtacatttgtacttctgccatcttattgttttcagtttaccatcttgttttctttgcttttatttttatttcgcttttcctgccgtctccatctcttagattgaaaaagttttct

SEQ ID NO: 193214 - DNA, 455 bp, Homo sapiens
actggctacattcacttggcataaatgcctctgggattcattctgtcattgcgtgtgtcagtcgtttgttccttttattgctggagcacagtccttgtgtgatcctaccacagtttgtttgtctggtatattttctcttcatgatggatgttgaattaacatgaaaacctctggttgtaagagcgacagcatactctagaccaagtacactaaatcgcagtgatactccctgcacaaacagccattctgtttggtaatttacaggattacagtttggtaatttacaggaacctgcatgtcttagaatgtttaccaatgaattacaacttttaaaatgatatgcaagtaatggccgggcgccgtggctcacgcctataattccagcactttgggaggccgaggcaggtggctctcttgaggtcaggagttcgagaccagcctggccaacatggtga

SEQ ID NO: 193215 - DNA, 519 bp, Homo sapiens
cccgtccagttggctcgttttctaatcctacccatcttggaaaatggcaccctcaacagcccagttgctcaagctgtccatgatccttctcatcattgccactttcactccaccagtgaacctgctggatacccctccaaggacacgctgtattctgaattcattgcttctcttcatctcattagttagatctgatgagacggccctgccgtcctctcttggacactctcttgaacaaagcagtaacctcttagcttgttttcccgctttcactgcaccccttctagagatcatcctctgtacaggagccaagggatctttaaaaacatggatcccagccgggcatggtggctcacgtctgcaatcccagcactttgggaggccgaggagggcagatctcttaaggtcaggagttcgagaccagcctggccaatatggtgaaaccctgtctctactaaaaatacaaaaaaattagctgggtgcggtggtgggcacctgtagtcccagctactctggagg

SEQ ID NO: 193216 - DNA, 676 bp, Homo sapiens
accccgcacaaaagaaaacaaagtggtcacaaaacaactcctttccttctgaaggttttacgatgcattgttatcattaaccagtcttttactactaaacttaaatggccaattgaaacaaacagttctgagaccgttcttccaccactgattaagagtggggtggcaggtgttggggataacatgcccaacactagatatgaatccattaacactgacatacaattgaccagctgttatagagccattcttgtatccctgaaaggctgaaatgggggaaaagagagaaacagactggctagaatacacagctcctctagtggcattcctgttaaaacaacctcataggtcagagatcaacacagtaaattgcaagataaaaaccaaaatcttgaaactttttaagtcttcaaaagtgttggtgttggggataaataatgttatcgcccaacaccagccccacttctgggtcatgcactgaggtccacagacctactgcacggagttaaaatagcggtacaagttctggcaagagcagatactgtctttgtgctgaatacgctaagcctggaagccatcctgcccttctgacccagagcaaaacatcactcgcccagcacatattggatatctcagaaatgaatatggaagtcccaacatgcgggtttaggtggtc

SEQ ID NO: 193217 - DNA, 761 bp, Homo sapiens
ccagtgatttaggcctttaatcccagcacttagggaggccaaggcaggtggatcacttcaggtcaggagttcgagaccagcctggccaacatggtgaaaacctcatctctactgaaaaaaatataaaaattagccaggtgtggtggcaggcaccagtaatcccagctactcgggaggctgaggcaggagaatcgcttgaaactggaaggtggaggttgcagtgagccgagatcacatcaatgcactccagcctgggcaacagagccagatcctgtctcaaacaaataaatgaaagtttccagtgatttagtcatccttctcttcctggtacagaaaggaagacactcttacaaatgtagatattctttataaaataaatttctcttacaaaaatacaacttttactgttttcagagcttctcctgtgtctgtttcccaaaataatcagtttaaagtaatcctgtgccaaagaggcatatttggaatggcatatactggtgtcctacagacatattttggggtgtcatgtcctgaactctacagttggctccctccgccttatggaaatgtaaataaaatctttggagaccattggtttccactgagctccttcatcagctccaacagaccaaaccaagttagaggtccctcctgctaaagttcgacgtcaccaatctaagttatctgacctgagaaatcaggagaaagagaaacaaaagtcaaatccccaaacaggctagttttagctggcatgataaggg

SEQ ID NO: 193218 - DNA, 617 bp, Homo sapiens
  misc_feature (19)..(19): n is a, c, g, or t
  misc_feature (25)..(25): n is a, c, g, or t
  misc_feature (27)..(27): n is a, c, g, or t
  misc_feature (39)..(39): n is a, c, g, or t
atagtgatcgctgattctngaggananaacgagagacgncctttgagcatgccagtcttttagtaataaggatggaagaatagagcaaagggaaagactgtgagtacccacagggtggtatttgtggctgtggctggggttactgggagttactgttctaccatggagagccaggagcggaaggccatcgatgacttactggctcttctccacattcagcaacaggaaacccacaatgcagaacaccaggttgcgtgtcaaatgccctctgactcactccttagtatggaaaataatgataaataatgcaaatttctattttgtagtcttttagcattttttcaagagcatttgctttatttcactctatctccgtagtctttcatctctaatctgaagaaagcaggttagatgaaatttgcttagcatcaagttaatgattagcagaagaaccaggatttaacttcaaccttttctgatttcaaatctggaatttgtctttgtaacaagcatctttggtgattcttatgcacattgctttggttttctgtgtctacataaatcaataggtaattttagtgtccttgcagaggaagaaactctgcgataaaaattgg

SEQ ID NO: 193219 - DNA, 315 bp, Homo sapiens
gcagagaaacccctagtggagggtggagtggggaaggaaggtgtgaggtacagcagaaattgagaatgaaaaatacctggaaacagggctggcctaggagtaaaggctgtgacccaactccacttcagctgacaagggtgtgattgagcagctctgtcccttttctggggcctcagtttcctcatctgtataacaagggatcagctcactctggccaagaaggccccagtccatgcttggctggcagcttgctgcttctcctgttgactacaaactttggtgtacattaaaaaaattcttttccccagccaagat

SEQ ID NO: 193220 - DNA, 325 bp, Homo sapiens
tattacctcgtgtatttgttacaaatagaaaaacttcttgtttgttttgtttataaacagataaacttcttataaataaaagagtcagacatgaatgacaaatataattcatttcctatgttctaatcatgtaccttttactagtaataatgctaccaaaataagtagtctttgttgaacaaggtcaaataaccatccatcactataagcagaaagatgaattctaagatctagtcttattgtctagagcaatattcctcaattgagaaagttttttttggccaggcacagtggctcagcacttgtgggaggctgaggcaggtaa

SEQ ID NO: 193221 - DNA, 223 bp, Homo sapiens
tgtttgaaggcgctgtttcccgtgcgctgcgtccaccgtctgtctggccccagccagcttgggcggaggggaggggggcgaggggagcacccgcgtgtgcacagccacagggtggggtgcaggtggctgggcccaggcagcattcaggcccctggccccgcagtggcgggcactcatgtgaagcccacccctctgtggtcagtaaattctccagaaagcgcca

SEQ ID NO: 193222 - DNA, 401 bp, Homo sapiens
ggaggggcccctgcttgaacactaggttttatggagggatcctgaacaaaatagtagcttgttagtgaggaagaaggggacagtgtctggtggtcagtgttggcctcagttgcaaaacatccagtgactcaggccagaaactgcaccatcagccgtctttggcctcttctctcattccctgtgtttgatctgtcagtgggtcttgttggccaagcctcccaaaggtctcccaagtccctctgttccacctgcactgctgccactagtgcaagcctctgtcctctcatgcatggactgttgcaggagctcctcatggcctccctgtctctgttcctcctccacttcagtcccttttcactggcatcctgtccccatggaaaccagacctctcactccttgta

SEQ ID NO: 193223 - DNA, 542 bp, Homo sapiens
ccctgtcttttccctcaaagacaacatgaaaagattcagtgaagaaagctgggttgatcctcttaagaggttgcttattaggacactgatcctcagaactagtaaataaaccagggcagacccctgaggcttgacctgggagagctgttcagcataagaggtgggagatgcagagagggtaaggtggttccggtccctgctgaaagaagaaagactctgaagggtaaactcatcacagtagatggagaatttggtgcctgttcattcctctgggaaatgggtacttggctagatcctgaggatataatgatggacaccacaaagctctcctaggccctatggggacttcagcaaccaaaatgctttgtgatgtggtgatgtgtgccacatggtacaacggcggtgaagcatcaggagcaacagcagctttcaggaagtcacctggcatgactcagcctacagtcaagagagtaataacttggtagggtttcagccaggcagtatttgccccgaaaacttcagtggcttcattctacaacctc

SEQ ID NO: 193224 - DNA, 140 bp, Homo sapiens
attttttttagtaacctccatattgtttttcaaacagctgcaccatattgcattctcaccaacagtgtgcaaatgttccagtttctctatatcctcaccaacacttgttgcctttttatttttttttaattttatttttg

SEQ ID NO: 193225 - DNA, 366 bp, Homo sapiens
aaatcttgcgattcttctcctgctgtcccagccacaggtcatgtccttgagtttcacaagtagcctctttggctttctcacacgtggtgaagagtggcaaacagactttctgttctccaactcacttttttcttccctagcagaggagatcccactgcttatagctcaggaaatttaagcctcaactgcaacagtggctggaaaccttttctagtagcagaattttataactcacagaaagaatttggtcttaaggtccctgcaatcagtgtcaagcctgatttctgcagtgccactcacttcaatgccaggcatgtgggatcagacagcagggaatttgctatcaaaagagctgggtctgaatcc

SEQ ID NO: 193226 - DNA, 307 bp, Homo sapiens
tgaaaatacaaaaattagctgggtgtggtggcacgtgcctgtaatcccagctacttaggaggctgaggtaggagaatcacttgaacccaggaagcagaggttgcagtgagctgagatggcgccattgcactccagcgtaggcgacaagagtgaaattctgtctcaagaaaaaaacaaaaagaaaaagaaagaaagaaacaggaatggaactactactgcatgttgaagacaaagaattctgataggcctgatagacatccacttaagtatagagaataccgtaacttctttctgctccccccttttt

SEQ ID NO: 193227 - DNA, 481 bp, Homo sapiens
cagcttttccctcaaaaacagatggtaacaactttgacatctttattcctaacttcccttctctaaagataagggtttcctttacaatggaaatcatctaactatggagcaacagtgcagactacttgaaaacttggaaagcattaggttctgtgctttcattaccacttttagttccaaattatcccacatttatcatgtcaaagaacttttcaattcagcatattccttagtgcatatgcctgaataaaagtttccctttttacagcaatcatgtttaaatacccttttcatttgattttttttgagacggagtttcactcttgcccaggctggagtgcaatggcaacaccttggctcactgcaacctccatctcccaggttcaagcgattctcctgcctcagcctcccgagtagctgggattacaggaatgcgccaccacacccagctaattttttttgtatttttagtagagacggg

SEQ ID NO: 193228 - DNA, 234 bp, Homo sapiens
tagtggtgggaaagacatgcaatctggaaaaccaaaatagtacagagagcaagcacagaactgccaattgcttgccccaaagcattacaaatctctggtccagaaggagaagtatcagattcagcctagtatgtgcttaagaatgtttgtcgaatcagttaatgaaacgtattttatgaggttctaatgtagcgcagtattgcactcccggcagattgacttataataaatttg

SEQ ID NO: 193229 - DNA, 263 bp, Homo sapiens
aatttctcatagtatttctttaatttataacatatcttttattataaatgtgatctcaagtagtattttggttgatcacgtttggacatctcttctttaaaggcacatctcaatacctcatccattcaatttttcagtctcctcagctataaatcacttctcctttgagttcccttaatgttttatctatatatttctcatatgatgctaaccacttaataccttattattttagatttatgcacatatgaccttcctcactg

SEQ ID NO: 193230 - DNA, 495 bp, Homo sapiens
acgcactgagtcatacaagagtatttgaggagaattacatgttattaacatttgtcctagaacctgggggagagttcaggtaaagagaacagctggtatacttgtaataaagatttaaatagagagacagaaacacagagagagggagagacagagagagacagacagagacagacacaggtaatgagagatacctaggcgtcgagatcgatactcatacacatagctatatccagaggtgaaagtggagggagagagagagagagagggagagtggaggcagagagagacacacacacagagagacagagagacagacagacacacacacacacacagagacagacagacacacacagagacagagagagacagaaaaagacagagacagacacagagagacacagagacagagacaccgacaaacacagagagacagacagacacggagaaagagagagagagacagagagagacagagaaagagacagacag

SEQ ID NO: 193231 - DNA, 321 bp, Homo sapiens
gctctaaaactgtattctctccactatacatggctgcctctggccaatcatccagtaaggaaggtccttaaagccagaaagtgacttaaactctcccaaaaacatttgggatgtcattctgcagcttcttttctacgcatctcaccctaattcaaacatcagctcaacactgtccttatttttttaaaatgatgatgaaacccaccagaaaaagttcatcgtgacctttcaccttcactgaggttttgtcctcaggacagtacaaagggaagacagaatattttacattttatgttttaaaacatacatgaaaagtagttt

SEQ ID NO: 193232 - DNA, 904 bp, Homo sapiens
gtaatgttttcagaagaaagctgtcatataaattcagagcagtgaaaaaggtcttctttaaatataaagtataattaaaatgataatgaaatgttaaaccttcctcctgatactttatctgcacgtatatactataagtaatggttataagaatctgctgtggctgggtgcagtcactcatgcctgtaatcccagcactttgggagcctaagttgggaggatcacttgagcctaggagtttgagaccagcctgggcaacacagtgagacctcatctctataaaaaaattgtaaaattaggcaggtgtggtgcgtgcctcctgtactcccagctactggggaggctgaggtaggaggactggatcgtttgagcccgggaggtcaaggttacagtgagccataatcgtgtcactgcactacagcctgggtgacagagcaagatcttgtttaaaaaaaaaacaaaaaaagaatctgctgtgatatgtggatcagatatttaattaggctggtgttcttgtgtagcccgagacaaagaggtctggacaaaattatcttaagtctgatcataggctttattttttatcattaagattggatttatgtagaaataatcatatttatctgttgtgctgtatctttagttgtttcatatgtaattattttcagtaatgagcactcagtgagtagtttttttattagacttctagagccctcaccatatgtagtccttcctttctatagtagggccgtatgaaattttcactatttagatcctctcaagtttcatttcacttcaagatgttctgtttttgtttttagagaaaaccactccactcacttcagctttgaaattgtttaactttttggtccatgatttaaaaaattaaggtgctaaaggctcacaa

SEQ ID NO: 193233 - DNA, 111 bp, Homo sapiens
tctccacatcatctttctaaaattctacctaggcaataatcccctggactttcatcatttgccaatttgtgccattatttacttgtaatatatgtctccttagctaggttg

SEQ ID NO: 193234 - DNA, 711 bp, Homo sapiens
atggcctaccatgtcatgaggctactcagaaggacacgcaaattaaaacttaggaattatttctggaattttccatttaatatttttggactatggtggttaactgaaactgtggaaagcaaaaccacagataaggggatgggactactttatttcctaagctttcagtaagtattcactgtgaatggagatcaggaattgtgctggcaaatgcgtacttaaattagacaacttagtcatattagctctgcttgcaggtccctaactaaggtagagggtatagtaaggaagttagcttggctaaaacagagatatggtggaaaggagtaaaagatatggctgaataggttaaacacacacacacgcacgcacgcacctaatgcacacacacacaccctaaattatagtgagcattgaagaccaggcagaaaagtctattaaatatttatggcatctatgaatgaattgtttctcaggattgaggtaaaacctgagagtcaatagtgatgaatgacgcttattctgctctactgtggtagttgtgaatgccatgtagcaaattcttaactactcctgaataactaaatggtatgttctgtaatattatttctagtattaattgattttccaaagcatgtatttccatttttaatgtttggtggaagagcctccctcctttttagcagatgatctcacgccaaatagttatat

SEQ ID NO: 193235 - DNA, 255 bp, Homo sapiens
aggcgtgagtcattgcgcctggctgtgctctgtccgtttctttgatgagaagggagattgtctgctcaaatgtcccagataggttttaggacttttgcattggctgttttccatacttgaaatgttcttttccctgtatgagggagctccctcatacatggctaaaatggctgatgccctcttaattatcctctcagtagccaaccctgtttacctgattcaaaaatagtgcctgcccatcgcaccccccactac

SEQ ID NO: 193236 - DNA, 468 bp, Homo sapiens
gaattttgacaaatatatgcaagttgtgtaactaccttgtatggaatattttcagcaccctgtaaatttctcttatgcccctttgtgattagtcctctcctctttctccagcttctggcagccacaaacctgatttctgtccttacagttttgccttttccacagtgttataaatggaatcatacaatatgtaatcttttgagtctggcttctttcacttagtataatgcttttttgagatacaatttacataccataaagttcatctgtttaaggtgtacatttcaacagtttttagtatcttttcagagttgtgcaaccatcaagatatctaattttaaaacatttttatcaccccaaaataaaccttgtactcattagcagttattccccaattctgactcccctcccatagctccctatcctaggcaaacacctacttttcatctctccagatttgctattcta

SEQ ID NO: 193237 - DNA, 763 bp, Homo sapiens
gacaacgcatttgggcttgccatggatttgtcttgagaaacctgttgtaaagaaaggaggccaagttaagtttttggacttagactaaccctaaaaataatgtttttccttttccaatattgtgtacattttcagtttgtcagttttatagagtaattaagaaaagtatattagccatttatcacatttttaatgataagtttggctctaggtatgtaagatccttgaatatggatgtacgtagcatttcagaacagtgtcagcaattgctggattggaaaatagtactagtaaaatgattttaatttcatctactaatttaaactggttgccttgctttcttcaagcagtgtggtcttttttttaattgtgcaggctttcattaatgcaccagtgaggatgaaagaaaacaattcatttatgtaattgcaactagcctgtcatacccaacttgggaaagcagcaactcccacagcatgaggtccacattatgcaacccaggctggcatttagatgagttcctttttgttgaaaatatatgaacttctaattattttaaatgtataagtaatacatatgtaaatctacattatacgaatgtaaaatctgttttagttaagaagtaaatccacagtagcaatttagttgtccattttagacattgagaaagtgtaggcatcaataataaggaaatacttgaaagataacaaagtcacggaattatatatgattctggtctgtattagctatctgtttctatcca

SEQ ID NO: 193238 - DNA, 449 bp, Homo sapiens
attttatggcttttacaatgtccttgtgtgaagaatatttttatacctcttccagaacccagagagctcagctgaaaggagtttgggttcctgacattgtggtgccctataccagcccttgctcctttagggtttcattgttatttggtggttatcctaaatctcctgctttcatcagatgtctgagatggcaaaatttggaaggatcaagagaacagagagttaatccttcctaatgggaaaggtggacaatgccaaggttaaaataccacatacatctttgagttactactataccctcccaaatggaaatgcttcaactttaatctgaggctaggcgcagtggctcacgcctgtaatcccagcactctgggaggccaaggcaggcggatcacgaggtcaggagatcgagactatcctggctaacacagtgaaatcctgtctctact

SEQ ID NO: 193239 - DNA, 271 bp, Homo sapiens
tcatctgagaatgtttttatttcaccttcattcctgaagaatattcttgtatatggaactccaggttgacagtttttatgcctcttccttctggccctccatgatttctgatgagaaatcaggtcacttgaatcattcatcccttaccagtaatgtatcactttctctggctgcttttaagatttttttctttttctttagttttcagcaatttatgatatgtctaggcatggatttatttggatttatcctgtttgcagtttactcagct

SEQ ID NO: 193240 - DNA, 160 bp, Homo sapiens
tagctgatgttatcgcccaacacctttcccaaaggtagaatttgtgtgggttttacttcactgagtgactaatgcagatctttatgttttaatgatgggaagaaattcgtcagcctgggtactttttccatgtgttggggataacatcaggggatcctaa

SEQ ID NO: 193241 - DNA, 258 bp, Homo sapiens
tattgtttgctcagtgggattttgttgtttatcacaagagccacgagtaagcttggtggtatattaaaccatgattgagtaagcaatgacccaggaatatttattggtcctttccttagatatctgtgtatatttaggtaagtgttactatagtatgtgggtaaaggtagtatgatcccaaatgaaatactcagtgctaataaacagtttcagtctaattacctttcagttattgattcatttattttctaaatcttg

SEQ ID NO: 193242 - DNA, 675 bp, Homo sapiens
aggcagagggaggagcaaggtgatctggaaggtgacgaatccagtcccatctgtggctgcagttagtggctgcaactgccctggcacttgccctttggtgtcagttcccattggctgaagagctactgagcttcatacagtctggaggtggggcttgagtttctgccaggaaagctgggagagccagggagaagccaagaggcgggagaaagtgcttcaagccgaggacctgccgttgttaaaggcctggaagtgagaacgtgccaggccctttgagaggttactgtcaacagtgagatgggtgagtcatcagctggggccccacggctcttgtttgggctggcttggtggcttcctgctgggcatagagtgagcagtgttttagaaagagtcatctgatgtcagcaggagggatgcaggatgaatgtcctgtcacacctgtcctgaaatcctccagcaccttcccttcgcctatggggccccccttccctttgcacagctgtcaaggccttgtgtgacctgacccctggaccccctgcctacctctgtggcctcaggaccaactccgtgctagaattgtgaactctcacgagagagagattttgtcggttttgtaacaaaacttgctcattgcagtctctggtgccgagaactgtgcctggcacacagtaggtg

SEQ ID NO: 193243 - DNA, 382 bp, Homo sapiens
ttcctgcccaaccaaattaaggaagtaatttcaaaaattaaaagagaagagataatctagagtggcaggcagtactaaccaactccacattcaagaatagcatcctttcttaaccagcattgcgtgattttaaactcttcgtatccccagaatttagcacagtgccccacacatagtatatgttcaggaagaactgtggtaaatgataaagaattatgaacaaagtcctcttcaaaatgaagattgcaggagaatcaagcttcagtcagatctaagtgcacactactctagtgagataagccaatcagataagcaggatggggaaccaccattttggttttgttgttgttgtcattgttgtttttgagacagagtctcacct

SEQ ID NO: 193244 - DNA, 268 bp, Homo sapiens
cagcattactaatgcattgtagatttgttgtgatttctgcccttttgtacatcatcattataatgttgacctcttttgaagaaagaggtcttccacattttgtgagctaagaaatgaaaacaagcaaacaacaaaacaatgatatctctaagattgttgggagactacctttgctaaaggaaattagcattcttcaaaaggttctaatggtgcattgcatagtataattcccagtttcattgtggcagagagattataaggcagagat

SEQ ID NO: 193245 - DNA, 297 bp, Homo sapiens
tattggatcagggccaccctaatggcctcatgtcactgcagttacctctaaaggccgttaaagtccccagctccaagtataatcacattccaaggcactggggtcgggatttcaacttacgaactctgagcgggagatacaattcaggccatggcaggctaaagtataatactaaaatcacaaatgtagcagcctgcttttccgtagaatgttgctgtgtgtattttttgttttctgtggcaaaataaaagtgggtcactcttgtaaaatttggcagtttttaatggagaaagcaac

SEQ ID NO: 193246 - DNA, 448 bp, Homo sapiens
acagtttgataccagactacagcatagcaagaccctgtatttacaaactaaaactttttaaaattagccaagcatgctgacacacacctgtagtcccagctacgtgagacactgctgcttgggaggtgggaggataccttgagcccaagaggaggctgcagtgagctatcatcgcaccactgccctccggcctgagcaacagagcgagaatctgtctcttaaaaaaaaaaattaaaatgtgccatggatttgaataagcgttgcttcaaagcagatctacaaatacccagtaagcacacgaaagacactcaacatgattactcatcagggaaatgcaattcaaagccaccaggagataccactgcacacccaccaggacggttacagtaaaaaagatggacaatcacgagtactgttctgtgatgttggaagtctgcagccctcagac

SEQ ID NO: 193247 - DNA, 439 bp, Homo sapiens
cacctatcggctgccgagcacctggagcctctcgaagatccaaggactcttcctggcttgaggcagcgtagccatatctcagtatgcgtttctccctttggggaagtaacccattctgccatcttctctaatttggaaaacactgagatgctttcaagcaactttgggatgctcagcaccttctgcagcagctgctcagcctctccaggcctgctgtagaagccttcatggagaaaagaagcaggatgccatgggcccacatgtggcaattcacatgaggtgtttgctctcagaagcagagcctgaagtttctaagccaaatgtgcttgatcgacagcatcaccctagcatgttgatttcctaaaatacacacactctcacttacccacaatcccacagtcagcctgggctatttaggtacagggttttctgcaccgtg

SEQ ID NO: 193248 - DNA, 116 bp, Homo sapiens
gcatgccatcaaaattgaattcaacagcaatattcaattatcactattctcagagtaaacacaggggtaactcctgcaggcccatcttttgtgatgtttttaatatttactggtgg

SEQ ID NO: 193249 - DNA, 288 bp, Homo sapiens
cacccgcttcggactcccaaagtgctgggagtacaggtgtgagccactgcgcccggccagaaggagcttttaaagatgtgcatcaaatgataccactttctagcctataaaatgctccaggaaccctggcggctcccctcctcaccctgaggcccctggccacctctatgaccttatctccactctcttctccactctgtctgtgagcttcagccaccctggccttgttttcacttcctcacactccaggttcctgctaccccagggcctttacacctgctgctcttt

SEQ ID NO: 193250 - DNA, 313 bp, Homo sapiens
tatgaacatgggtgtacaaatactgtcttttgagtctctgctatttctggtgtatatactcagaagtgaaaatctggatcatatgttaatgctatgtttaattttttgaggaactgctgtaatgttttccatagaggctgcaacattgtaccttcccaccagcgatacacagaagttctgattcctccacatcctcaccagtgcttgtattctctctgtatgttttactgataatagccattgtggtgggtatgaagttcattcttattttttaagaaaaaaatatacaataaaaatatgtgataaaaagaga

SEQ ID NO: 193251 - DNA, 861 bp, Homo sapiens
tgagattttagtacaattgatgtcctagggtataaaggtgatacagaactatatacatatcaactgtgttttataattcaatgatgactaaagaaagataaggaccactcttctcactgaaactaaatttgatgtgggaccaagttcatgcttttatagatgtctaaagtgttatagaatgaagttgcttcaaagtaccaaatcctagaggagaaatataatgaccttgatattgaaatgattaagcaacatttggtataccaatctgcctttgtgaaaaggtttagcctgaataatacatgccattttcaaggacatattagaggataaaggggatactggatggagatgaccaccagcatctgatgttaattcaaagcaccaccaagtctttaatttaattaaactttggtcatgccaaatgctaattgaattgttgaagacacaagttataaaatattaatttattaatcatgcaaggcataatatgatttttaaaacaagtacacttcttgcttccacgtgtatttgggttcttaattcatctatatccaagtttcttgatagtgaaaattacctcttaaaaaaggttcagcctttattagactcgtgagggcaaatggtacatattttaaagacgttttctcctttaatgtatattatgtttcattggcggatgctttatatttcctttttctttttcttttttttttggagacagtcttactctgtcacccaagctggagtgcaatggtgtgatctcggctcactgcagcctcggcctcccaggtttaagtggttctcctgcctcagcctccctagtagctgggactacaggtgcctgccaccatgcctggctaa

SEQ ID NO: 193252 - DNA, 215 bp, Homo sapiens
agtgtgtgcttagcctagcagctgggtaagcctgccctgccctggaatggagccctcctctaattggatggttgggcgtaagggttcttggttaccatcaacagaaagatactggctgacttgggcaaatgacagtgaactggaaggaaattggggctcgtatgatttatgcaaagctagggctccatggtagggaattgacagcactctggagg

SEQ ID NO: 193253 - DNA, 647 bp, Homo sapiens
ccatcttgaattgccattaccaataaaatatttatatcaataggaatatttgatcatgcaagattttctagttgtttcttttatttatccgcattttattttattatagcttattttaaaaataatttcttcttctaaaataaagttattttatcagttatatccttactcatataaaacataattatcttaaattcttcatctgactataacattggttttaagtgaggaagtcgttcttctagtcagtttttttttcttttgactttcttacttggtatttgatgttttcatttgttttgaaatttggggttataggtgtatgttgtgtggagattatttttctctagttctctttctattctgtgctcgtctctcactcctagtggttttgcaactacctccactagttttcaagatccaggtctcataagtgcaagcatctgagaatcataatccaggtttaattttattcatttttaattaaacatagaacaaaatttcttgtttttggtatacagtgaagattctgacaaatgcatgtaatcctgaaattaccactataatcaagaaacaaaactgctctatcaacattcctcatcaacacatcatgtatgaaattcccctgtgctaccttttgtagtgac

SEQ ID NO: 193254 - DNA, 306 bp, Homo sapiens
tggagagtggcagttggggataggagagcatccagtgttcattatggagagtggcagttggggataggaaagcatccagtgttcattcagttcagctgcttggggcagggtgttccatctctaggaactgtgagatggtctagttctatacctcttctttaagagacttctttaaaaacagctgtaccataagctgcttattttaacagagctgccaggctggtgggccaggggtcggcagtagatatcatgggtgtttcaggcttttagtaagatatttggatgtctctaatgacatctatatga

SEQ ID NO: 193255 - DNA, 138 bp, Homo sapiens
gagttcgcatatgacccagcaattctataacattcttaggtataggcccaacataaaagcaagcatatgtctacacaaaaaattagacacaagagccaggcatagtggcttacgcctgtaatcccagcactttgggag

SEQ ID NO: 193256 - DNA, 264 bp, Homo sapiens
cgtaaacggcgtcccgggcaagctctagcttattataaccctggcatttcctaggggttcatttgccgggtagtttggggtccctttcttaactctcccaaatttataacttaaagtgaataacctgggccactccgatgcgtaggttcgttttcgctgtctgcccgttcctggaaagatacataatttgtttgctcggacattcagaaaagtccagcttgggtgttcggaaaatcagattgtgtgtccttcttttgccaaagt

SEQ ID NO: 193257 - DNA, 415 bp, Homo sapiens
gaggggatggggtgtggtagtgggggtacaggcatgtgctgtgggcagaggtccttacaccatccagatgcgagaagggagttcttactcttcatgggagggactggccacatctgcaggctcaaagagttcaagggaatctgggtaggaagatttttaagggaatctgggtagtcaagatttttaaggcgttctgggtagtcaagatttttaagggaatctgagtattcaagattttttttcccagttagtccttggctttctctgccttcactgtcatgggctgcatgagatgactgtgtctttctaagctcctgaggatgtcccctggcttagttctattttagttttacttagttcttaattggtgatttgtcctttaagctttttgcattttttttcaagtgcgagtgaa

SEQ ID NO: 193258 - DNA, 175 bp, Homo sapiens
caaagaaagcaaagcctaaaagttgactgacctgcaaaagatcatcattctgtgttctcttattgttataaattatttctcagtagaattttttttttttttttgggacagagtctcacactgtcacccaggctggattgcagtgacacaatcttggctcactgaaacctctacc

SEQ ID NO: 193259 - DNA, 357 bp, Homo sapiens
gtcaagaatggcatattcaggatagttcagacggctttctagtttcctgtagcgtctgagatgttggtattagtttagttttgtcgtgactgttaggaccctggcgtacaggactaggaagcagacaaggaaaggcaggagggagggatgacaaggagcatgaggaaactttggggatgatggatgtgttcattatcttcatcgtggtcacagcttcatggatgtatatatatgtcaaaacctatcaaatccagtatgtgtatgggtttttttttttttttgagacagggtcttgctattttggccaggctagtctcgaacccctggcctcaagcgatccgcctgcctcagcttccc

SEQ ID NO: 193260 - DNA, 473 bp, Homo sapiens
atttaaaataaactctgctgagtagtgttatcattttaatgggactaatttaaagaagttcatgcagacttttgaaaatggagctagaggttagagcgaattatatttattttttggtttactgcagcactttatttttccttatgtaaataacagtggaaaaccaaaatttgtggtcatctctttaaaaattgagaattatgtacaaaaaacttacataaattaaaagaatgaataaatttacaggtgtaaatgtaaaccgcttctagctcaagacttaacactaatagaccagcaagacagaaatgaaactggttcaggagctcttgccaggctctagaaaaatcctggaatggctgggcacagtgcatcacctaaggtcgggagtttgagactagcctgaccaacatggagaaaccctgtctctactaaaaatacaaaattagccgggtgtggtggcgcatgcccgtaat

SEQ ID NO: 193261 - DNA, 478 bp, Homo sapiens
gagcaaggcaaacaagttaaagttctacacttacggagagtcacgtataagaactgaaagaaacctaagagagtatttggtctaacccttccgtttgacagatggggaaactaaggcctacagtgatcaatggcttatgtaaggttttagaccctttgtaggggaatttactgaacatttatttattgaatgcttactatataccaaacattctaaggtactagagatgtggaggtacataacacacagtccctgttctcaagaaactgacaatcgagtcagggaatcagacccatacactcctgccaacagtgagttctagatgtgatgagtgctaaaggagaagtaactatatagggctatgggaggatgtgggagacactcactaattaaacggggagaaaaaggctgcatatgaagaatgagagaggaataaactgagaggttatttcaggcagagggagaagtatgcatgagc

SEQ ID NO: 193262 - DNA, 414 bp, Homo sapiens
gttatttttttgttcacaaactggaaagtacagccaacacataatggtcacagagtcattcttttcttaacagcctactttgaagatttacttgggttgataattctatctactgtttgcgtaattgttttctgaagtgcattagggaccttaggcctacatacacatacacaacactctcattgttaatgataccatgtaatttggatgattttggctttgctgtattcatatggaagtcatgacctgaattcctccactcacgcttgcaattagagctaatctggaggctattagaataggccagcaatgttagaatgagtcaggtgaacaaaagggtgaaaaatcctgccatttctgtgttgagacactattgtctaaagtttaaaaaataaaaaaacctgatttgcttta

SEQ ID NO: 193263 - DNA, 453 bp, Homo sapiens
caaacaccatttaatacacaaaaagctacctgctttccaacctgccacactgatggtctctatgatgctgtattacatattttgtcattaatatgtagctagagttaattaatgaccagctgtcaattcatgactcatgaaacttatataagatcatcaaagtttagaaacagcaagttggagatccaaacctcaataataaaagcagagaatgagaagacaaaatgatttaaaaaaaaaaaaaagaggggggaagggaggaaggaatttaaagaacatgcaggtcattgcccagaatggaagtatacctgtttgtgttatcaaagtttgtgatacagtgtttgttagcctacacacaggccaatgggttatttttcaagtagcttttatccatccagtgtggaaatactgaatatttagggctaggtcctgaaatttagacctcaagagtac

SEQ ID NO: 193264 - DNA, 485 bp, Homo sapiens
tataagaaaacctggctgggcatgatggcaggtgccttgtaatcccagctactcaggaggctgaggcaggagaatcacttgaacccaggaggtggaggttgcagtgagccaagaacacaaaaacctttgtagttcccagggatcctgggcctcctagaatcgtcagagtgtaaggaccaagtggcattcagctgtgctgttctggtggtagtccatttagccaagaactcaaatataattgtagttgtctattacaacttagccttaacaaaatctttagaaagtaatgaaatacaggcttacagtgtgggtttatatttcccgtgtgctggccacatggttcttgcaattaccgtccatgattaactgtccatgtgaagcacagaagtaggaattagaaacactttttgctatgtagaatgtactctgtgttcagagtaatgtttagtcatactctctttttagatccctgctaacctctctgc

SEQ ID NO: 193265 - DNA, 292 bp, Homo sapiens
tatgttcattcccccaaaaagcagaaaatacaagactataaagaaaaaaattaagtttatccttaattcagtaccacgtgaaatgactactgttaacttggtggggattctcattcatattctagcttgttttctccctctctctggggcagataagtaaatgagtatggggtcatgctgctctgtaacctgttggtgttttttttgtttttttttttttaattttaaattttaacatcttttcatgtgcatatagatctcaattttgtttttttttttttaaatatggagt

SEQ ID NO: 193266 - DNA, 576 bp, Homo sapiens
ctggcatggcaagacggtttctcactgtgacgaccactctgggagggccagcatcattcacggtcatcagaagagtgacaagttgccacagaggcgtggcccctgggtcccactgggtctcaatgggtcaggaggcgaggagcaactccagggcgacctgccacccacatgatttatacagggtggtgtctttggatagaggtttttgctgtgttttctcctctaacctggaagggatttgcctagagtactggatacactcgcctatgataccaaacactgctacccgccccacgcaagctgcaggaccaagcggggcctgttcccaaaagaaagggggtgtccacagatgctcccattgcataaaggctcgagcgtgcatctgcgagttctacactgtgagatgaggttccttcaaacacagaacccacaacataggccagtacctggggtcaaattctggatttcttttagggaaaaaacccaaagatacaaaccaaagatttataaggaggagtgagtaaacagtagttaatatcactggtgctattactgaattcctactgccaaaattcc

SEQ ID NO: 193267 - DNA, 124 bp, Homo sapiens
ctcctaccacaggtgccttggcaaagggactcagcacaggagcctttgcattctctaggtacttaagcaagtactacctccttggatgctctgggcatgggggagggaaagctctgccaggggg

SEQ ID NO: 193268 - DNA, 458 bp, Homo sapiens
gagacagagtcttgctcttttggccaggctagagtgcagtggcgcgatcttggctcactgcaacctctgtcgattctccttcctcggcctccgtagtagtcaggactacaggcatgcaccaccatagctggctaatttttgtatttttagttagacaccaggtttcaccatgttagccatgctggcctcgaactcctcacttcaggtgatctgactgccttggcctccgaaagtgctgggatgacaggcgtgagctgccttgcctagccaaataactccattatttaagaaaaattaaccagtatttattgaatacttactgggccctgtgctaagtgctttgcatgtgatttctaatttcctgaccattctatgaagtggctactataattatcctgatttcccaggcagagaaactgaggcttagagagttgaagtaatcaactgggtgttaaaaa

SEQ ID NO: 193269 - DNA, 356 bp, Homo sapiens
aaggcccagattttgggctcaaggaactttacaaactgaagcattagcatgttcgtggtaagaaatcttctgatttaaacaaatgatgtaaattttacattttttagtaagcactacttcaagtgtgctatctttaatgaagactttaattcttgtttttacacatatgtagaaaacagaagttgagttcttcaaacatttgttatcaaaaatataggatatataagcactgaattggaagattttttcccccttggataatctagaaaagaatatagctctattctgaaatcccttctcattcaagagttatccaagcaaatagtgttgaccaaggtgttgaatgcaccagtaat

SEQ ID NO: 193270 - DNA, 169 bp, Homo sapiens
ccagtgcgacccaacggcagccagaggccgccctgccccgccgggccagaagcggactcggtgcagacatgcagctctctccgtggaatgtgcatgtgcacggagtagagacgggatttcaccatgttagccaagatggtctccatctcctgaccttgtgatccgcccg

SEQ ID NO: 193271 - DNA, 611 bp, Homo sapiens
tgcttccccaggtcctcctggctgggacctctggggccaactgtgccagtcacataacactggaagaagaaatagccagaatgttggagctggactcagagtggaagatatgcaagagcacagagtgccagggaggttcagcaggattgggagccccaaaggaggtctatccggagctcaagttagggggctgtatgcttggggccaaaatgtaacttgaccttgagataagatgaagggaattacagtatacccctctccataaccccatttccccagtgaccagattgctatggcgtagggtaggaaggcaccatctgtagtggaaatgggagggagaggaaagtagggacccctctctagtctcatgagtccagatgctggccagtctacccaccagcctggggacctctgcattctctgagtctgcccttcaggactcaccccatcccaagcaactctgcttgcatgtcctctatctctacctagccttcagccttgaggtccaacttgctcatgtaggaggttcccagatgccaagcacctgacccacatgcccccctgttgaaactgcatctgctttggccctgagaagagtcccacccagtact

SEQ ID NO: 193272 - DNA, 335 bp, Homo sapiens
ctgatggtgaggacgagcgtggtggtggtggtggtggtggtgacagtgataatgatgatgatatctctgttttatattgcaagacccagaatgtcaattccttctttgagggaaagggccactgcttatagtggtcttgacaaacttcaaaacatatggcccaatgcttatttctggtggaagctttactgaccatattaatgctattgataatattttcatgttattggtattaatcacgttaccagggaaagagcattggattcaaagtcaaatgcagactttcagtcctgtttttccactttgggcctcagcttccttagctataaataaat

SEQ ID NO: 193273 - DNA, 169 bp, Homo sapiens
accaaatcctttaggaatcaatgaaagactatcacaactaataaagagtcagcaagttttcaggatacaagattaatgtattaaaatccattgtatttctacatattagcagtgaataaaccaaaaataaaattgtgaaaacaattatatgtaaactcaacatatgggc

SEQ ID NO: 193274 - DNA, 489 bp, Homo sapiens
cattttattcagtttcacagatgttaagtgataaagcccagttttatgtgattttttaaataatatgtaaggcatggtaagatgggcaaatgagatgaaatcactgttttataaaagtggatattacgacttcctacatcagaatcttgagtgttccttaaaaatgtaaaaatcctggtttagtctcataactgctaaaacagatacttgggcgggtgcggtggctcatgcctgtaatcccagcactttgggagaccgaggtgggtggatcatgaggtcaggagttcaagaccagcctggccaatatggtgaaaccccatctctactaaaaatgcaaaaattagccagatgtagtggcgtgtgcctgtagtctcagctactcaggaggctgaggcagaagaatcgcttgaacccggaaggcggaggttgcagtgagccaagatactgccactgccctccagcctgggtgacagagcgagactctgtctc

SEQ ID NO: 193275 - DNA, 424 bp, Homo sapiens
gagagcaatattttaagaataaaatatgttatttttaatcattagccattgttaactgcgatgtaatgcagttttgtcagccaggcacagtaaagcaaggctgaacagtgaaagactcatctacagaaaacaagaatcaaaatgagtaaaaatgagtaatttgaaagattcctacttaaagaaacctttactcttgaaagaaataacctaccgtgccttaatttaaaatagagaactagcaagcttaagcaggactaggctcaggaatgtatttaacccataattgccaaaacaaaagtaactaggtggcacctgtttatagagtaaatgatgatagcaaccattctcaaagtaagcactctgatgactaatggatgccaaggtgaagctttaatcacaacactcatcaggaagagttgaacaa

SEQ ID NO: 193276 - DNA, 344 bp, Homo sapiens
ggaaccttgtttgaaaaagctgtttggaggagtttaagatagtgctttgtttttctcacagtaagtttcctcctaattgcaatccaaggcctttaaaatcattcctttgacagtcctatcacacatttggaatgtgcacaaataagcagaactctgcttttcaggtgagctttgagattacccatctcttgcttctcttcattgaacttgaagattttcaagtttcccaggagcaaaaccttacttaggaaatcacataaagaacacccctatctgcctcataattggaaacaaatcccagcccttcagagtgaaaccaggtgttcagagttaaatctcataac

SEQ ID NO: 193277 - DNA, 416 bp, Homo sapiens
aattttacaactatataaccaccaagggctatgctactgagcagatgtacggcagcaacccaagcatctaggattactagaaaaacaataagaaaacagttaagtaccaatttaagactttcattaaccttgcctttcctataatgttgttttatcaaattagctcactctgaaaaaccaaaaatccatcatatacttgtaaagcttagaactcacctaccctctcattctataggtaagggaacaggtccaggagagtgttatttgattaaggttacatggctaattagtcacagagacatgaccaggacaccactctagactttgcattattgcacaattctcgaagaaagagcttgaaataccaggctccactgcccaaaccatttagatataccagagtttaaatcaagtcc

SEQ ID NO: 193278 - DNA, 361 bp, Homo sapiens
gacaaacactacactgatgtcagtgaatcagtatgacatgcacttggtcccctgctagattctggatgagggtgaggagaagacatggctcaagacagcatatcaaagaacacagtgccaagaaagggaggaggggtttgggaagctaggaggctgtttttcagtgggttctagccaaagggcagagagtcaaaggcttgggtttgaatcctagcaccattcttgtgccacgatctatagtaaatgtccctacagaccaagtcaaataaaatctgtgttgctgatgttagcaggtaactaaggcttgagaggatgatgagaaacatcatgtactaaggcttctctcaaatactttcgaagg

SEQ ID NO: 193279 - DNA, 132 bp, Homo sapiens
taagtaaatctctgttgatgctaatcactggagaagatgtggggcaatagaggatcatctattgctgggaagaatgaaaaaagataaagccacttcgggctggcacggtggctcacgcctataatcccagca

SEQ ID NO: 193280 - DNA, 208 bp, Homo sapiens
tgcaatcctcaacattttctgtgtatggcttctgtgtgactaactcaagctgtccagttgtagatatactcaatgtggatacaccatacctaagacttcccagaattgacagggtgggaacttattttctgagtaaccaaacgataagttgctcctggcagcagccaacagtcaaatacatattcaatacaggagccaatttgcctag

SEQ ID NO: 193281 - DNA, 360 bp, Homo sapiens
taactgggattacaggcgcccaccaccacacccggctaatttttgtatttctagtagagacggggttttaccatgttggccaggctggtctcgaactcctgacctcaggtcatccacctgccttggcctcccaaagtgctgagattcgtgcccggcctcccaagtagtcttcttagagcatgtggcccacctccaattcattcttgaccttcattgttccttcccgtgcctattactacttaaacccctcctcagcagcatcccattacttttgggagaaaaccaaatccttaatgaggccttcaggactctttgtggttctgctcctgcttctttccactcattctcttactctgtgtg

SEQ ID NO: 193282 - DNA, 319 bp, Homo sapiens
tgctcagctgtgaatatatgcagggggctcaggaacttgagattctaatcgtgtcttaaacagaatataaacctgcctttgggtttttggtggggagtgggtttggtacctcctcaatccatgcttcctgtcgggggaactagtgcagccagtttctgagcctttgaggaattctaaagcataatttgggctgaatcttggatttctctatttgctggcttaggattcagctctcttgggtctgctaaaccagtttgctcacccatcatctgttcagcttctgaaagtccaatactgttttctcctctcctggtagctt

SEQ ID NO: 193283 - DNA, 493 bp, Homo sapiens
caccgagtctcccttctgctctgagccctccagggactcccaaccagtgcaaaggccggcgccctcccagtggctccaggctcaccatcggctccccacctcacttcaccgctggccctgtttcatcgtcctcgccccattcttccctcccttctgcgaccgtggccagtattagagcattcctgagaagagagatttattttaaggaactggctcatttgatgttcaggtgacaggcaactctgaaatccacagggcaggcaggttggcagcctggaaattcaggaagagttgatgttgcattttcaagcgcgaacgctggaaactcaagtcgaatttcgatgttgcggtctggaggcagaaatcctccttcctcgggagaccgtagtcattattcttaaggtcttcaaccgagtggcccgcccaccatatagagggtcatctgctttactcaaagtctactaattaaatgttaatcacattccaaagttaa

SEQ ID NO: 193284 - DNA, 230 bp, Homo sapiens
aagggagaaattttatttgtgccttgaccttattgataatgtgtaacttgtgatggccactatcaatagaactatcaacagattcgaagggcactgtttgttcctttaatatggagaaatatcgcaaataactgggaaataatttaatgactgaagccttcatttttaatcatatagctgagtgatattttaagtttgatgagaataaacatttgaacaaaaatagccaa

SEQ ID NO: 193285 - DNA, 642 bp, Homo sapiens
cacatgttgaatcatacaagatgtacaatacatgccgtacggtttggactctcactatccatttgagtccttcagatagcatcaagcacttgggttctgctgcctctgacgttggagtaatctacagtgctctgaaatctcaaaggtcttcacaatctcctcccagtcacggtatatcaaagctatagatgccttgatttctaacttgtgtgtaatgttcaaatgcctcatagtcgtgcattaatactaacaggctctattacctggcagacggtcttggtcaagtcttattcttgcaaaaccatcccgtataatgaaggaaacatgaaagatgttttccactgtacgggggacagaatgaggatcaaccacaaagtcaaagaaggacattggggtatcaggatcttctcgaaaatttgtctgcaacaatcccaagattctttctacttctttctctgttgcttcttgatgagattcttccattcttcttaactgggcaggcattgcctgctccccatttcacaggcggtaaaagctcaagtcctcatggtggcctttacagccctgcgtgttgtgacaatccctctccgcatgagttctctgacttcatctctactataatctccttgctggaacacattg

SEQ ID NO: 193286 - DNA, 441 bp, Homo sapiens
ttatatgttggaaacatttcgagtcctctcttccagctattttgaaatataaaatgcactgttgttaactacagtcaccccattctgctatcaaacagtagaacttattccttctatctaactatgtgtctgtacccattaaccaacctctctctatccctccctcaacacacacatacttcccagattcgggtatctatcattctatctacctccatgaggtcaactcaaaagagtagagcttaacatttatacctgagctgttaccatttgtgattggtggtggtggttgttgttgttgttgagacaaggtagtgctctgttgcctaggctgaaatccagtggcacaatcatgtctcactgcagccttgacctctcaggatcaagcaaacctcccgcctcagcctcccaagtagctgggactacaggtgtgcattacca

SEQ ID NO: 193287 - DNA, 450 bp, Homo sapiens
  misc_feature (52)..(52): n is a, c, g, or t
  misc_feature (71)..(71): n is a, c, g, or t
ctgactctagagcatccacacacgtcacgccttcctgcctaagctgtcatgntattcaagccttacaatgngctagtgacttattaaaaaaatcctaagttccttccatgtctcaatggtcagctttttaattcgtcctagctttctttccctcgttactttaaaaattatctacttcttcaaactccttccctacctcttcttctcagcataaaacttttgtttcctagagtatgcacatgcatatatgcacatacacacagtagaattaaccagattggaacccttttttttcctatcaccctgcttcaaaacttactctctcatccatccttgcctccttcctgcctaagctgtcatgttattcaagccttacaatgtgctagtgacttattaaaaaaatcctaagttccttcctcccttccaaagttaactctaagtcagctagga

SEQ ID NO: 193288 - DNA, 111 bp, Homo sapiens
ccttttgcactgtgctgtgtgtactatatgtactggctcttagcagacccgtttcttcaagtgaagcattgtgtgaaggcctatgaaaaacagcttttatttaaaaagaag

SEQ ID NO: 193289 - DNA, 271 bp, Homo sapiens
accagtctgaccaaattagatctattcttcaaagccaaggccatatgatccttcctcaagcaaatctttcccaatctctttaagacatctttttgtccttggagtttccaaagacaagaaacattccatttttgagagagaagactacacatgtagatttaatcccagaaccaaaatttaggtgtgtgccatttggctggtcactttacctttcttagaattttttttttaatttagaaaatgggaataagaacaccatcttgcttttttt

SEQ ID NO: 193290 - DNA, 438 bp, Homo sapiens
tgtcacaaaaggcccctcttcatctagttaatagttaactctgctcatcttcacaatctgcctgggttccaacaaagcaattttaaggtatctttcccagattctcccaccaccacaagcaccagatcaggtctccatttgaagttcttataatattctgcaccttaattaaaatcacaattatatttaactagagactttatttttcaataagtatttccccactagactttaagctccatgagggaaggatctgttgtatcttactgccttggaccctgtgttagaatacagcgagtatagatgaatgaaacccaaggagaggcatctgaaaatgtgaagtcgatgttaaatcttacagaaaactcaaggagaggacttagaaaaaggtagttaaatgtgttgattaggttatagttccttgtgaaggtgaaatcc

SEQ ID NO: 193291 - DNA, 216 bp, Homo sapiens
tgtcacaaaaggcccctcttcatctagttaatagttaactctgctcatcttcacaatctgcctgggttccaacaaagcaattttaaggtatctttcccagattctcccaccaccacaagcaccagatcaggtctccatttgaagttcttataatattctgcaccttaattaaaaggtaacccagttttcaaaactcaagcagaggtataggatgga

SEQ ID NO: 193292 - DNA, 1062 bp, Homo sapiens
aaactcctgagctcaagccattctcctgtctagacctcccagagtgctgggattacaggtgtgagctaccacttgtggcaaaagcattaattcaaaggaattctagaaggaaataaatgttaagtaatgttcatttgctgtatatgttgcaggtaccttgttgggtttaaaagggacagaaggaaacaggtaatgctgaggtcctttacattttatatctcatccttccaattggcaccctactgcatacagatcaggagaaacctacccgcttagtattaagagttactagcaattctctaatgtttgatcataactagagaatggttggtagtttcctgggatttttcttccctatgtctagactgaaatagcacctgtaataccctctctcttttctgccctcttttctctcttgttttgtgttttccctgccttccattccagctgtgaaacaggcatcttttctcactttgtggattggatggctgagtccttaactttgagccaagctggctggttcctgagcacacacacaaacccgcctttgattgtccaggaggacagctgccctagaggcagattgctaacataccactagaacaatccttcttctctgttcttatgctggctagcacaatctttactgcctctagttccttctgtttcccaccccatctctgatctttgcttttggcttagtgagatgtcacattaaaaatgagagtagggattggattttttttcttgtggtagggttgagggggtgatcagagaatgtgacatgtagccagctttctagagcaggcttgccagtggtaaggtaggtaatttttacagagtagtgcctcttttgttcttagcacctttcctcctgagtactaggttcttataaaagggaaggtaaatctgaagtaggctgcaagctactcttcccaaattgagtaaggttttgttctttaaagtgaagataagacccaaaagtctagctggctccattccaccttctcttgcctccttcccctctccgtaaaaaaaatgtcaactttgggttaacttctt

SEQ ID NO: 193293 - DNA, 652 bp, Homo sapiens
tcccatttcttccccagtccccaaagggtagtcacagctactacagaactgttaacagcacagctaaaagaaaaaaaaaaccaaactagctacacgacagaaagattgtaggtttttttaagagtcagtgggttttaaaaagggaaaggaattgaatcagaaaaataggaagacacatgtaagaaaacacaccagtccaatttcataccaggttatctcctgtggcagagaataatcttagcagtccaagcctaacccctgtcactgataaccttagaaaaccagaaaagtcagattaaccttagcagatcactcaatttcaattaacgctgtagttcctgactaacaggccagcgggaagtagagggccagagtagggaggtagcagtacagaggagcacagatggaaggtttcacttccagctaagatgtcattctaatgattaattaaaatgtttgaaaacaaaaaatccaataatgtatgatttattcaaaaacgatgtgcaaggaattttgctagacatcccagtagtgggggtgggaatgggggtaatgacacagatgcattcagggaatttaagagtcattagaggctgggcacagtggttcacacctgtaatcccagtactttgggagctgaggagggtggatc

SEQ ID NO: 193294 - DNA, 422 bp, Homo sapiens
gtcgactccgaggatcccttattcgtgttgcacacaagtagtgatagagccaacgggaataaaatgactccactagaagagataactgctacaacctgacaagagaacacaacggctgcattttccagtgttccaaataggtaagtatactcactgcttaagacaaaattcttttgcaaaattttctaacccatgagatcaccagaaaggttggctttgtaaaaattacaaagttgtactgaaaatgtcaactgattttgaaaagatttctctaggtagaaatctgaagaaatggcattacactgtgaagagtgggaggaagtagggttaaaactgacaataaatatttctaatcttaacatctcaggaatattctaggacagaatgctgtatggggactttttttttcttttttttgagac

SEQ ID NO: 193295 - DNA, 278 bp, Homo sapiens
atagaaaaaataatgcactgtatgtacattattaagcaaagtggaatatttattgggtcattttatcatgcagaaattgaactctacaccactcatctaattagttgaattttacccattcatctacctgttcaaatatcttgctgtatagtactggataaattattaaatagtctctcaatagtgcaatatgcagtttcagtgtcagtaaagtgagaaatataatctgaagataaaggagctgttttcacgttgtcacaaaacaccagtgccacata

SEQ ID NO: 193296 - DNA, 274 bp, Homo sapiens
acggtggaaccagcagagaagagaaaacgagacagccacagcgattgtttgcaattttgaaacagactgcctttaaccctccaactttttttctgtaaaaagccttttttctttcttcctctgaaagctttgcattgtgaacaatccatggtaaacaaggctccctctacagccgcgagtgcgaagtacaaccccacaggttcagagcccagcgtttacccgtcagaaaaataaaatgatgacaagacatcacattagcgccacgcaggcttcc

SEQ ID NO: 193297 - DNA, 151 bp, Homo sapiens
agcaggggccgctctgtaatttccatgtctgggacggatttcaggactgagctgttttcctctttgacccggcagaggctgttgcccaagtcaacagtggtgcgtttttgaatttgtctttgttggttttctttttccctttcttcttctt

SEQ ID NO: 193298 - DNA, 655 bp, Homo sapiens
ggccagcccccgcccactctcctcccccatccacactgtgaaacaaggacagaaacaaagggcctcagccacgccaagacgagaagcagcagcgcatactgctgtaactgccttggacaagcagaaaaaggctcctcttgaatgcgcctgtgggcccagctacttgggaggctgaggcaggaggatcgcttgagccctggagattgaggccgcagtgagccgtgatcacgccactgcactccagcctgggcaacagagagagaccctgtctctaaaaaataagaaaaaagaaagagagaaaaagccttttctccaccttgccctgtctcagggaagaaggaactgcccttctccccgtggggacctggctgcctgctctgacaggtacctgtcatctgcccaccatgggcttctgggacctgctgtagcccctgccacccactgctgcagacccacccactctcagcttagctcaaaagctgttctctaactcatttctgagaataactgaagggctggagttgcagttggcccagctgtctggaccagatggggaaacaagcccagcagggcaagatgattggtctaaggtcgcagccaggtgacagctgggtcacttctcctcccactgtcactgctgcctccatctgacttg

SEQ ID NO: 193299 - DNA, 107 bp, Homo sapiens
ctgctgggctggtgcagagggagtcaaggatccctaagagagaggcaggggtgttcagctctcccacctctgctggatgaacttgcagagcctccttggtgactgag

SEQ ID NO: 193300 - DNA, 567 bp, Homo sapiens
cgggaggtggaggttgcagtgagctgagatcacgccattgtactccagcctgggcaacaagagcaaaactccatctcaaaaattaattaagtaattgaagttcaataattgcttcaaaaataccataaccacctttaatcaccatcatttttctggaagcattgattaaacatggtggattcaattagacatttatgtcttccctctcagaaccccactgaaatgtctgttaagtaactgaaattgaagtaactcaaaaaggccaagattgagtgagtgcacaattatgattgagagatttccaaaaaaatcttaaagataggaagtagatggtgctctgacagcagaaggagctccaccttaagtactgtaatgggggaagccatttcttcctctggagtcccagaaaaggtcaggatttggaagcatcaggttctacaggaggtagaggttacagaggttcatgtttacacacgaaataagaggttcagtcttttacgttgaaatggagtctagactcaaggtcataaggcccacctgagggcatggggtcaggcctgaaaagag

SEQ ID NO: 193301 - DNA, 459 bp, Homo sapiens
taccgtatcgagccggaacccatgagcaaatagggattcagagttctaaaattatgtggcctgggcctctcatttcactcacacagaactgactctggctttatttcttgtttattaaagtaagccaagattttgtttctggtaaaattagttgagactactttagttggacttttagtcctctgaatgtcacatttagatatggaaaatgttttttcacagagtagaaacaaagtctgatcacaatcccaaagctttgtttattcttatataatattttggtactgataccttttcagccacatactttcaaaataattttattaaaggtaagccaacaaataaaacatagaggcttttgaagtgctttaatattgatttaaaaaattggagttataaccagagtatgactgaaaagctattatagtcttcctccttttccaaaaactcaaggataag

SEQ ID NO: 193302 - DNA, 637 bp, Homo sapiens
tattctcctttaacctggaacagttcctctatcttttggttggtttgattctcatggtgttgatatttgagagtacatgtcagagcttttgtgtcccacacttggatttgtctgtttctaattctcataattagattcaggttatgcatattttgagattaatacccaggtggtgttgcatccttcccactgcatcacatcaaggaggtacagggtatcagtttgtcccattactggtctcactgagtttaatcgtttgttcaacataggtataccagacctttccattgtaaggtatttttccctctttgtaaggagtcagtagtctatggagtggtactttacacagtacaggactagtaatattttttttcttcaacagtctttcacctagtgcttttagcattcattgatcgttccctaaatcaaatactgtattagactgaaggttacaaaatgattattttctagttcttttgtttttgtttttttgagatggttgagatggaggtaggtggtagtttgtgtttaatatttttagttgggtgatgaggaatagtgtaaggagtataggggtaattatggtgggccatacggtagtatttagttggggcattaggagaacgcgtacaaatcg

SEQ ID NO: 193303 - DNA, 407 bp, Homo sapiens
atatcagaagcatttttttctcttcgtatggcgagcccatccctgtagggagccaccttcacccttctcaaacattttagcagaagactcagagtttgggtccaggaattctatatttaagaaatgtgtcctaagggaaaaatcatgaaagtctgcacagatttagttgcaaggatgctcattatggagttgtttatcatggccaaaaattaggaaccaacctaaatgcccaacaataggagattacttaaaagaaattgtagtccttttgagaacagacaactaggcagccatttaaaatgactctgcaaaagataagttattgacatgcaatatttgccaccggcttcacctgtgaaggtagataatgaaagggtatcgagtatttgtacatttatgcttagaaa

SEQ ID NO: 193304 - DNA, 400 bp, Homo sapiens
tacgatgctcgacaaagtgaggggttgaggagaggtacaggtgaaaaagccaggcagtagctacttgtgcatattcaaggatggctaagttgtttgtttggaatatagttcaaggtaggcagtaaaaagaaacagagggaggatcatgaatgatcctatgtgctatgcaaaagatttatagattttatcctgaaaatgatagagaactatcaaaggatattaagtagggcaattaagtctgagaaagttccttctagcattatggtgcatatcagggtcatggtaggatttatattaattcacagatttgtggactgcatgtccaggtaggtggtgggtgggaaagacaaatagttccattctaggaaaacagaatcagtagtaggagttgtcgagagta

SEQ ID NO: 193305 - DNA, 399 bp, Homo sapiens
agaggatcaactaactgaagctttaaatgggtatcaaatgaaggtaattccactctgacttgcacagtgagctacagagtggtagtgacagcaaattttctaaacagtatcataatttataagtctcttttacatactcatcatctcttttgtttcttagggaaaatctgtgaggttggccaaatgtagttattgtacctatttcatatatgtgaagatgagactcaagatcccataatgagtaaataaccagaaccttgatttggaatcaagatcttataagatcatcttctagacatactaatgtaccaataacagagatattgaagaaggcatttaaaaaatcaacttttttgaggtataacatatatacacaataaaatattcccattttaagtg

SEQ ID NO: 193306 - DNA, 303 bp, Homo sapiens
agactgcactactgcactctggcctggtgacagagcgagactccgtctcaaaaaacaaaaacaaaacaaacaaaaaatgactaagtactaatacatgctacaatacggctgaacctgaaaacatattaagtgaaagacttcaagccagtcacaaaagaccacatattttcacaaaagaccacatttatatgaaatgtccagaacagttaagcagtgtagtggttgcctagggctggggagtagctgggagagaaatggggagtgactggtaatgggcacaggatttcttttggggggtgataa

SEQ ID NO: 193307 - DNA, 636 bp, Homo sapiens
gtgcgcgccgaggacccgacggcagaagggacgatggcaacgtacaaagtggaagcatacactaagacgaggttatatgctgggccataaaattagtctcggttacatgtcaggaagactgcaattctacagaagatgttctctgaccacaatgaaattcaattagaaaccaagatatctagaattcccaaatacttggacatccaacactttgataataacacatgaaaattatgtgcatgaacttatgtgatagagctacacgcagggtttagtaggcaaatacacagctttcaacatgcctatgtaggacaagaagggttgggacatcgatctcaaatttctcactttacgaagctcagcaaataaagaacagattcaaacccaaagtaggctgggtgcggtggctcatgcctataatcccagcactttgggaggttgacacatgtggatcacctgaggtcaggagtttgagaccagcttgaccaagaaggtaaaaccctgtctctactaaaaatacaaaaattagctgggcttggtggcagctgcctatagctactcgggaggctgaggcaggataatcccttgaacccggggtacagaggttgcagtgagccgagatcgcgccattgcact

SEQ ID NO: 193308 - DNA, 541 bp, Homo sapiens
ctggctattcccaatggcaggaaagagcttctgctcatgagaaacttacaagataggcccaagatgggatctgacatcaatactgatattgataatggttaatagcaggcattaggggttaagtgctgccccagaggtgcagattgttacagacatgcagagaaggggaaagatgctttctcaaggaagcttggaagtggtcagagagtcattcatgtgagggaaggtcaggggaccaaaatagaggaatggaaacagcttgagcaaactcatagacgaggaaggaaggcataagtctttggattttcccaactccaactgacctcagcatgaaaagaaagcagggcttgactggaaaggaagctcactctctggcaatgtggaaggccttgctcatgggtgaggatgtggaaggccttgctcgtgggtgaggatgtggaaggccttactcgtgggtgaggatgtggaaggccttgctcgtgggtgaggcagttggatgcgattcaggaaagaatgggggttctctgagggttcagtggag

SEQ ID NO: 193309 - DNA, 331 bp, Homo sapiens
aaatctttgtacacttctccaattctagattggaattgttaaaaataaatcatagaaatagactactaaatgaccatttatatgactaaaattttaagtttgcatattgctcacttgtgtatgatggtaggggcatttcaactagacctagaaaggtgagtaaactgcgtggaagatgtgaatgtaggaaggtggcaggaaaggtgaaaggttagtctgaaaagggtaaaaaagcagaatatatctctttatctcaaagattcgaatgcaatttaaaatggaaatatatgccagctattaatctgacttggtgatatatgctactattaga

SEQ ID NO: 193310 - DNA, 255 bp, Homo sapiens
tcacctacatatgcaattaatcagaatactatataacaaatgaaatcataaagaatgtccacatacagtggtaatacataggagagaatgattaactctgttttgttgtgggatggcatggggtcagggaatgctatagctgcattttaaatcagtccatactgaagtgaataggagtttaacagatagctttaaaaggagacatacaacttgtttaaataaaatgtgcaattaagcatcttgggtagtcacaga

SEQ ID NO: 193311 - DNA, 400 bp, Homo sapiens
tctcaaaaaaatcaggataattatgtatcctttttgtggtggtggttgtgattattaaatatttggcacagtgccagtcacataataagcactcagctgcttcatcaatatcatcctaacgttagtcgttgtgtggacagcaacagattaagtaaaaagttatacccctaccccaattctgtttcagtctttctgtgtttggcgaacttcccaggtgattcttacatttaatacatgtgaaaaccattaccctaaaggtcctttcatagtgaacttcatctaggacttgccaaagccactaacatgaaggagttgagatcaaattcattttgtctaacactatatctcaaatgcataatattttgtctggcatatagtaggcattcagtaaatagttgtt

SEQ ID NO: 193312 - DNA, 640 bp, Homo sapiens
gataaacacagttattgtgattcacaatatttgtgtaaaaggcaccacactagagccttcccaagtactcccaacaataatattttgagaactttaattttttatcttgggtggctccatgccacttggattcagctcggggctccccctcagtgttaacacctacagtaagtcagaggaggcttgcaggatgacccggtgcttccaggaattgcctgtgccctccagaggcaggcggccgatttccctttggcagcaggtgtcagggaggtctacagcacctgatcacctttccagatcagcttggagggtgctaaaagcaggggttctccaacttgagtcaccgtcagaatcacctggaaggcctgtgaaacagatggctcaggctcaccccgcagtggctgactcatctgtgctggggcctgcaaagatgcatttctattttttttttttttttttgacagagtctggctctgtcacccaggttggagcacagtggcgcgatctcggctcactgcaacctctgcctcccaggttcaagtgattctcctgcctcagcctcctgaatagctaggactgcaggcgtgtgccaccacacctagctaatttttttttgtatttttagtagagacaaggtttc

SEQ ID NO: 193313 - DNA, 482 bp, Homo sapiens
tacaaatataaagggggttatagtacatttacttgtatcactgatcctattgcacacactttgcactagaggaaaaccttgaagcagttgctcaagctttgttcaacaacagggaatttatattggagatgagtcctgcaaatgtaataagcttagaaacacttattttttttttcagaaactacagcttagaaaacaccagagagtttataccaaaatataattttgcaaatgtggtaaatataaaaaactaattcaaaatagaatgtatttaaatatcagagaatttacagtagaataactaaggcactgacacttcagacattacactaaatcagagtgttgagtataaaaactaatccacaactacagtttttagataaatgatttgcatgtaactgtaaaaggagtagatttttggaagcattgtaattacattgaaagtatacttgtttccttgaataaaattttttgaaaactgc

SEQ ID NO: 193314 - DNA, 753 bp, Homo sapiens
ctcaggcatgatctctagaaaagccatccctgacagcttttattctcattctttaaacacctgtgcctaccacttagcaggaactcaataaatatttagtaaaataaagactgtctacacagagatgattgctacagtctagcaacaaaggggatagacatgcaaagacctgatgtgcagctcagatggtgaagtgacactagaaaaattcaaaaagtacgaagggagccccaagaaaggagacacctgtgtacgtggagaaaagatagccagattcagggaggacttcacatagaattttgagccttttttcctttttttttttttttttctgtttttggaaacaagtttttactctgacacccagggtggagtgcaatggcatgaccgagactcactgcaaactgaaactcctgggcttaagggatcctcttgcctcaacctcttgagtacctgggactataggcacagaccactatgcctggcaaattttctatagagtcagggtttcactatggtctctgggctgatcttaaactcctggcttcaagcagttatcccacctgggccttccaaagtgctgggattacaggtgtgagctacgtgcccagcctacattctgagtcttaaaacacaaaaataaattcctcagaattgtagaggaaaatatttcagatgtaaaaaacagggtgtacactgtaaaggtataacagtaacaaaaattttgcaaattattagtaaataacgtgctta

SEQ ID NO: 193315 - DNA, 319 bp, Homo sapiens
caggggtggcagggaagagatgccgtgtgtgctcaaaggcagctcaatttggaggctgggagtgggaacacatcatccctgtaaagatgggatcagattgaaacttctgggacctgatttcaggaatgagctgcaacaaaatgcccgcacacttcttgaacaccttccttttcctccccagctaaaatcctttcctgattcctcagtctcccttgggttcattcacttccctccagccctacttttcccctcttgcttctgggcagtatctttagccattaccaggttttcactcacaccaggacctttgcacatgcca

SEQ ID NO: 193316 - DNA, 222 bp, Homo sapiens
ggctggtcggatcaatggggctcagtgtcagatgaggcaaagccagcaggaggcaaggatgattctaccttgagtgacagaggtagatgtcactcagatgctaagatcggggaaggaggagggagaggacaaatttgatttggggcacacggttttcgacatgtacaaaggacatccagatggcaatgggctatgtgagcctggagactgtgctgcgagttg

SEQ ID NO: 193317 - DNA, 391 bp, Homo sapiens
ggtacacgaagagctccaaggaggtctggtgaggtggtgccatcttgatggtcactttcacggggacccctttttttgaacttgatcttgagaatttcaggggtgttgtgggctttggctaggtcctgggtatatcggtaatgacatctttgcctttgtgttcatttttgaaaaatatttgatctggctgtatgatttttagtctcacagtttttttctaacagcactctaagaatgtcattccatttccttccagcttgcataatttctgacaagacatgtgttattatatttactcctatattatgtgcctttttttctgggtacttttaagatttttttctttgttactttttttttttttttttagcaatttgattatatcatgtca

SEQ ID NO: 193318 - DNA, 431 bp, Homo sapiens
gattcttgtttaagccagtccccaaccacatttctaatcactggctggagcctttcaaccagggtctccagccaccttcactgctgttctctggctgacagaggtttcaggcctcctgagtgagagctcccagggggaggaccagactgtcatctttgctgtttggatgactcagccagttcagtcttagagtttcagagtgtctgaggagaccaggggctgaagtgaaccccccgcacagcatagccactctacaaaaacgtggccagacttcttttttaaacaagtccctattcctgttcctccttactaggcaagacttctcaacttgcttccagtcacatcctacaggtgtgttcagattggcaacaggttcatacctcagaggtacagagctcccagagggaagggcaggttatcgtctttgcttt

SEQ ID NO: 193319 - DNA, 104 bp, Homo sapiens
tcttggaaaatgggacattacctctggggtctcagtgaacggagggagctaagtggctgctgtgcccctccctgtctttgcgtctttggtcctgggcacagtta

SEQ ID NO: 193320 - DNA, 606 bp, Homo sapiens
gcacaaaagagatgaaaaacaaaaagatcaaaactattttcagtaatcatattgttggttgcatttagtactgttattctgaaactattgcatgttgtgtgggttaaaggaaataaacaattatgtaatacgctaattgtatttaccagtaaccttaagaattgtggttcatatctgggaaaaaggagatatagatataaaccagaaaataagatattgcatggatttattggccaatatcatttcttcagactaaggaacacactgtacagcctgtaatgtccagcaataggcagagagatattctccttagagtaatggtttgatagggaagtagaacaggcaattaaaacattgatttaaaaccactatttaaaagcataaagattggattacacaccttcatgactgtgtgctcacactcaacactagtggaactaaaggatctaaaattctccatttttctggtgcatctgaggaagagggattggagagtatgcaggtatgactatgcgattcttgccaaggggggaatatgctggtataatgatcctacttttttccttttctccatgtattacctcaacttttatctccctacctgat

SEQ ID NO: 193321 - DNA, 238 bp, Homo sapiens
aactatatcaacaatgagtaggaacgtcagttctgtttaaagacaggaactgccttacaaaggatgcaccatggatatcaagcaatgtatgatgttgtgaccaaaaccactgatccagttttgtacaaaaaccaaaatacttccccagctctttagttctcatttcaaaaagtaacatactacttgtagaaaatctgagaaacagaaaaataaagaaaaaaaattagtcactcatagc

SEQ ID NO: 193322 - DNA, 161 bp, Homo sapiens
tgtagtcttctggatatggctgatctgaattggactgaactctaccatattcctgctgagtgggtcattattggaatgagacatttgctcttcagagaacaactttatttttattttttcttgagatggagtttcactctgtcgaccaggctggagtgcag

SEQ ID NO: 193323 - DNA, 175 bp, Homo sapiens
ggcggacctgaaagctcgaagtactatggtagaaatggcgccatcttccttttcatgcttaaaaaccaccacgctcaaagcactgtattggcacacatatttaccttctaaaaaatgcccattttattttagttgtatataacgtatattactttgatagcaaatggaggaggat

SEQ ID NO: 193324 - DNA, 265 bp, Homo sapiens
acaataggacagagcctgtcaggtgtgggttgaactctgctcctccttaggaaggaagtctcaagcttggcctaagctttgagaattctggggggcagagcgtgaggtctgaaaggggctgttgtggcaggcagggcggccacaacagcccctttgctctgttgtgtgggtgcagccgggagtcagccggaacgttgagcctggcagggagagtggacccgcgcagagctcagtctagatggctgggaggcttgtggggagaaga

SEQ ID NO: 193325 - DNA, 485 bp, Homo sapiens
ctccagggctcggccaagggattcaggtggaatctcgggggcgaccagacgtctttctaagaagacagtgaagcagtattaattaccagaaatcattttatctgtggtaaagaaaaatatttaaaaagagaacagcatgtggaggctcacgctgtgaacttttcctccgagaaccaccgcagggacgtgccacaaagagttcacggatcctgtggacaaagcagctcacagctgcaaactccccgggagccagaatgctctgctgccctcttgacagtgccacctcctggctggaggccaccaacgcaaatggctacagcaaattctaaccaacaaccctgctccaaggaaggagaaagcaacagctaatcccaccacctgcaacctcctggctgcccacaggtcccgagtctgtccacgtgacaacttcactgcagcataaccagcattcgagaaagccagtgcactcaacaaaactacaacca

SEQ ID NO: 193326 - DNA, 202 bp, Homo sapiens
gcaagccagggaaatgccagatgcttataaaaccaccagatctcccaagactcactcactaccatgagaacagcataggggaaactgtctccatgatttgttcacctctacctggtcctgcccttgacatgtgggaattacaattcaagatgagacttttggtggagacacagccaaatcataccaccctttaagattcata

SEQ ID NO: 193327 - DNA, 501 bp, Homo sapiens
agcaggggagggtggaatctttgcttgcattggggtggagtcaatgtccaggggaaaaacaaggagttgctgcctaaagaaagaggagagaaggaaagcaaccaccagcagaatgtgcccattctgctttgtcccaggtggcttcaagccctgaaataagaaagcagtcgctgaggccaccatgatgccttctttcttctttctttgcttgaagtaggggaatgttccttacaaaaaaaaaaaacaccggaatatggtaaacctcctgcctctcctgacaacctgcagctgccttctggggccctcctctcctttccctgcctgtgcccggcccagctagccctgccacagaactgtttctgggcagaaatactccaagtatccctgtgagataagtgccgtggaaggaggtgcatggatgatgcacatgtactgctcgctcaccgcatgggacctatgactgttgtagcaaatgatcataaacctgacggcctcaaacga

SEQ ID NO: 193328 - DNA, 495 bp, Homo sapiens
tacttgcagataggtaggttaggagaggccttattgagcaatgatctgaatgaagtgaaggagataaagaaagagtaatggagcagcaaaaaaggaggggaccacggtgagggctttcacttttactctaagtgaaatgggagccactggaaggttgtaagccacagaggaacagctaatttacattttatttatttattagaaacagagtctctgtggcccgggatggagtgcagtgccacaatcagagctcactgagccttgaattcctgagctcaagcaatcttcctagctcagtctcccaaatagctgtgaccacagatgcataccattgtgcccgactaattttttttgtgagacggtttcgctcttgttgatgctgaagtacaacggcacgatctcggctcaccacaacctctgcctcccgggttcaagtgattctcctgcctcagactccagggtagctgggattacaggcatgtgcaaccacgccca

SEQ ID NO: 193329 - DNA, 1471 bp, Homo sapiens
cggactcctggtctcaagtgatcctcctgcctcacctcccagagtgctgagattacaggcatgagacaccgtgcctggccttctttgcaggatatatatatagatatagatatatatataaatcagccaggtgtggtggcacacgcctgtagtcccagctactagggaacctgagtcaggaggatcacttgaacccaggaggtggaggttgcagtgagccaagatggcaccactgcactccagcttgggtgacagagcaagaccctgtctaaaatatatatatatttatatatatgtacgtgtatatatgtatatgtatgcctgcggggccctattgtgagtttgttacacaatttactgcaacttcaattgtgccaccagcccccacaatatggcaagctaaatagagactcagttatgctagggctggttgagggcattttgcaagattagcatggaaagggcccttcatttagcactctgctccgttcatttttgtcaggtcactttcttatcttgaccaggttgtcagatctcttttactgctctagcctcactttcctcagcctcctgcagcatcttccccatcagctggatcccttcctctctggatgaagtccccttcatcgaccagctttctcacttagttctctaagatagtgaggatctgtctgcttttttcttgaccattattggataggaaaaatgctctcatcctctgtaatgatttgtcaccaaggccataaagacattgaactaaatgtcttatgggagttcattattggaagtcttcaggagtttacacatttatgtacaaagtaagtaggccagctcatttgagtcttggctcatgtgtaatgatctttcatgtgtattgaaaaattattctcaagtatacctcaggtcatttacagtctcaaagatttgtcagtatactttaaaacaatcctgggaacagttctagattgaaggagactaaagaatcatgtactaagtgtaatgtctgatgtttgattggattgtgaattttttaagccatgttatgattgggacaattgtgaaaatgtgtatacggaccgcatagtagacaatgataatatgaagttccattgagtgatgatagtcctctggttatgtcagagaatgccttggttcttaggggctgcacactgaagtcttcaatggtgaagggtcattatgtctgcaactgactctcaaatggttttgtccagaaaatgtatagacatacacacacggaaagctaatgtggcaaagtattagcaactactgattccagatgaaagttatacaggtgttcattataccatttgaaaatgtttcccagccatcctaaggcttaaaggaaaaaaagaaaatgtttaaaataaaaacttgggggcagaaaaagaataccaaaaattttgggctcatgcctgtaatcccagcactttgggaggccaaagagagaggg

SEQ ID NO: 193330 - DNA, 709 bp, Homo sapiens
tttccaaaaattgttacaatgcatgaaatgtaaatttttcatggtacaaaggtttcattttaaaactctgtaaacttttaaaatgtattcccattcctcaaatttttcatagtaattcattactagattgttgacagagatatatgtgaggtctctgtaagccttaggcttccagataccatgtggattttgtttttctttttataaacttctgtgatattctgattaaattaaacaccctcacttgctgcccaagttcctttgtgttttcaaagagtttgaggattcattactaactaaataatgcaaaatatctgctgatattgtcacattaccttccttgtactttaaggtgtaagtgttctcattgctcagttctctaatagcctatcttaacaggcacatattgccacaaaggcaaaagaaatgtaaataactgtgtaaaatctcaggttgtagcactgcctgcaacatggtttaatttcacatgagatgtgtacctccgtaagacattttgtccagtttacttgagtgattactatttagtaataggagttcacgtacttaatgtttgctagggtttagcatgtattacctaataatggaagctataatttgtgagtgcacgataatttctagtttgtctacatgatttctgtggttctgcatgagtgtccaatgtttgtatttaaagagcaaatgaaactgc

SEQ ID NO: 193331 - DNA, 226 bp, Homo sapiens
tatctgaactgacacttggcagaaaatgcgggtgggcagagaatggcccctggactaaggtgcgaactatgtgagggctcactctggaggtatacctctgatgctgctgcagcggcatgaatgtgaaatgtctaactggtcctaggactatctaacgtggtcagtacagttcccttctgccttttattgttttattatcaatgatatttcatttttatttcagttc

SEQ ID NO: 193332 - DNA, 533 bp, Homo sapiens
cagaatccagagttcagccaatgcttccagagagactgtggctgttaactgtccctgttgacactgggacctgtctcccctggtgacctgagtcttaccttgattctcttaatgacggagagggagacattaagaacttgggagccaatgccaggcgcgagctacactggtctccgcctcctgctccctgcagatactgttggggaccagcctcaacaccacccgtagggtacccaaagtccggtggcgacaaaggaatgagaagagacaggttaagagtgcataaagagtgagggccagggggccaattgcaaatcggaggctgcaaaaggcgcagggttctggtctccactctattgattgagtaccatcacttacagctaagaagcagacgttcagggcgaaacagtgaaagggaggcagtgcgcccatcatacgtccttggtacgcggcgactcgccacgggttggggcgtcaagaaacaggatcagcgcgccggtttacagcgggtacacgggaccagtccacttagg

SEQ ID NO: 193333 - DNA, 318 bp, Homo sapiens
taaaaaaaaatacagacaggctctcactatgttggccaggctagtcttcaactcctgggctcatgtgatcctccttccttggcctcccaaactgctgggattacaggcatgagccaccctgcccagcctttggaagccttttgttagggagttacttcccaaaccctcctgggaaccctacctaggtgctgggaaaaaactgggggtggtgggtgggacagggtgagagggtgtagggggaaaaggaattgggaagggaagaagaaagaagagggaaggtgggcaagggaggaggaaggaggagggaaaagaggagca

SEQ ID NO: 193334 - DNA, 367 bp, Homo sapiens
gctcggcccaggtcagtcttaattgaagctggggcagttacgtagctatcagaaacaataccttagagggtaggactgactatgacagcaacatagactaaagatgtggagaaaagctctaactgggtccctatataggacaagagctgataaggatccatgtcataacaggaagagactctagaaaaccatgtgctggactactaagactagggaagctgcacagaaattagatgcttgctccagatgtgagtagatgactcactctagaaatccaaggggatactgagggaaggtatggggcccaaaatctattatctaaaggatgtagaaatccaagccaagaaacaaacttaagactggtcct

SEQ ID NO: 193335 - DNA, 190 bp, Homo sapiens
cttttgggtctcataatatttttttcaaagagtgatttttaatcactgggtaggggaaagcctgaaaatacgtttacttatgttttaaggaaaaggaaaggtaggatctatgggatttgaaatactgggataactcgggatcagacaaccctatttcacaatatttgtgtttttatcttaggatgcatac

SEQ ID NO: 193336 - DNA, 383 bp, Homo sapiens
agctgcaatgtaaggaaagaaacacagaaaaaaagacaacaaaattttccaggataaagagagaaaactgttcacaacagaaaatggaaataggagacagaacaagattcatctaagcgcgaccagaccacgtaggaagctttagataaagaagggaggaatagcaggaacaagagagaatagagtaagaaaggtggttagtggcagaaacggtagataagaattctcagtccagtcaatattgaagtcaacttcatagggatggtggtggggactggagcaggggaaccttgtaactcaaaatataaaaatgtaaaaaataaggcaaatatattaaaacatatttgagtaaaaaatgttaatccccaaagtatcaaaaggtg

SEQ ID NO: 193337 - DNA, 357 bp, Homo sapiens
aaatgtaagaatgcacatactgtagtgagggaagaatgaatttaatcaaggcatttttttttctctttaaaagtcatccattcattcgattgcaatggctatcagataagcttcgggccactgaaaggcaaattggacattaatttctttcatttgagtgctttttcctttgcaactaccaataatgaaattaccacagagtccctgtttgggggaaaaaataactcaaacgtttgttgttgttttcttttttcacatctctagaaacagaccaaatagctgagcttacagattgcaatgctcttcctgtaacagtcacctcacagaacctgctgccaaagaggtgagaagactaga

SEQ ID NO: 193338 - DNA, 418 bp, Homo sapiens
tctgtaggccaagattgataaaaacataaaataaaaataaataatacattaaattttttttaccttttccagatcacagatttaaaaagaaaaaattttaaagaaacagaaacctcccatgtgcccctccttatgccatctcctgcaaggaggtttaaacactcctaaattttaagaattttcttgttaaactttgttaactgctatatgcttttgaactacataaattgtgatagtgtatatattttgctgcaacttattttttactcaacatgttttttagattcatctatattgctgcacgtagcacacttaaataacactcaagacaggctacaaatattaatttatctcatcctcatatcaagcctgtgtgattgggcaggtactatatttgcagatgaggaaaatgaatcac

SEQ ID NO: 193339 - DNA, 507 bp, Homo sapiens
ttaagatcacctgtaatcagctcctctaaatgaaacaactattaacaattaagcatatatcctttcagtcttaggactcagcacatattacagacagaggggctgattcagtacataatgttctaagtcctgttcttttcttccaatcatatattcacaagcatctttctagtcaacatttgcacttccacagcatgatttttagtggctgcatggcaccttgcatatgactacaccacgctttgctcaaccaatccccaatgcccagcgttttagcttgtgtccatttctcccctgtgagaaacagtacatggtttattcttgtagttacctctttgtaatcaacctagttatttccttaggacaccttcctggaattggaattactggccaaagggtttatacttttttaaaaagataaaatgcaaaattataatactatcctcccttcctataatgaatgtgtaataattaggtaataaataaaaattagaaaatatagataaa

SEQ ID NO: 193340 - DNA, 639 bp, Homo sapiens
tatcagagaaaaggagagtacaagcagaatgtgccagtggggagcccaactctggagctgactgcttaggtttggattctggttctgctcctcactagctatgtaactagggcaagttacccagattctctgtgtttcagtttccctgtctataaaacagggatggtaagaatagttcccacctcatggggttgttctgaagatcacacaagctaacatacatgaagcatttaaaacaatgcctggcatagaacaggttctatataagttgttgctatcattatggaatgaaccacccaagagcaaataccctgtctttctcatctctgtattcccagcacctctccaagtgtctggcttacagtagatgcttgatcaatgtcatctgggtggattctggagggcagtgctgatattttgaggaatggccaccatgataccatctcactcagtacatctatggtgtgacatctccctctagatcccttccatggggttcttcatgctgaacggatggcaattgttctactcgcttgtttggagtactgacagttaacaagataaaagggacagaaactgtactgccacaacacagcaaagtttagcaatggcctgccatcgcctcctctgttccagcca

SEQ ID NO: 193341 - DNA, 265 bp, Homo sapiens
cctggactgaaagataaaggagaaaagtcacatgatcatatgaatcatcagaagaaggggggaggtagagacagggcagaagaggacatgaactctggcaccctcagtaccctgcttattgatgtgacaggaggaatgtttctgtggacattcaaggttatggatcactctcctgttgccatccagctctccacagctggtgcccttgtgggcctggagtccagcatcctggttcaggcttctgtctgcagtcagtgggcatacc

SEQ ID NO: 193342 - DNA, 353 bp, Homo sapiens
tgcctggctaattttgtattttttgtagagagagggtttcactatgttgccccagctggtctcgaactcctgggctcaagtgatcctcccaccttgacctcccaaagtgttggggttacaggcatgagccactgtgcatggtgctgagactttttttcagtgtctcagagactgttgtatctagaaagagatcttagaggtaatctaatctggtctagagtttttttttttaaggctttatttatatacaatgtacatatcatgtaagttacatgatgtgactgtatatcatatatgattacgtatcccatttaaagtgtaccattcaactttttttttataggattgtacaa

SEQ ID NO: 193343 - DNA, 833 bp, Homo sapiens
gcctctgggttcaagtgattcttttgcctcagcctcctgagtagttggggttacaggagcccgccaccacacccggctaaatttttgtatttttagtagagacggggtttcaccatgttggtcaggctggtcttaaactcctgacctcgagatccacctgcctcagcctcccaaaagtgctgggattacaggagtgagccaccgcacctggccaattttttgtattttagtagagacgaggtttcactgttgcccaggctggtctcaaactcctgtactcaatctgctggcctcggcctcccagagtgctgggattacaggtgtgagccaccatgcctggccttgaattttttaattaaaaaaatttttttttcagaatatcactctgtcatattttatctaatttcaatggtaattaaattaaatacttttttgagcagtaataccgtcacatggcttcaaattcaaggggtacaaaaagatatagtaaaaagcttccctcctatccttgttttcaacgccctcagttccttcccccagcagcacctaatgttaccagatacttaggtatccttccagagacatttcctaacatatatacaagcaaatacacacacacacacacacacacacactgaatgtatattctgcatccttcccccagtttttatacagatgacagcacttagagtgctggagtttaacagctgctcttttgtatactcaagaatacagggttcttcacttaacagtattccttggatttttttttccctattagaatagaacttcttcattcttttttgtacggctgagtagagtattgtattgta

SEQ ID NO: 193344 - DNA, 360 bp, Homo sapiens
ggggacttttcctcaaatctcagtcaaaacctaatgaagctcctggagataaaacttatgaaagtgtggaggcccccataagactggacctcctagtagtttttaatttgcaagttagtatacactgagtctccagcaattcattaattacagtttaaagctttgctgctgatactggctcttgctgcacggttctgctcctgggcttctactcaaagccatgattctctgtatttgcctgtctttctagttttgggggcaacctaatgcatcatgatggattgagttgttaacgtgtagtttgttcagcatttttcttgtgagatgggagtaacagtttccaagctctttacatggtag

SEQ ID NO: 193345 - DNA, 347 bp, Homo sapiens
ggaagtgatgtggattattttggggggcgggagtagggggcacttgaattagccagctgatgagccctcttatcgtccccttccaaataggattgaacaggagtggctcccaagtcctgccccacagcaggaggccgggagtgtgcaggccgcctcatccacaggccagagcctgagctgttggactcagcagttccagctgccagagcactttcatacagaggcctgagctttcaaaactcggcccattggcaagaatccatgttttatggttaataaaactgaggattggtgaacagttaaatcagtcattgaaatctcaggggtggggtccagagttgcttata

SEQ ID NO: 193346 - DNA, 253 bp, Homo sapiens
atccgcccgcctcagcctcccaaagtgctgggattacaggcatgcgccaccgtgcccggccaaagtaccttctattgagtattttctgtgtgccaggtgttcttggattttggggatacaaagtgatcagaagaaataaaaatcctagaccttaatgtagcttacattcttgtgtagggtatagcaatatatgataaataagtaaaatatgtagtatgttagatgctgataagggctgaagagataaatatag

SEQ ID NO: 193347 - DNA, 152 bp, Homo sapiens
cagacagattgcttgagaccaggagtttgagactgtaactgcccattgggttccccttctccaccgcttggacagagctgatttatcaagacagaggaattgcaaaagagaaagagtaattcacacagagctggctgtgcagaacactggag

SEQ ID NO: 193348 - DNA, 169 bp, Homo sapiens
gaattctactctaggggtttcctaagttttatttgaccccttcaaagtagaggcttatatttttctcatgctatatagactatgaagtaggagagaggcaaaacagaagcatagtatacagttggaagggtccctaaacacccatttgagaaaaggttgttctcttgct

SEQ ID NO: 193349 - DNA, 258 bp, Homo sapiens
ccatcagctctcgtgagaactcactcactatcatgagaacagcaagggagaaatctgccccatgctccagtcatctccctccaggcccgtccttcatcacgtggggattataattcaagatgagatttgggtggggacacagagccaaatcatatcagaaaacaatcagataagtatttgtctcaggtgagcggagggatgactttctgtcccatgcctgtgaagataagctatcagtttacattggtaaaattcaac

SEQ ID NO: 193350 - DNA, 271 bp, Homo sapiens
catttaagggcctttttaactttctaatccatccctaatgttttctcccaacttctcaagccaaaaccctgcataaggtcaaaatgacccataaccatcctctgaatctgttgcattattttatttacttccttttttcatatttttcttttattttttagacacaagttcttactctgtcgcccaggatggagtacagcggtgtggtcacagctcacggtggcctccaactcctagaatcatgctatcctcccccgtcggccttccaagt

SEQ ID NO: 193351 - DNA, 313 bp, Homo sapiens
gagattgctgaatcataaggtacgcccacaccgaacactagtgaattgctcttcaaaatgatgtaccacagtctacactctcattgtcggtgtagagaagctgcctgtaacctagtcaggcattatattacctagctttataactttataatttttgccaatcttatggtcataaaatcatcttataagcttctctctgcttggtgaccactctgctgttgatccaccaacctccagctggtactgagcatctgccatttttctgctttgaagaggcagcataagcaagaggactccatatagttccacctcc

SEQ ID NO: 193352 - DNA, 819 bp, Homo sapiens
gctgaaggatgggagagggagggtgcgcccaggaggaggcacagcttgagcagaggcgtggctgcatgaccgcggagggagggttcacacccggggcctgtggtacggctggcaggcgtgggagagccaaggtggggacacagagaggtcaaggaggccgaggccgaaaagggaccacagaatttggctacaagaaagcagtttcagtttaacgatgacaagggagcccgagtgaagaggaaaacctgtcaactcctcgtgaaagtcgggagggtttctgcgtagaaaaaaacagcgttcagcagctcagttggctgccgtgaagtcatcagaactagaggaagagttggacttgctctagtgaggacagcttttgaagtcactaaccacaaggaggaagccttcccctctgggcctgcaggaaacagattgcgtggctttgtctgtcctggctggggaacgcatgacacgctgaagggttttccagctctagggaagaaaattcatctttctgtaaagtccacttcgtcttccattatctaccagacttcttgatgggaccatttttagagccttcagtgaaagaatggaaaacactaacttggataaacaattaagagtagggagggaaataggtgaagacgcaactctgatgaaataaacaaaccgcaaccgtggaataacattctggttattatgggtcgtgattaacggctccctgcgttgatggctgaaaacttgtgctttactgcacacttccagcagaatttagctgcttttttctttcttgtttcctttttttttttttttttttttttt

SEQ ID NO: 193353 - DNA, 579 bp, Homo sapiens
  misc_feature (24)..(24): n is a, c, g, or t
aaagccagccgttaccgactgcanctgtgcctcagtgaacgatcagttaaagggagataataaaatgtgcctctgaggactgtcggaggatacagtgagagaacacgtgacgtgtgcagcacagtgctggtgagactcgtgggaatcgtactggctgtgcatgatgagtgtatgaaggaggggcctctttctgccctactcagagaaaaatctcttagatgccacatttaaaaagcaaagaataaaatctgtgtgtattaatgtggagggtgtcctgggaggagcatggcctgtgccctctggcatcgtcagattagtaggggagacaaaacagattcactcattcattcacccactcagtgttaccgagtccctgctatgtgccagtcgggaataggacagatgaagtccctgccctcatagaggtaagcatccagtgggggaaatcagacaacagaagaggagacagatagaaagaagggaatttcagcaacttgatgaatgcgctaaggaaatacttagcgtgaagtcaggacaagaggcacaggttgctggttcagaagagtgggcagtcaggac

SEQ ID NO: 193354 - DNA, 114 bp, Homo sapiens
accattactttatattatattacaaaactattgtgcctcaaacagttagcaggatggtatagttaccaagtgccattttggaggttattgtgtaggatcaatctatataatttg

SEQ ID NO: 193355 - DNA, 295 bp, Homo sapiens
ccactgagacatgatgtttctctgcctgcttagtttagttctagggtattccaggagcttcttaggctccatatagaggcacgatggctgtggcagctcccaccgaacaagatcccaggttcaagtcccttaaggaaatgtgaattatctgctggttgcacctgataaggctctaaggtttacagtgcttgaatccactgatcttgtttccaaccattgaatctaaggctctgactgaggggaagttagtgtgctgattggcttggcccagggtttgtaatctttctaatgggga

SEQ ID NO: 193356 - DNA, 296 bp, Homo sapiens
tcactcttgaaattgcaggtaccaaggatgatgtaaacctgaagctgctggtggccatctctgccacatgtggaaagagcctgcttgacaatgaatggagctctcacagaggatgcagtattaagaaatggaaaaataaatactcctgaccctgtaaattaaagcacggatcaaaccatgcctaaagtcacctcaacctctgaacgtgaaagccatcaacagggaagaattctacagagtagatctcagttacgaagagaaacacaacatccaccttcataaaatgtaaacactat

SEQ ID NO: 193357 - DNA, 411 bp, Homo sapiens
ctttttttcttttttttgagatgagtatcactcttgttgcccaggctagagtgcaatggtagtctcggctcactgcaacctccgcctcccgggttcaagaatcctcctgcctcagtttcccaggtagctgagattacagacatgcaccaccaagcccggctaatgctgcattttttttagtagagatgggtttcaccatgttggtcagggtggtcttgaacacctgacctcaggtgatccacccacctcagcctcccaaagtgctgggattacaggcatgagccaccacgcccggctacttctccataacttaataatggtgggaggtacaactcagtcatatctgatctctatgggggaaaatgtactctgattgacaaggtggttttacaaatctaacaattttcaaac

SEQ ID NO: 193358 - DNA, 518 bp, Homo sapiens
tgcctcccattctattcagttaaccctttgcttactgagatgaatgtatatctgattgcctcatttggagaggctaatcaggaactcacaacaatgcaaccatttgtctcttaactaccaatgacctggaagccccttccccttgtctcaccttcactttcacctggagttgtcccgcctttccagactgaaacaatgtacatcttacacatattgattgatgtctcatgtctctctaaaatgtatcaaaccaagctgtgtccccaccaccttaggcccatgttgtcaggacctcccgaggctgtgtcacaggcgtgagtccttaaccttggcaaaataaactttctgaattaactgagacctcatatttttggggtgcaaatagtcttaggccttgagagccctctcgtagtttccatatttttgccctcttggatgctggcaccaagcaaaccttggctatcctgcttaaagggacatttggagaggggttctggagggcgaggggcgacatggag

SEQ ID NO: 193359 - DNA, 580 bp, Homo sapiens
tgtaaattgacctttgttttaaaccaaataatccactcattccttcattcttattgacttcattcgaaggatattgtaaaaaaggtttgatcccttgattaaccagtactgatgatgaaagtttctggttttctaaatgcatgccatattcatcatttaaagaggatgatttttctgattcataggactcaggagcaacaacaaagcaagaaccagctctaaacacattctggcttttagttttgctctgatgtcgttttaatgttgtatgtacatcaaaaagtaaagaattaagttcatgttctctaagctttccagaaaaactagttagaaatggaatgtcagcatccctggaataaggtaggtctctttcaagaatgtaactcaaaaacagatcaaggaatttaatatattcatcatcatcacgttcaaattcccaaacacctattacaggaagtgtattttgtgataacttttcatgatcttctttctttgtaggattttctttctgattacacattttccttttatcagttggcttatgaattgatgttaattccatgtgatttggggcatttct

SEQ ID NO: 193360 - DNA, 133 bp, Homo sapiens
ttaaatgtgggaagaccaaaagaagttagttattacaagatatcatggaatgttgcaaaaatcatggagttttgaggagccttaaatatttttgggtacaactatcaatctgatgtttgaatacccttaataa

SEQ ID NO: 193361 - DNA, 182 bp, Homo sapiens
taatgattctcccaatgtctggactctctgttccattctacctgcctgatagagcagaatattcaccttgagaaggattctgctggctgaaccggggaacccagccctcgcttggtctcaacagcaccttccaaacaccaagggttgtatgcatttgagctctcgtgtacggccacgtttaa

SEQ ID NO: 193362 - DNA, 358 bp, Homo sapiens
agcttggagttcagtcccttcaaatccaggacctggtttgtgatacactgggaaagagtgcccactgtagtgtctttgatgtcttgtaacaagtgtttaactccaatttccttagcttcctctgctgcagtttcactggtcacatgctcaaatgttttcaaggctgaagttccatcttcatagacttctactgaaatatatgcttctgtaggcagccctaagtcctttggcttcatgtcactagtgaccaatactgagttacggcagtatcttttcatgatttcattgaaggcagtgtcattcttgtgtagtttagggcctatgtggtaccactcaactattctttccctggcattca

SEQ ID NO: 193363 - DNA, 470 bp, Homo sapiens
attacttcttagtctgaactcacagttttattttgcccagaacctttgctctttgcaaattaagcctgtttgttcatgcctgaccgagtaggtggtctggcagtaggtgggaaacttcaccttcttctttgagatcatttgtaggatgggatactatacatcacgatttcagtcttatttccagactaatgacttttgttgtgccctaccttggtagctgcctaacctttgtacttggacccttgatttctcactctaggcccctccctgtcttactctctggggccggctgtgttcctggaaggttggaccttccatggtttaggtttgaattataacagctgttgggcttcccgtcaaggttctggtttactacttataattccagaagccagaacctgtccgtcctctttggggacatacctgcctggtttctctggcccagcctgttagtaccagacaagtcctcc

SEQ ID NO: 193364 - DNA, 389 bp, Homo sapiens
tatttcatcgtgatttcttctcggactcatggactattcagaaaggtatttcttaacacctacacctatgggattctctattatcttatttctagattaattctgctgtgaccatacactttgtatgattttaatcctttgaaatttgttgacactttctttagggccaagcatatatacaattttgaaattgtgacgtacatttcaaaggtatgtggtatatatgtcaattaggctagggaggtaattgtattgttcaaaccttctatacattcttacagacctttttttctgactgcctgttccatcagttactaacagaagtaagttaaagtctcctgctgtgactcataaatttgtaaccagaacaagaggaactgtgaaatatc

SEQ ID NO: 193365 - DNA, 390 bp, Homo sapiens
tgtgtgcattgtgcctcaagcaccaagtatctgccgattcagaagaaatggaacatcttagagttttatcatgcatatcctctgaatgactggggcaaatactcataactaacgaagacctcactgtagggcctttgtgagtcatccagaaaatagtaaatccatctggaccagagttgcaccttatactcatgaagactgttcagctgcagttatgtagaagaaaaggcagggttatttgaaggtgactgtgtagatgtaacaattaagagactaacatgatttcatgtttatgtatatctttaggcaaacctaaaatacagaattatataacgaaaatgtaaaaattaggatgattactaaaatttaggctctaaaatgaaattatat

SEQ ID NO: 193366 - DNA, 643 bp, Homo sapiens
gcaggaagcatgagaaaaagataaatatttagtttaactctgataggcatcatctccaattcagttgttcttaactgaatagctctatatgctcttcattctaagagctttattaacattctttaggagaatgaataggtaaccacatacacatacatatctaaatgtgaagaggaaggtaaaggtaactctactgatatccagaatcataaaacccattattgaggtggattttcaatagctacaattacagttatgtatattaaataactgtcaatagaacaaagcaggaacaggtgcacaaatccatgtagaaacacagcatttatgaccagactattcctaaatcactcagaagtaaacatcttttctggccatctccttaatagtttccactatgtctcctaacaaagtaaattggactttagttatttaacgttaacaacagcatacaattaatgagtatagccagatcataattacaggaaagaattataaggtaaaaaattttttttacatatttcccaggaccttctctagctttcatgtcactgtgcaaaaatcaaattacttttacttctttgtttaatgaatgaaaaaagtatatttttagatgatcattatgcatgtctcccccagtaca

SEQ ID NO: 193367 - DNA, 285 bp, Homo sapiens
ttccaaggggctgggagggtggtgggtactggggagttatagtttactgggtacagagtttcagttcgggaagatgacaacgttctggaggtggatggtggtgatgggggcacagcagtgtgaatgtacttagaaccactaaaccatatacttataaatgatttaagtgacaactgttatgtatattttaccaaaataaaaacagtgtcatacaagtgtattgaattaatggaaagttgttcatgatatatcattttacatgagaaagggtgccatactcacggt

SEQ ID NO: 193368 - DNA, 448 bp, Homo sapiens
acataaactttagaaaaagttgtactacagcatgtacagtcactatgtagctcagcaatgaacagtatttatggtcctaacaatgtaaattctgaatgttaattctacaaaaattccaaattgggaatgaggggaaaagtatgtgtcttaaatatggtgacggtgacttgagtctactgctgtgataaaatgccatagaactgtaaaccaaaagcaaacaaacagacaaatagacaaaaagggcgcatgcaaatactggtgaaatccaaataatgcctgtacctgactaatagtattttatcatactcagttttctggttttgactgtatgctatggttatgtaacatattatcactaggagaagctgggtgaagaatacatgagaactctaatgttttcaactcttgtgagtcttaaactattttgaaataaaaagttatttttaaa

SEQ ID NO: 193369 - DNA, 517 bp, Homo sapiens
tatgtgttctattaacattgtcctgttaacttttaaaagcttccttgcttttggcacaaaagatgttctgggattcacctcatacttttcccaccccatacctggaatcattcatttcttcaggggctcttgttcctttaagtattagtgtagaatgaataagaggctataatctgggcgttaggggtgcttcctattactttgattctaaatttcttttgaaagacattattggctaggcacagtggctcacgccagtaatcctaacattttgggaggctaaggtgggagaatcacttgagcctgggagcttgagactagcctgggcaacataacgagaccccatctctacaaaaaataaaaaaaaatagccaggtgtggtggcgtgcacctgtggtcccagctacttaggaggctgaggtgagaggatcacttgagcccaggaggtagaggctgcagtgagctgtgttaatgccactgcactctagcctgggtaacaacaggaccctgtctcaaa

SEQ ID NO: 193370 - DNA, 650 bp, Homo sapiens
ctgctgaatgactgcaaagctgggctcttcactcccagatgacagtgtttctcctcactcacattcacccacccacacagagcagaaagcaggaaggtttccatgcccgcactgacggtaagttgtgggaggcagtcgggcaacatttctggagttcctatgaatgatgtgctatgctttttggcctgcagacgttcaggtggactcagatctgagacatattcaaaagtatgtttgcatcctggcccttggtttatgtatttcctcttccctagggcattctacaaagcatttccaaaaaggctggtccctgccccttaactggttcctcctcctggcaacagcattccagctgggctttgggaaatctccctactccttcaaaacaattgtttctcccctggcttcttttcaggtttcctatgagtctatgaggtcactccacccaatgtcttccaaggaactgattatgctcaggttagctggtgacctcagaactctgaccagtataatgaactgtgacagaaaggaatgcatcctgttgaccaatccccctgcagtatagcacagacaacaggggtactacaaagctccattgcctaggagaaacagccagcacctgtactggctgagacatagaaacttcaaaa

SEQ ID NO: 193371 - DNA, 246 bp, Homo sapiens
cagagtttcaaaactagctcccaaagtccagaatcatgactcagagattttactctgcagtgtagcacagctgggtttatccaaaccaataaataatgctacattagaatcctgagccagggactgtgatggtgttagacaatccatgatgtccacaagttaataaagaccccactttaagaacaaaatatggctgggagcggtggctcatgcctgtaatcccagcactttgggagctgaggcagg

SEQ ID NO: 193372 - DNA, 349 bp, Homo sapiens
ttgggaagtaaggcgataccactggaaacttacaagctgaatcagcagactgttttcttttgcatttcttctgataatttattgagatttcccaggaattgttgcctatataaggaagtcactgattccctcattcagaatgtgccaagagtatctagcagtaagacaaacagtgagatacatttaactatcaatgagggctttacattcatttgggcaagatttaactttgtttaaatgggttaaccaagcagtaatatttgcatccatctggccagtatgctctagttaaaggagattactttgcactaaaccaatggttctcacctgaggtcatctgagcccctca

SEQ ID NO: 193373 - DNA, 402 bp, Homo sapiens
aaacatagactcaccatgcccacatgcccaccacccttgtgcacctgcctctcctgagcagcgttggttctgctgaagagttcctgccatgaaaatgtatgaacatatgtcctcagcgccacggtcaaaagggaattcaatcaagaatctggtgatgcatttgcaaattaaaattctgtaccataatgagcagagccattcaaactaataattacataaactcccgttacgggtggcccggtaattacaacaggtacttttagcaaatttaaaaagcaacttaggtttccattatcaccatgaagaataccaagggcagctgtatccttgcactgttaggtggagacacccccttaagaatgttcctggacatagtaaaaagggtgcagaaatccctaaccc

SEQ ID NO: 193374 - DNA, 633 bp, Homo sapiens
tctagcccaggctctcttctaggcttaagggatcctcccgcctccgcctcctgagtggctgggactgaaggtacacaccgctgtctctggctaatttttaaatttttgtagagatgagtccttgttctgttgtgcaggccgatctcaaacttctgggctcaagcgaacctcccactttgacctctcaaagtgctgggattagaggcacgagctactgcacccagctgttctgtcagtttttgctttacgtgttttgaagctcagttactatatgtattcacatttaggagtgttatatcttgatgagttgaccttttgtctccttgtgaaatatacatttttatctcagtaatagttcctatcttgaagtgtactttgtctaatgttaatgtagccattccagctttcttatgattggtatttgtgtggtatacatttgtccctcttgtccttgggagattggtccagtacttcccaaggaccccaaaatttgtggatgcagaggctgaagtcttttatataaagagagcagtatttgcatataacttatagcacatcctgctgtatactttaaatcacctctagattacttagaatgcctaatacagtgcttacacataacctcatttgcgt

SEQ ID NO: 193375 - DNA, 627 bp, Homo sapiens
ccccaaaaaaaacagcctctcaaagaaataggattcctcaatactaaaaggagatattttcattttcccaaagtaagtaccacaaaatactagttcatagctacttttcttcttttaaaaatattcattcttttaaaaaaaaggagaacatggcacatcccatcgtaaccaagtcatcaaagttaacactagtctccagacagacaaacaccacgtcccacccaacaaaatgcaaggaaaacatggatattcctgctcaaaatgcttaacctcaatataagcatgaggaagcactggacaaacctgagttaagagacagtctataaaaatgcctctagtcttcaaaaaggtcaagggcatgaatgaaactcaaaacactgaaaaactgttctaaaataaagtatattaggccgggatggatggctcacacctgtaatcccagcactttgggaggccgaggtgggtggatcacctgaggtcaggagttcgacaccagcctggccaacatggcaaaaccccatctctactaaaaatacaaaaattggctgggtgtggtggcaggtgcctgtaatcccagctacttgggagactgaggcaggagaatcgcttgaaccaggaggaagaagt

SEQ ID NO: 193376 - DNA, 507 bp, Homo sapiens
  misc_feature (52)..(52): n is a, c, g, or t
  misc_feature (66)..(66): n is a, c, g, or t
  misc_feature (68)..(68): n is a, c, g, or t
  misc_feature (78)..(78): n is a, c, g, or t
  misc_feature (87)..(87): n is a, c, g, or t
  misc_feature (108)..(108): n is a, c, g, or t
  misc_feature (122)..(122): n is a, c, g, or t
  misc_feature (124)..(124): n is a, c, g, or t
  misc_feature (155)..(155): n is a, c, g, or t
ctcttcaagactctggtgcgcagtatcttctacaggggagagactaccctancttgcataagatananacaaccagtnagtaaatanacatttcccccagataattantacttggtgacggngnatgaccgtgagacagtctactttacactggncggcctggtaaaacttctgtgaggagtcaagtgatgcaggattacttgatgactgatggagaagtccggggagtggacacaggtgggaacagcctggtgggtcagaacataagtaccacaaaatactagttcatagctacttttcttcttttaaaaatattcattcttttaaaaaaaaggagaacatggcacatcccatcgtaaccaagtcatcaaagttaacactagtctccagacagacaaacaccacgtcccacccaacaaaatgcaaggaaaacatggatattcctgctcaaaatgaaaatatctccttttagtattgaggaatcctatttctttgagaggctgtttt

SEQ ID NO: 193377 - DNA, 508 bp, Homo sapiens
ctagttcagacactgtatcccacaagcaagtattcaaacaactggtaactattttttctgccttcacccccttcaccctaacctgccttccactgacagatcaggccagatctacttctctaagaaacccaatgcttgctggatgtcatctagatttcttcctttctttccttttctttctttctttctttctttctttctttctttctttctttctttctttctttctttctctttctttctttgttccttctttctttctttcttctttttctttctttccttctttcttctttctttctctctttctttcctctttctttcttctttctttcctctttctctctttattttttttgatagagttttgctcttgttgcccaggctgaagtgcaatggtgctatcttggctgcccacaacctcctcctccagcgttcaagcgattctcctgtcgccgcctcctgagtaggtgggattacaggcatgtgccaccatgcccggctaatt

SEQ ID NO: 193378 - DNA, 221 bp, Homo sapiens
aaatgtcctcatttaggcaaatccagagatataaagtgggctgccgggttaggtgaggcaggaattgagactggctaatgggtgtggggtttcttcttgaggtgatgaaaatgttcagaattagtgatgtagttgtacaatcttgtgactactaaaagccatggaattatacagtttaaaagggtgaatttaggcagggcacgacaaggagactccatctc

SEQ ID NO: 193379 - DNA, 433 bp, Homo sapiens
gacatctgcctctcctccctacctcagtgagcgttaactgatctctttccttaatagtttctcagttatctccgtttatcacttttatcacaaagtttgtgctatatcaaaatagtttttcctccccataactcttcagccaactagatttttgtttgttttttgagacggaattttgctctgttgcccaggctccagtgcaatggcgtgatctcggctcaccacaacctctgcctcccaggttcaagcgattctcctgcctcagcctcccgagtagctgggattaggcacgagccaccatgcctggctaattttttatttttagtagagatgaggtttcttccacattggtcaggctggtctcgaactcccgacctcaggtgatccgcctgcctcggcctcccaaagtgctggtattacaggcgtgagccac

SEQ ID NO: 193380 - DNA, 302 bp, Homo sapiens
caacatcattaataccaccacaccaccagtactgccatgcacactcttcccaattgcaattatacccacttaaactggaatatgtggtgcttctcagtattgattatggctccataatactgagtgaaagtaaattagaacccaatgcttggcttagaagaggtatcaaagcctaagcaggtaaggattctaggactcaaattctgctgaaattctccccttcttttcattcattgtgtgtatatttctctttgagtcttcggacatatttattatggctgttttaaagaccttgtctggaa

SEQ ID NO: 193381 - DNA, 422 bp, Homo sapiens
ctggaattagccaatatgacttcctcacttttgggcactgtctagatacgcactgtctgactagcacaaccagtgctagaggctgttgggttaagaaagggaaaggttggctcacacctgtaatctcatttctttgggaggctgaggcaggaggatcatgggaacccaggagtttgagaccagcctaggcaacatagtatgacctcatctctacaaaaaaatgtaaacattagccaggcagtgatgcatatctgtagtccctggtacttgggagtttgaggtgggaggattgcttgagcctgggaggtcaaggctgcagtgagctatgatcgcaccactgcactccaaccaggatgacagagggagactctgtctcaaaaaacaaaggaggggtggggaagtgtcaatttaggggaaatgta

SEQ ID NO: 193382 - DNA, 461 bp, Homo sapiens
agccccacctttattggctcctaggagcaccgagttgacagaataatggtgacttttaaagcgactgtccgcgaccacccaacgtgcggctaacctgagcaggaccacttgtgcgcttctcgtttctttggcttttctatctttccctcctcggcgcactcccgcggcgcgggaagctgcaggaaaacaaagttccacttccacgtgcgtagtgacttggtaaggataaaggtacagggagccaggattgttcctggaatatcaacagatccaaagaatgttaggactggggcgctgaaggatgcgctgtcgtttttcatgttcatttccgttccccctccgcctttgacccttgtccacgcagtccctgcgcgcacccccgccgagccgcgcacctcccccgcggcgttctggccggcacgcccttccgaaggagccctggtccccgtagagagaaaaaa

SEQ ID NO: 193383 - DNA, 542 bp, Homo sapiens
gtaattcagaaataacttgtatagtagtatatcataggaagttagcttgaggccagagtcagaaaagattctattgcagtgtttggtcttaatgtaggacttgaaaaatatataaaatttggatcctcaatatatacttagtattagctgtaaagaaatctgtaatggtggttcagatttcaagaagctgtagcccacttgcagtgcacacaaggcaagtcacacctcctagttcactagtgttgaagtattatagcagtgtaaagaaggcttctgcccttggaaagacaagacagacttaacatggattacaaccaaacagcgcagagatagtttcagctaggagcctagagtaaggatgctaagaacaggggaagagttttaggcaaagtgaaaatttgcctggattatgacagatgggcaaaattttggaagactggaggggcttggatatgatcagtggaattgagccttggtatgaagctggaactgcagaaactgacatgagggttgctcatgactgaggtgataacaagctttag

SEQ ID NO: 193384 - DNA, 1835 bp, Homo sapiens
  misc_feature (1498)..(1498): n is a, c, g, or t
tgagacggagtctcgctctgtcgcccaggctggagtgcagtggcgtgatcttggctcactgcaacctccgcctctcgggttcaagcgattctcctgcctcagcttcctgagtagctgggattacaggtgcgcaccaccatgcccggctaacttttgtatttttagtagagatggggtttcaccatgttggtcaggctggtctcgaactcctgacctagtgatctgccctcctcagcctcccaacgtactgggattacaggcgtgagccaccgcgcccggcctgaggctggtattaagaagtgaagtgggacccaggtggaggtaaggaagagtctggtggggagttatctcagaagtgaggccagcacaggctgagtgcagccccagggtgagaaggtgcccaccgagaggactctgcagtgaggccctaggccacgtccgaggggtgcctccgatgggggaagcccctccctgggggtcaccggagccatgctgtcccgcaagggcatcatccccgaggaatacgtgctgacacgcctggcagaggaccctgccgagcccaggtaccgtgcccgccagcggagggcccgctttgtgtccaagaaaggcaactgcaacgtggcccacaagaacatccgggagcagggccgcttcctgcaggacgtgttcaccacgctggtggacctcaagtggccacacacattgctcatcttcaccatgtccttcctgtgcagctggctgctcttcgccatggcctggtggctcatcgccttcgcccacggtgacctggcccccagcgagggcactgctgagccctgtgtcaccagcatccactccttctcgtctgccttccttttctccattgaggtccaagtgactattggctttggggggcgcatggtgactgaggagtgcccactggccatcctgatcctcatcgtgcagaacatcgtggggctcatgatcaacgccatcatgcttggctgcatcttcatgaagactgcccaagcccaccgcagggctgagaccctcatcttcagcaagcatgcggtgatcgccctgcgccacggccgcctctgcttcatgctacgtgtgggtgacctccgcaagagcatgatcatcagcgccaccatccacatgcaggtggtacgcaagaccaccagccccgagggcgaggtggtgcccctccaccaggtggacatccccatggagaacggcgtgggtggcaacagcatcttcctggtggccccgctgatcatctaccatgtcattgatgccaacagcccactctacgacctggcacccagcgacctgcaccaccaccaggacctcgagatcatcgtcatcctggaaggcgtggtggaaaccacgggcatcaccacccaggcccgcacctcctacctggccgatgagatcctgtggggccagcgctttgtgcccattgtagctgaggaggacggacgttactctgtggactactccaagtttggcaacaccntcaaagtgcccacaccactctgcacggcccgccagcttgatgaggaccacagcctactggaagctctgaccctcgcctcagcccgcgggcccctgcgcaagcgcagcgtgcccatggccaaggccaagcccaagttcagcatctctccagattccctgtcctgagccatggtctctcgggccccccacacgcgtgtgtacacacggaccatgtggtatgtagcccggccagggcctggtgtgaggctgggccagcctcagctcagcctccccctgctgctcatccagggtgttacaaggcacttgtcactatgctatttctggcctcagcaggaacc

SEQ ID NO: 193385 - DNA, 334 bp, Homo sapiens
  misc_feature (50)..(50): n is a, c, g, or t
aatcgagctcggaccagtcgtttctacattaggtttttaactgtttaagngcattcttttatactgagacccagaagaagcatcctccccagcttcagtggaaagccttagagctgatggaaaaccagtttcgagttggaatgtggaggctatttctggcctttgtgacatcctgttcaactttcagaggagcctgggaagaaaggggtgactcagactactaagcttatttttagggaaacaacgctaagaattcagtcagagccactcggattccctattgcctgccatacagaatgtgctgttggtggagagattgatgggcagaaatcct

SEQ ID NO: 193386 - DNA, 466 bp, Homo sapiens
ctggagccaagaagccactgactcaagaggatttcaagcgagagctgcttgcgggtaaacaaatggcggtacatcatctgtacaacggaatatgcgaccagaaccaggagcgaggttctgattcacgctagagcgtggatgaatgtcaaaagcaggcggagtgaaaccagccagacacaaagcgggctcgtattgttacattctatttataggaactacccagaataggtaaatctatagcggcagaaagaagattggtgattgccaggggctgggggagagggtagtgaggagtgactgctttgtgggtacggggttcccttttggggtgatgaaatgttttggaactaggtagaggtgtgcaacactgtgaacctattaaatgcctctgcattgtatataattgtaaaaatggtgagtttgatgttatctgaacttcacctcaattaaaaaggaaaaaaagtat

SEQ ID NO: 193387 - DNA, 342 bp, Homo sapiens
agcatggtggaagacagtgagtgctacggaaaagagaagtgggatcagggtgccaaggggagggggactcgtcagggtggtcaggggaaggggcgtttgttagcttcgagtgtcagagttgaaaataggctcagagggtgagggtgacactgaggaagggatgtagccctaggacctagtttcaaatcctccctccttctggctcctaacttctatttaacttctttgttcattttgaacacctggcctgcaggaacaacacttatcaattagtgagggcagtgatggttcgaagttaacactgggactatggagtccaatctcaatttgaataccactgtg

SEQ ID NO: 193388 - DNA, 462 bp, Homo sapiens
tctagagatcccttcatatggcaaggccaagagtttgagacctgcctgagcaatacagtgagaccccatctccacaaaaaaacaaaagccacaaaaattagccaggcatgatggcacctgcctgtggtcccagctactcaggaggctgaggcaggaggatcattttgattccaggagttcaaggctgcagtgagctatgatcacgccactgcactccagccaggccaacaagagtgaaactccatctctaaaaaatgaaaaaaaaaaaaagaaatagtatatatcagtatatcagcggccggccacagaagacctagaccagtgatccttacggtggacttccctatacttggaagggaactgtgaaatagtcccatcttaagtgtatcccaaagtttcccatttaaacttatttatagctacattttcggtggtaactgggcctggcaatattgaagggta

SEQ ID NO: 193389 - DNA, 237 bp, Homo sapiens
gttgaatgctaagaaatccaaagaaacaggagatgtcttgttccacgagacttgtacaacaggcccctacttaactgtgataattgatggatgagtgctaacacagttctaatggagtcagaggcaagataggccagttttttgactgaggtgtttggtggaggcatcatgggggtgactacagttgaagagatcttaaagacttttccggttttgcctagactgggtagtcacaga

SEQ ID NO: 193390 - DNA, 294 bp, Homo sapiens
atgaaggattacctggacaagaaacttagacataacttaaaatgtttttatttgcaagcctgatttaaaatagtcattgaattgacattataatttaaaagaaaacaatgggatcagttaattggttatttttttccagaaatgttacaaagtttaactcatcgtttacctgaaacatggtaattaaatgattaaaattggacaattgggatcataacaagttgcgtgatttttaaaaccatatgccttggttagttttaagttattttgtagcaaatagtttttaaaatctgt

SEQ ID NO: 193391 - DNA, 623 bp, Homo sapiens
cgtgaaaccctcccggcctttcatgggaagttctcaggtcacacctcaaggcggggagcaggagctaagcctgtcctcagcatgcagcggggcagtgctggccgcccgcagcatcctccctccgccctcggaccccagtcctcctctgtaattcttctgggctctccaactcgggactttatctgtcggttcaaatataacattcccatcttggaaacccatcgtggccctggcatcttgcagccactgggcaccaggcagagaggggccacttgtacgtacgtttcccacctgcccgggagcctccttagtgctgggtagcttcagaaaaagtgtttccttcctagtcgaggttaaaaagttgctctcggccctaaagggtggactggaggtatgaatgagggagaggataagtggtgaaaaggtacatacatcagcaaagtaaatggtaaaactacttttgatcgctggagacaatgaacaccaatgacttaattaaggactttaaaagcacatgaaattaaatgattagagtgaggtcatgatataaaataggagtctggagtttattccaagaaaaatgttggaaaccccttgactagaaacatggtctttctgaaaga

SEQ ID NO: 193392 - DNA, 490 bp, Homo sapiens
tgggtagattgactgaggtgaggagtttgaaaccagcctggccaacatggtgaaaccccgtctctactaaaaatgcaaaaactatccaggcgtggtggtgcgtgcctgtaatcccagtattcggcaggctgaggcaggagaattgcttggaaccggggggtagaggttgcagtgagccaagagtgcaccactgaactccagccttggcgatagggcaagaccctgtctcaaaaaccaaaaacaaataaaaataaaaataaagaacattatcatcatccaacaagaaactctggacctataagccatcacctcccaatcctcatatcccctcccccctgggccctggtaaccaccaatctccgttctgtttctatggatttttctattttgggcatttcatggaaatggaatctacactatgtggcctcttgtgtctggtttcttcctgagcatcacgttgtcaaggttcaaccacattgtagcatgtgtc

SEQ ID NO: 193393 - DNA, 662 bp, Homo sapiens
tatgcaataataccacggagatttattgaaggttatttcagcactaatgctttctattccaacttaaggagaaaacattctcaactcagaaacactctgcctgaaacatacacaggttgtccaactggatgctgttgatgggttctggcttggggtgactggaaatacatcttaacaaaaagccccatgcagccctcggagatgggtagacagttaacttcaaaggaacaaatagcaaccttgatcttttctagcaactagaattctgtttccctctctagcatgaagtatgtgaaattctaaacttcttgaaaccgatcccatattttgagtaatagagaaaacgctaatctgtgatccaactgaaatctacagtggtgagggaaacaattatgcagaactgagccaaaaaaaacccacttgaaggatttctgcagcgatgaaaacattcaaaggtgtattgatcatggaggaaggctgcattcaagggaaccattatttggcttgtaacagcctagaggagctgaatacttcaggcaggaatgctgctgagagacgaggaaaatgcaaactagttatgtggtggctatttgcttctgagttttaagataatcaatgctggagcagaagagagagggaaaaaaaagttaagctgttttatc

SEQ ID NO: 193394 - DNA, 603 bp, Homo sapiens
tatgagctcgacaactgcacacacgaacacacacacatatcattgaatccttgaagttagggaggtaagatgttattattctcatgtcaaaaagctagcaagtgacagagacaggaaaggaacctgcatctctctcacaaggaaagcacactactagacaagaaatggcgagaaaagaatgtagtctcaatgcatctaaatctcagtggtaccttctgggaatgagaatgcatagaaaccaacagaccaaacaaaataccaaaatctacgctactgccattctttgctgctttgaagcaagtctctttttgccagagttctcttacttcctaggcagtcaaattaagtagctacaagtcagaacatgacagatttactttaaagctatcaacaattctatactttggagtacttctagtcactattatcacagatgcttcctttccaaggatggcagaaatctctgtgatagaaagaatataaataacctgtattttacttcagattgccttggtccttttcaaaataggagaaggcatacaacaagttatattagcgcagctctttccactgcctctataaatgcataaagtagcaattttc

SEQ ID NO: 193395 - DNA, 387 bp, Homo sapiens
atttaaacccatcatggtccacatcttcctaagacataacaatgcctaacattgactgagtatatcagacaccgtgtgaggtggtctacacagtcacttattcaacaaatatttgctaagtgcctcctatgtaccaagcactctgctagatgctggggatgaaagacaggataaagcccgtgtactccgagagcttatgttttactacaggagacagatggtaaacatgtaaacatggcgacctctagggaggtgatatctgagttgatacctgaatgataagaagagagagagccctgatcagatccataggatgagtgatacaggcagaggaaaaacagcaagcctataaggaagagattactatcatcttcattaagagattag

SEQ ID NO: 193396 - DNA, 339 bp, Homo sapiens
ttcatgaggtggagtacggaatgatggctctaagcttctttcaatttctagatctcctgttatctgatctaatgtctgacatctctattacaccaagttgataacatttcgctcatttactggcttataaacagttgcttacagatagccaaggaatttcttcacaagtgtgggtttctattgaaatttatctaaaatcacattgaaaggagtggcagcacatatctgattcgtgtgtagccagttgtgtggcgtgtattatggcatccaccttcttccttgccttctttcctgcagattgtggccagtatttcctcaggctgatccctggatgccgta

SEQ ID NO: 193397 - DNA, 386 bp, Homo sapiens
actgactgatgaggttgactggtgtgggaaggtaacaagggagagaccccctccccatggaggacatgctgttgactcaggtcagcagattctctgggatgaaaaccttcaaaccctaccttcccgcaaatggtaacagtgagggctgacaagctttctcaggagtgagaaaatccttcttccaaatgaaatcttaaactgaaccttaaggctgaaggatccagagtcctggtggcctgacctttcccgtccccatgcagaaggactcccttacaattctagggatctgagaaaaaaaaaaaaaatctgaaaagcccaggccaagtccaattgctggaggctgacgttcaaaggattttagggcaatatggctacgtggtcagcac

SEQ ID NO: 193398 - DNA, 270 bp, Homo sapiens
tgcaggaaagaaactgtctttgatacatagaaattaaaacatttaatgattttcctaaagtgcttttgtattctgtagagctttaaatttagattttttattttttgtactcatttcacagtaacaattaagtagacttgacagctacctagaattcataatctttttctcaaaaacagtggcaaattgtgaaggtttgattaaaattcttaagtcattaaagctaaccttttaaaatctgaatgtaattaattgaatgatttgaagatt

SEQ ID NO: 193399 - DNA, 663 bp, Homo sapiens
gctcttcattcttttaagtacctgaaaaaaatgtcttccaaaaatggttttcctgaagcaaatatgacagtatttcaacgacagcacccacctcaccatctctcagaattaagtgactaagaactgttagggatcaacaatagtacctacctcatatcattttgtaatgattatatgaattaattcatttaaatcactcagagtagtgtgctagaaataagtgttagtttttattattactattattatggaaccattcctcataataaagggtgaaaagcctcttagagtcacatactctgtttatgtagaagtgaggcgtgttcaggtaaaatttagttaattcacgcatcttgcctattaataatttcacaaaggattaacttcctcctaactttcgttggaccaattaacaagcccttaatttcatcagtgataacttattttcaacagatattataactaatgagcacagccacatcataattagagatgatagtagcacaaggcttctagaagccacctctgtctgctgtaattctgactgaggtgttggggcataaattcctgataaaggcactgacactcttggggtacagacagcgttaagaaacacttacatcgcactgtctgtgctgaatttttttagaatacattacagtt

SEQ ID NO: 193400 - DNA, 268 bp, Homo sapiens
tgatgttgcagtttttcgtaaagactggatctctgtgttacccaggctggtctcctgggctcaagcagtcctcctgccttgacctcccaaagtgctgggattacaggcatgagccaccatgtcctgaccccagtttgttttaaagccaagcgatgcaccaagatgtttgtgtgcacatctgacagtggtaatctttgggtcagggaattatagataaattttctttaaattttttctgagctttctaaaatcagctgaaaataaaacc

SEQ ID NO: 193401 - DNA, 481 bp, Homo sapiens
tacgccggctcttacttggaaacaacctccgtgtcatcactgtactctgctgaccctcctagtcagcagagtatttgagataagtgcttctgcacgctaaggagtacaagatttgaaaagccaaatgtttctttatgacttatccttccatgtgtcttttgctgttacaatatttagagacaggaatcttctgcaggtttttgacttgcatgtctgtacataggtgaggatgactcaaaggctcagctcatcttggactgcaggctgcattgcctatgggtggctcagagcacgaattccatggaaaaaggcaaaggcagtatggtggttttctgttctaaccactgaggttatgtagtgtcactttcttcacattccactggactcctgacaagtctgtcattaaggacagttccagattcgagtggaagggaattagatcccagtcatcttcaaaacctccacacagccttccacactc

SEQ ID NO: 193402 - DNA, 450 bp, Homo sapiens
cagtctgaataaactctctggtttaactctcttaaactctctgggtttaacagctcaaagtttggtgttttaaaaggaaatatttatcttttatcagaaatggagccaggtattgaatttaaagagccacacaatctgaaattctttatgtggatatagatggaaagaaagaaatagttcttgtttttactgaacagtaaactaagaataaatagaactaagaatagttctggtttattactgtttttgcagttagattttttcaccaataataattcaatagcagtttctctcataaatatgtgctttttaaaaaaaagtttcctacattttaaacaagattttactcttaaaactaatttctgattttatagtgaaaattttcagatctctccctttaatcaacttttaaagaactcagtttttataaatgaaggctgcttttgtcaa

SEQ ID NO: 193403 - DNA, 129 bp, Homo sapiens
cttatgactttctttttaaataggagaaagcttgctactctgtgcttccaaagattagcctgggaaaagctacatataaaaccaatgtaacttgtacattatactaaattcattcctctgtttgcccag

SEQ ID NO: 193404 - DNA, 174 bp, Homo sapiens
cgcggttatataaactccaacccagtgcatgaagaaaatatttcttatgagttctcattatgaaaacaccactaccatccatactgtaaacagaatataaattacaaggccactcctaagaaagataaatacagaacagtcatctggcattacatcaaattatgatagagcttt

SEQ ID NO: 193405 - DNA, 844 bp, Homo sapiens
atggatacaataggacactcaaattgttggtataagtcatgtaagaggttaatacatgagagatcccaagtgtagtgaaagaagaaatgcttccagaattctagaaaacacttaaagcagttcaataggagttactccgtttattataccatatttatatataaatgttggtctaatcctttagagtttataattcccaaatcaattacaggtagagcatattgtttgaggctaaggcctcagattaactctaaaaagaaattcaattacataaattcatagacttgtttattcaatgactgtatattaactactatgaattgggtactctactgggaactagagctacatcaggagacaaaaggacatgatcttgacctcatggagcttagaaacgagtaaagaagccagatatttggtaaaaatgaatagcatatgtaatgggctaaatagtggtccctaaaatatgttcatatcctaatccccagaaggtgtgactattaccttacatggcaaaagatatgattaagttaaagactcttgagaggaggcacttatcctgacttatctgggttgacctgaaattcaatcacatccattattataagagaggggcagaggaagattacacagacaagcataggagaaggtgacatgaaaacggaggcagcaattggagtgacacagccattagccacaggacacaaaggaatgcctgcaaccaccagcaactggaaggagtaaagaacggactctcccacaaaatctccagagggactgtggccttgccaactcattgattacagaactgcgagagaataaattcttgttttaagccactgag

SEQ ID NO: 193406 - DNA, 508 bp, Homo sapiens
tcaaatttactttgcctataaaggaacaagtccctctggcctttctaagccactaatgtaaggtaaacctctcttgccctaaatagttcacaagtagcttctagttgatgctaataggtttaatctgcttataacaaatcacttataaatgtattatcaacaaacctaagtatatttaaatgtactatcaacaaacctaacactaaattatattttagtgttaataacaaataccatggtctgtaaattaactactgtaattaactggatttagaaaaaaaaatttactgagtttcattcttctaagttccaatagtttcaagtccagtaaaaggaaaaatagtctttatgttaaatggacactaaatttggagatatatatataccatctaaggaagtaaatcataccatatacatacatatatatctgcctataaagtagaaatcaaaaccaaattaacatttgaggaaagtggtgcttctgcaagatgtttgaatactatggtca

SEQ ID NO: 193407 - DNA, 659 bp, Homo sapiens
ctctgaatttggctagaactcacaggtagatttgtttgcttatttctttttaaccacaggtaacatgaccaccttgaaacttgttctgcctcatcccaacaccactccaagccatgaatccccatctttcaatgtttacctcactaccagccaagaatgctaagcagggtgttctggggaacctttcatcttggtctactttaaactgtttctctgatgaacaccagactgaaatggctctggttctgatggggggtgctaaatccccagcctttgtgcagctaccagctggggatctgaggggtctcctaccatgatgcctagacactggcagcctggctagaagagctctcattctctatcactttcttggtgactagggccagtttgtatggcagcccagtgaggctactcgatttgtattcagtgcacaaaccctgaaaaaaaaccctgccagccagcaactctgaaaggatgctttgtgtgagtgagcagtgtctgagatggacagggactctcctccctcccctgaaaacagcctctctggcccagcaacttattggtgctttggatctggcacagagctcctggggatccctccccaagaggagaccatcttgggatcccagataacactgagcaacttacgccctgtcctt

SEQ ID NO: 193408 - DNA, 163 bp, Homo sapiens
tcaacctagtagggcagtgaaggaatgagacctgtgagcgggacataagattccaggagaaaaatctcatggaaacacagactggataatcttgaggatatgctgatggtgcactattgcttgtcaaccagaaaaaaaaaaaaaagacaattagaaactccag

SEQ ID NO: 193409 - DNA, 222 bp, Homo sapiens
tctaatattcaattttgtgaagctgccacaattcatccattctatcgctgattggcatttgggtggttttcagtttggcactagtttttagtttttggctattatgaataatgctactatgaacaactttgcttttttaagactatggttcaaattccttaggttatctactaaatactaaggggaggccagccatggtggttcacacatgtcatctcagca

SEQ ID NO: 193410 - DNA, 238 bp, Homo sapiens
cctctcctccactttctttaagaatcagggggtacagaataacctacaaacaacctcttcaaagtacccttggaaattgaagttcaatcttaagttttttgctgtctttaatttactagaattgcctaatttttagttgatttctctacagagcttagcttgtgtagttatttctcttttactgttgctttggtgtgtcttgaagtttgattgattattttgggtcattgagttctta

SEQ ID NO: 193411 - DNA, 401 bp, Homo sapiens
gagaacaggatcacaggctaatggtgagtacttctttggaccttactagatataatgtgttgagaagctggaaaaacagaatcgagtaaggtttctcacagacaagctgtttgcgcctgcgaactttggtgagggaagggaatgaatgacagattcactattgtgctgcatttccaatctcaagtggctggggagaagcaaagtctaaaaaaaacatttatgtctggactcttacctggtgttttatgtcaaaactttcattcaggaaaatagatttttctcaaggccttgagagcccaccttttgcatcagcatgccctgtatgtgggacatggagtcaaaggatattactttggagctttaagatttaatgactgccctagatttggcaccatgcttgt

SEQ ID NO: 193412 - DNA, 615 bp, Homo sapiens
cagtgagccagggcaggagaggaggaaggtggtgcacaccaagtggtggctcaaaagatgagcaattggcagtgaacaatggtattgccaattgtgcttagtctcagtaagcacggatagctacagcaccaataacttcatgtctgtgtctagtatacacctgggttgttggaatttcattagcctcagtcttgagggattatgttcaaggctaccaagactaagtgtctgatttcaacctgttttcccaaatgtacaaaggactcctgcttttgttacatttatgatcctaatttattattttaaggtctttcaaattggagctgtctcttctgtccccctttattccctatttgcagacaagatcatatttcagttctttggccacagtgaaagagaaactgagagacaccaagaatctgaggcaggttaaaggatttcactcgttctctaatcctgattaattacagtgtcaggtttcacctgtagtgcttcagccttctcaaacagccttaggttccagagcagatagaaatgagggggccactcacatgtatatatatgcaacaaacctgcacgttgtgaacatgtaccctagaacttaaagtttaatta

SEQ ID NO: 193413 - DNA, 205 bp, Homo sapiens
ttttcatattactcccgtatttcctgacatatctgcatttttctacttactgtgtcccgatgcagctgctcctgtttttcacatccaaggtttctcctccatggcactactgacgttttgggctgacgaattctttggggacaggatggggcatgtcctgtgcattttaggatgttgagtagcagccctggcctgcatccactag

SEQ ID NO: 193414 - DNA, 366 bp, Homo sapiens
ctcaagctgacaactagcaagctgaagccttctttaacttgcagggaactcaatcctctatgcttcctctcctcctcccaccgtgacaacaaggcatatttcactaactagatcacgaagaatccaatgatcaaaagattttagttcaagttccagctctgtcccttgaataggagtgcaacctgggccacggtttcttgaaatataaaatggaagtaacaatgctcacagcatcaattaagcctatgatgcgctcatgagggagagcagtgttttatgagcagtacaggcttgcacggatgaagtatgattatgatcattactgcttgcagtcagagtggcagctctgagcctgcttcccctgac

SEQ ID NO: 193415 - DNA, 482 bp, Homo sapiens
tttgctaatttcatatgtggtttctggttttcccttttcttcccctgacctttgggataacttcaagtgacttcagaagatagtgctctgttgcagtttctttcaatgcacatacccacttcagccaccatccatccatcagctatccatccatccatcatctagtcacccaccttcctcctaaaatagtttgtgtaaaattcccacagatgataccagaacaaccttgtttgcccctttattgaggaagggataataagaacacattttatatttcactaattcttggtagctttccttggctctttttctctgctaattatcttttctattctattaatatagagtggtatgctaaagtggttgcacgtggttgatacagctttatatagatcaggctttttaaaagaaatatcaactatcccaaagactcctcaatctggcacccattcaggaacaagattatgaagaagttagcatgc

SEQ ID NO: 193416 - DNA, 518 bp, Homo sapiens
ccttccaagatgccctccactcgagttgtgtttgtgttttctgtctgggtgtcccgcacacatgtggctctgaagggaaggacccattccttgaaatcagttcaccccacagcctctgtgatgccttccctcatcttccaacttctgcatgcccgtagctctctagttacatcctgacactggaattaggtcatctgccttgactaatcccagtgtccaggatgtaactagagagctacgggcatgcagaagttggaagatgagggatggcctcgatagagaaaggcatcagctaaggaagttgttcaggtgggcagtgaggttgtcgtgctttggaaagatgttcaggctgcactaggaagccccctggcttggggagagactccaggagaccccagcggggagcatttgacagtaaattcgagtgatgcgagggggacctgaactgtggcctctgtcatgggaacccagaggaggtcgatggcgtttgtggttgatgtgggaaggagagagagaga

SEQ ID NO: 193417 - DNA, 338 bp, Homo sapiens
gatggtggaggagagggagcagtcagaacagttgtgcccaaggaacagggacagcagagttgctgacactggcatatggaagaagtgaagaccaccaaactgctgtgagatactccctgggcttggtttttttaatacatgtgctgtattgagatgaccgcaggccactgaagtggcgattgaaagacacatataggacacagtggtgtgaccaagccaaatggaaaccagggctaggatggaccacacttagagccatctggcaaatggcctcagtgagggttggtggtcattcacggtactcaggtgtggtcaaggaagatggtggccaagacaat

SEQ ID NO: 193418 - DNA, 747 bp, Homo sapiens
tgcattccagcctgggcaactgagcaagactccatctcaaaaacaaaaaaaagaatacctaaaaacattttttatatcagaatttttattctttctagtggtattcataaaagcatattgcatatgatgctttttaaaatatcatgtgccctcaccccccacccgccatgcacaacttgcagaatggaaatacttcgacatggtattaacaggtttggtgtttttattttggagagagatgaaaaaggcgtctgttagtaccttaataccgcaagtatacgtttagcaatgacagccaataccaatggactagattggatgatattaatgaataactattagttttcttcagtgtgataaggtattatggttctgtaagagaatgttctgatatctgtgagttgcatgccaaagtatttataaatgaaatatcgtatctgtatatcacttttatattgttcagctaaaacaagaaaaacatgtgtgcgtatgtgtgttatacacacttgaaaatgaagcaagtgtcagagtgttaaaaaactgttgaatctagatgaacagtgtatgggtgttgtactatctttttttgtaggtttgaaagttctttaaataaaaacttaggagaaaaaataagctataaacaactattcttccctgcaggtctcattttcttgctaatttggttaatttgttataacatcaaactagttaataatgttaaatatacctttaatattggattgagaa

SEQ ID NO: 193419 - DNA, 418 bp, Homo sapiens
caccaagcagcacctttgctgagtgtcattctttctggctctggtcagttgtgtctagctttatatcttgacattttccctccactctacatgccatggagatgtggtgttcctctgcattgctccatgtagaaagtacagtctttgctaagattcaggctcccaacttttattaatcacctgggggattctacacacagaatcttatttagttcatctaagaatttagatgtggatactaaaaagttcagtccttaatctggagccaggaattttgagtagggtaaatttacttgttccgattgatacctactcattggcccactggaaatccaatcctggaccgtttctgcaatgtcgtggctttcagaatcaagttcagaccccaagtatagtgcgtgaagccctttcgctcttg

SEQ ID NO: 193420 - DNA, 225 bp, Homo sapiens
agcataaaatctgtctgcttcccttcccttctctaaccttttctgatttcaaaacaccctcatatcttttttggaaggataaggtttatgtggttttttttaagtattcagaattgcctgctaaccctagacaaagggagcacatcaatggtgtttctgaaacaggctattatctccccgctggagcctcctactccatcctcccacccctctcctctcggcaca

SEQ ID NO: 193421 - DNA, 546 bp, Homo sapiens
ggcagagaagacataatcagaggtggaagggaaatggtggtgtagggaaactgagggagaaggtccatttccaaaatgtggagtaagggtaggcagaggagattggccaggtcagtggtgctgaaagctgcagaaagggacatgggcgctgactctccatttacaaggtaattggtactctttgtgataagagtttcagtagattaataggaatggaaattccctgtaacatgtgcaggaatctatctggacccatttgcttctccccagtgagacttgggggaacagggactgatgcaaatatgctaatgctcaaaaggtttgctatgctacagttgtaacgtcctttgtttctgaccctggagtctcgtgtcttaccagtattcaagaaactgtgacgggctaacttgtagggtaaaatctcaggtcctttatagttattattaaaactaccatgcttttctagaaacttgccattcctccattaagaagtggagtctgattcccctccttttaaatctgggcaggcttgtgactcatttataa

SEQ ID NO: 193422 - DNA, 764 bp, Homo sapiens
gatgatggtatttggacttatttagtcataatatgagtggttaaaataaatgaatactaagttggtggtggtgtagagtcaactaggaaagtgacctcactgttactagtagtagcaacagaagcagcagtatcaatgatcagcgttcattgcatacttaatatattcctgacacagtgtcaagtgtctcatttaatcctcctgccagccttatctgttaatcccttttagtatcccattttacagatgagggaactgaggcttagaataagtagcttttctaaggtcatacaactaataagtagtggggctgggatttcagtcatggtgatctgagtctattgctcatgtgcttgaccactgtattgcatttcttcattgtggtatagggcttaagagcacaggctggtgaaggtcaagaagtagtaacctcactaaatcttacttttttaatctgtaaaaagtaggtgggaataggccgggcatgatggctcacacctataatcccagcactttgggaggctgaggcgggcggatcatctgaggtcagttcaagaccagcctgacaaacatggtgaaaccccatctctactaaaaatacaaaaattagccgggcatggtggtaggtacctgtaatcccagctattgaggaggccgagacaggagaatcacttgaatctgggaagcagaggttgcagtgagccgagatcgtgccactgcactccagcctgggtgacagggtgacagagcaagactccgtctca

SEQ ID NO: 193423 - DNA, 199 bp, Homo sapiens
gttagattttaatagggtaagtggactgtcgtcctcctcgtcattaacttacaaacagccaccacctccagttgtcactgtagtcaaaaacctgggagtcatgtgagtggaccccacctctcccaggaaccagccaggcctgtgggtgcagacttcctgttctctggcctttgttctgagtctgcattctcccccgctt

SEQ ID NO: 193424 - DNA, 515 bp, Homo sapiens
cttcagagtattctaactgctgcagagagatgaggtctcaatctgggagagaggcacccccaaatatctcagtctgcttggccagaagtggaacatgaacagctgaagataaaggcaggaggggtaaggccactgccacagttctgtgtacgatgatatcaggactcagaactgagcaagcccccacccccttggccacctcccatacaaaactgactcaaactacaggagaaaggtttttttaaaagcgtgggaaacctggagaggaaatggggtatgcgtcaaaacaattgggtggtaaaactgaagccaggggaagactagggcgaactgtcttgttcgccaagataatggaaataatcatccctctcacccttcaccccatttctgcttggctaatccctccctcctcatccttcaggtttcagtttaggcgtcacttcctccaggatgtctcctctgaccctcacagtgaggttaggtctgtcacgcgctctccggcaccctgcatgcct

SEQ ID NO: 193425 - DNA, 185 bp, Homo sapiens
caatgtgccttcagttttgtgccatgatcttgagtgatagagattccaagaagcaaaaatttaattttcagaacggagagatatactcaggttacctcagtctaagcttaagactaatacaagccccatgtccttctctgccacactctggcaacgaggagtgggaaggtgattcagcacacagt

SEQ ID NO: 193426 - DNA, 561 bp, Homo sapiens
tatgatggcaccactgcactctagcctgggcaagaaagtaaaaccctgtctcaaaaaaagaaaaagaaaagaaaagaaaaggggaaacaccagggcttgtttaatcatgaaaacaaggccacgtgcaactggcaaggccggcagagtaacagcggaaaattcccatgacattgatcatcactggatgaccctgaggaaagcagaggcatgaggttggaagttcacacggacacggctgaggaatcagaccagagggaggaagcgcagtcagcagacagagaggcctcaagagcgatcttcccaggataaaggaaaacataataaaacaggaggatgaggaagtgaataagggttgtgtgttgtttttaatttgagcacctttaaaaatccgagagaatgagacccttgagagggaaaagttgcctgtaagaaaacaatgtagtcaacggcatcagactctgagatgggcgtgcagggcccaggggaggcccagctgtcccatactggcatctgccctaacagactgagtcagcacagcaaggtcacgccttgaacttgaac

SEQ ID NO: 193427 - DNA, 621 bp, Homo sapiens
agtgttcagaggatccccaaagatctttgagcatcaccgttaccaattggtgtctgcatctcactcatattgtccgcctgtcagctcattcaccagcctgtgactgagtcctgctgagcgctcggcactgctgagtccctggagagtcaacatgaagctccaggtggagggtacagattagaagcccagggtggggttagacgcatccttgctctgcctcaccgggtgtgcccccttgggcgaatcgcttaacctatatcctccgctgatgtgtacagaccactgccatgtgcccggcactgggggtggcagtggacatggcagacaagccctctgccctcgtggaacttagattctaggggacagtccttttggtcctcctttgtaaaatggcaacagtaatagcgctctcaccaaataacgtgaagattaaatgaggaaatgggtaaagggcttagcaatgcttgatacatggtaaaatgctcaagtatgcattctcttcattccactttaatgtaagctttattaggcaaggaatggtatggttggcgtctgtgttcccagtgcctgtgagcacagtgcctgacatatatggtaggtgatgctcaaagatcttggggg

SEQ ID NO: 193428 - DNA, 415 bp, Homo sapiens
tactgagtgtgtcggtggggggggtggtgtggaggggagggtttgggtgctccatttattgaatcctcccataatatatttccaactagtttggactaaactaaactcacacttagggccttgtttgcagaaagattcaccatctttttaggacacttaggtttatttacaaaataattctttgaaggcccgaacatttctagaatctgattgatgatgagcaggagagagaaagtgcatactacaaagcggcagtgttttaaaaattcaacatcagcctaattaccaggaatttgcagtttagttactctgtgtacatgtaactatttataaattttgacatcaacagcttctattttaactgatgagatgtccaatttggacacaattataaatgctgtgaggctgggtgcag

SEQ ID NO: 193429 - DNA, 323 bp, Homo sapiens
ccttgccttttatttattaagcacctactatgggccatgcactggtctatatattagggttacggcagtgaataagacaaaaaataaactcctgctcttctcctggaggtgacattccaggtggaggtgtgggagttgaaatacttcaagatacaccacaatgcgtagtgtgttaggtggtggcaagggctatggaagtgaagcaaagtcagaggatggagagatggggagcaagctctgcagatatttggggcagagcatcccaatggcaggggagacagcagtgcaaaggccctgaggtatgcgtgtggaatggcaagaag

SEQ ID NO: 193430 - DNA, 377 bp, Homo sapiens
ttcaaaacctcagtatgaatatagagctttgaaacgtatttattttaatgtaaattgcttagatgcagtataaaggagaatggctctttccagtgctgagagagcagttgtgaaggccaagattaattagaccttcatcatcttagaagatgaaaaagttgttttgggagataggatagctctgacctgtaagatgaaatcattcatgacgtcagtgccccccaaatagccatttgtaactgagtaagtgcaaatgacctatgagttcttaggaaagaaaaacctttcacctaagttgcgtcaacacaatgacaaaataactaattaaaaggtgagaaaaccagtaaattatctacatgatacctgacagccatttt

SEQ ID NO: 193431 - DNA, 237 bp, Homo sapiens
gctgagctctagatcaccgaggcctccagagacaagaacttgaagtagtaatggacagggctggcctgccgattagggagaaggatcaaatgtcagaaaataaaagcattttcaagtaggtggtgggaatggaaaggaaaatcccaaatatctgctccaaggtgcagacagagctcagtcagccagaaggaacagaccgagccgagctggtgagttcgaggtatggactctgtcatt

SEQ ID NO: 193432 - DNA, 588 bp, Homo sapiens
ctaagagcaccatcaagtgggcagttagacatctgagtccgaagataccatttccatgtatgttgattataattgaaatctatgggcatggataagaaagcctaggaggagaataagaagaggaccaaggggcatatgttgagaaactcctttagaagccaaatagaagagctgagtgaccctggagaggtcagaaaggtatcaagaaatcgggaagaatcacagaaggcagggagaggtctttctagaaggaagactcagtgagtagagtcattgttttttggagataatgaagacgagccctaaacatcttccatgaagcttgtaagacagaggtgtcaataaactatagctcaggctcagttgcttgcttttgtaaaagtaaaagcttgcttttttaaaacttcttgaaacacagccatgttcattcatttatatattatgtatggctactttcactctacagtggcagagaagagtagttgagacagagagcaaatggctttgctgtttgctttctggccgtttatggaaaatgtttgctgacccctggtgcagatgtataattcaagagtgttgtaggtttga

SEQ ID NO: 193433 - DNA, 184 bp, Homo sapiens
tacctgagagctctgggacccacagtagctgatgggtccggccatgtttcacagcagataaagcaggactccagaggagcccacctctcccttaagaggggaccagccagtctactctatgccgcctcagctcccactggctctccagctagcatctcctttttttactaatgccattcagcct

SEQ ID NO: 193434 - DNA, 337 bp, Homo sapiens
cttgatctcagatggtcagatgttgaaccaagtggattaaagctgatttcttaaaccggacaaggctgctgccattgtgcattccctggtacttataaaatattatggtttgaaattttattcttatttctgtaatcatcttattcaccttaaatacagaaatacagacatctggctgggcgcagtggctcacacctgaaatcccagcactttgggtggccgaggcaggtggatcacttgaggtcaggagttcaagaccagcctgaccaacagagcaaaaccccatctctactaaaaaaatacaaaaaaaaaaaaaaaaaaaaaagctgggtcatgc

SEQ ID NO: 193435 - DNA, 309 bp, Homo sapiens
cagtaagagcaggccaagaacagctcacaagtatggtataaagctcaaagagcaaagttcagttcatgcccttaccacttataagggatctttgcctttcagcaaatcacttatccttctaaaggttttcctgccctataatggaaataatgctatctactatacttgcttgtgatgaatattaaatgaaaatcatatgggaagtacatagcacagtgcctgagacatagcgggccttcagtaaagatcattacctctttcccagtctgcttttcttgtttgctttccctttcccaggcctcattccta

SEQ ID NO: 193436 - DNA, 299 bp, Homo sapiens
aaacctgaatcctaccttcaaaggagctaaaagtctagtaatggagatgagatgtgcccacagtgcaaaactagaaaaacaacgccataaaacaagacatggataaagtactatggctgctcagtaagagattacttctgacacaaaggaccagagaagcctcacagagatggtcccgactccttgaataatgagagtgggtaacacttgcacacaaatgataagaaagagcaatccaggcaggaggcaaatcaggaaaagcaaaaaggacagagcgcatgaagcatatatggaaaacc

SEQ ID NO: 193437 - DNA, 149 bp, Homo sapiens
gttaccaacatcgagacagagactagcaaaactagtggactttaaagaaaaagaaaattagattattgggctttctgacagcaacacttaatgccaaaagaaaatggagtaccgtatttaagaaagatacacaagcgagaaaacgagcc

SEQ ID NO: 193438 - DNA, 510 bp, Homo sapiens
agtaggtagacagtcatgccttttaataggaagtttctaaatgtatccattcattcatcagcattaattgaatgctaaatatatgccaaccactttattaaatgctggagatataaagatgactaagattcagttgcttccccagggagccggtttatggtctgttggggaagacagaaatatgaactaagttataattcattatgctaagtgcaatgctggagacaggccagtgagagcaaagcatggtacttggagatcatagacagggtggtgggagcataaattataaggtgaaaagtgaggctggaggggtgggcagaaactagatcccacaagatggaactggctggttaggaagctttgagtttgtcttctaggcctcaaggagccatggagtggttttaaacagggcagtgataaggacaggtttatgttttagcaagataattctgtgggctgggtgaaggctggagatgatggaggtaaaactagaagtagggagactaa

SEQ ID NO: 193439 - DNA, 380 bp, Homo sapiens
aacaggagtctgtagtggttggtgggaatgtaaactggtacaagtactttggaaggccatttgacagtatctactaaggctggatagacaaatgcccatcacttctacgctcaaacatttacaaatatgtatgaagctgcaatatttttaaatgccaaaaattgggaacaacccaaacgttcattgacaatagaatggatgaataaagttgcattttatatacaacactacaaagcaataaaaattaatcaaccggccaggcgtggtggctcacgcctgtaatcccagcatcgggaggctgaggcaggagaattgcttgaacccaggaggcagaggttgcagtgagccgagattgtgccactgcactccagcctgggcga

SEQ ID NO: 193440 - DNA, 409 bp, Homo sapiens
tattttcacagaaacatctaggatagcatttgaccagatacctgggtgctgtggtctacccaagttgacacataaaataaccatcatacttcccaaaaagacattagaaagggagagaccatcctggtttgctcactttttaaaacacctcacaagcaaacaaactctttacagcttttgaagatgagaaaatgtcatatgtcttgacatttctcctcctcctttctcaagcatctgtctccgtactaagcccaagtagaatgctttaaaagaaaaacagttgctaaatttaacaattcaacacatgtcttgagtacccatcaagtgccagtgattatactggatgccaagaatacagagataaatgaaaacccattcatgtctgcctccctttaattctaaaggaaaa

SEQ ID NO: 193441 - DNA, 490 bp, Homo sapiens
cttctggcggttctgcgattgtacttggcactttctccaagggtgcaggaacaagagggggctcttatcctttcactcgctgagtatgacacaccggtgagcagaaaagaaagtataccctaaaacaaactaggactagaacacctccttgcccacctttgtctctgaacccacatgttgtctcctatcctgggtatgaaatgtccagaagaaggctagtccctccatttggtcacgggcccatcccctctcgtctaccaaatgacatcattcccagacttttctttctctcctgtatccattttcccttttgactagatcattcccaacagcatacaaacacgttatttcttttatcttaaaaaataaaaacacgaaacacctctcttaattccttcattttcccccttttagttaccactgcatcactctccctccctgtactgcaggaacaccacacgactttctgtgccaatggaaatgttcaata

SEQ ID NO: 193442 - DNA, 653 bp, Homo sapiens
ccccaatggaatcatgatcaaataaaggacttttgtattcccaaaatagtctcatataccaccactaataatatgatgacaaacataatatactttattgaccacttgctaacagaaaatgtgcaatatgtaattgatattatcatcatcatcctttaacctacaaaacccccctgggaggtatttactattatcccattttataaacagaaaactgaatcttacaaaggggtaaaaaacctaaacaacaacaaaaaagatggcaaggggcagagaagagatcagaactctgcttccaaaacttaagcttttttccactgaccatagatacttaatgtactatctacagaagcacaacttccaaacagttaccattctcttcacaatcaaataaattacatgttattaaggaagctgtgctattcacatatgtatgcatgcctgaaataatacaatattgcttttgtaaatggcttagtggatttaagtcaacaactatcaagcccttgctatgtacaaggcaaaacataagacactgacaataagatgaataaaccccagtcccagacaccaggcagctcactttgtggacagagcagagataaagcgagtgcatgattagagccatggagaggattcagtagtaagctgga

SEQ ID NO: 193443 - DNA, 183 bp, Homo sapiens
taaatttttgagatcatcatgtctgagctctcttctttacagaatttatattatattttgcttaagaaagttgttcccacccccaaaattataaaatattctcttacagtctttacatgtttttcaaatatctcttttatccatctggaatttattttggtttttagggtggggagtcactga

SEQ ID NO: 193444 - DNA, 879 bp, Homo sapiens
catggctctgctacattaggtctttggttggatcatctgtggtgactcctcctgagtgggcttcctggccataggcactggctcttgtgaagtctttctgttcattcccagccacttggcctacctgtctgacctacttcctgcatcttgttatcttctggcttgtggccagccctatgcaaaaacacatgtttgtagccactactagaaacacgtgcagctacttcaagatccggaatgatacaggggagtggctttagaaatacaagaataagaggaagcagggaacctgccggtgggttctgtgccagctaccttttagagaatgagctccagctcaaattttctgaacaaaacctagttctgttcatcttgtggcaaatcagatattttctccataagcatattgtggcagttgagttaggagaaggcatgattcgtgctaacagagtcagatagtgatactgggaaccttaggagtaagggctgaggattgttgttgagggcgatgctcatggaattagagtggatgagttgttctccggacatgcaaatagccagaaccaaggtgtttcctatttattgttacccctgggatcccttcaagggttcttcagttcagtagaaacattgttgtcatcatcagggtgtctctgcttgaagctttccaggaggaagggaaaaagggctgcttatgacatcctggctccagccccacagaagaagtcagcgtggggtaggccatttggccttgggagcagtctagcctgccatcgtaataatcgccagtccaccaagccatcttattcctgaccttgtttttctccctaattcttcttggttttctccctaattcttcctgactctctggaaggcacc

SEQ ID NO: 193445 - DNA, 345 bp, Homo sapiens
tcaagcgattctcctgcctcagcctcctgagtagctgggactacagatgcccgcccccacgcccagctaatttttatatttttagtagagacggggtttcaccatgttgaccaggctggcctagaactcctgacctcaggtgatccacctgtctcggcctcccaaagtgctgggattacaggtgtgagccaccgagcccagcctaaggttggttattaatactaaataacatttttgccccacagcatcaacatcactaccctaaggatttgaaaaatcagaagcatctccctcactgaggcaggaagtcttcaatcacctctgaattctgacctcccatccatt

SEQ ID NO: 193446 - DNA, 152 bp, Homo sapiens
ttttactagaaaatttctagactaatccctcctgtttcctgtatctaagccatgctttactttgtcatttctctactctcaaaattttagtgcctggatcctccattgcctttacaaggaagccaagttcttaaaatggtattcatggcctt

SEQ ID NO: 193447 - DNA, 467 bp, Homo sapiens
aagcttttgaactagcgtcttcaacatcattacctgaccaaataatcctattgttttttgtatcctcattttctacagcatttgattatattcaagtcactcccaggttaaaccatgacaaaaggactgtctttgacacaagtccttctccagatactgctccagctcttctctccatcacaggtatagtgaacaactatagagcagttttttacaaaatcatccagacttctaggtaagtgactgcctggggtcagagggtgaacaggagagaagagggaggggagagaaactgggaatgactgctaatggttgtggagattcttccatggataatgaaaatactctaaaattgattatgctgatggttgcaaaactcttatcaacatactaaaaaccattgaattgcacactttaaatgagtgaaggctatgatatgtgaattatacctcaaatcaagctgtttt

SEQ ID NO: 193448 - DNA, 109 bp, Homo sapiens
ctggatgacgagagtgagaccctatctctaaaaacaaacaaacaaacaaacaaccagcaaaaagaaaaccagtgcgtagagcctatttccatttgtgtaaaaaataaag

SEQ ID NO: 193449 - DNA, 274 bp, Homo sapiens
tgccaatcaaattctttcaagattttggaatatggacctaaagagagttgaggcagtcttctcaatgactggaactgaaatatggaactcaggatctgtgaagcagccatattattcccattatattcccccaagagcagagaaagtttgttttgtttactggagaaaattaagagataaggtcctgagaggcaaacagagagtcttaacttttatttcctgccatcattccattttatgagccattcatatattcctattttttcaactcccc

SEQ ID NO: 193450 - DNA, 530 bp, Homo sapiens
gtgctgctgtagatggtttatttatggttctgataaactggaggttggcaagactttaatgggaatataaagtaagctccattatacttctgattaatcaaagttttccaatattaccatattgctatatccccaaactccaaataccaaaagcaagttagaatggattatttggaataactcattctacctaattttcttttcctaaaacacttttaacatctaaacattgaagaagtggcaattatatttatttgcagagccaactgtgaagatgctaaggacaaaaggaaaagagtaagtatcaaactccctgagatatctagcataacacatgcctaagcttcataaccagtactgcacttttgctgcaaaatacactgatgaccaaggcatttaatcccacttactagtaagctattatctagtacattctttcccagtcctgtgtcctctaagtaacctaagtaaatcttttaagttctacctttaataactacatcctttcccatctgagtacacggcatcac

SEQ ID NO: 193451 - DNA, 321 bp, Homo sapiens
ttcacatatcctacactaccaaattaaaaatcttcacatactcaagttccttattcatactttttttttatcttaaaaggcaatttcactccactttaagaaatgaggagtatcaaccatgaatcgccccaactttgtggcaacccccacttacttacatatttccttcctattctcctcaccatcctctaaagaggaatgttcttaacttgttcagagtcacctactacatttacactcttgactcactcaccattgagcccatctctcctgccccactccaggcaattctctgggaccttgttctatcaattagtacct

SEQ ID NO: 193452 - DNA, 328 bp, Homo sapiens
atgagagaactttttgggatgttagatatgttcattattgtgattgtagtgttagccttgtgggcagtatacatgtgtgaaaacttgtcaagttagatattttatgtgcagttgattgtatgtcaattatacatcaatgaagttgttaaaaatgtaagtacaaagatgttcattgcactgtttttatagtagcccaaaataggaacaacaaaatttctaaaaatagggagtggataaataaacaatgatgcattcataaaatatcaagtagccactaaagtgttttcagaggatacttaataacatgagagaaaggccaagttacaac

SEQ ID NO: 193453 - DNA, 333 bp, Homo sapiens
tcacctcctggtctaacccagagatcagccacccttctcctacccgagtatcttcacctcctggtctaacccagagatcagccaccctcctcctacccgagtatcttcacctcctggtctaacccagagatcagccgccctcctcctacccaagtatcttcacctcctggtctaacccagagatcagccgccctcctcctacccaagtatcttcacctcctggtctaaccctgagatcatcagccagcctcctcttacctgagtatcttcacctcctggtctaaccctgggatcatcagccagccttctcctccagtatcttcacctcctggt

SEQ ID NO: 193454 - DNA, 1093 bp, Homo sapiens
agaagatcatggatggagctggaggcctttatccttacaaactcatcgaggagcagaaaacctaataccatatgttatcacttataagtgggagctgaatcatgagaacacatggacacatgggaacaacacacactagggtctggtggaggatggagggtgggaggaggaagaggatcaggaaaaataactaatgggcaccaggcctaatacctgggtgatgaaataatctgtacgacaagtccccatgtcatgggtttacctatataataagcctgcacatatacccctgaacttacaagtttcaaaaaaagaaaatatgcatcttcaattttattaaatcatgactgttttccaaagcagttcactgacttacatgaataccagtagtatatggtagtttctgtggtcccttatccttgccagaatcttggtactgtcacattttaaaatttttgccaatctgtataacagtatcatattaggcttttactttgcattttcctgatcactgatgatgttaaacgtcttatgtatattacttatttggattcttcttttctgatagtttctctacttcaactccaaaaattttcatatgttatgcttgtgtagcccctgtgaaaagaaagcacagtaggatgacctagttactcacttgaaaagtatgatggagcccagcgacctttgttctaatcccagatgtttgacttggtcagagtcccacacctctggccctcagcatcctcatttgctaaataaaagtattggctgggttagagcagcagttctgaaccttggctgcccatcagaattatctaggatgctttaaaaaaatgtttagaccacatctgcaccagaaagcctgattaaattggattaaaggttactatatccatttcaacattctgtgataacgatagaataagtctttaacacctagatttcatggtttcaatcatcttccttgtctgcaccctgaattaagtatgccagagactctttatttgtaagactataatctacttttgtaaatgcgttatataaaggaggagactccttaatttagtccgtaggggaaacttggcgtcat

SEQ ID NO: 193455 - DNA, 1009 bp, Homo sapiens
gagcctgggtgattgaggcaagtgaggagggatgccaggcagatgcttggggatctgtctgctgatatttggtgctcatcttgtgcccggaacctagttggtgcattctgaggataggggaatctgtagcctccccaccacacagaccatgggccccatgggtcacttggtgtggtctagggacctgcatgctgtgggtggctccactcagtctggcgaggcctgccacggggctctcctctgctcccaccttccatggggaccagccgtggctctgctgcccttgtgcttagcatcctggcccctcagcctggggatgcccctggctcccactcactgtgtgtgactcccgaggaaggccacatagttcagggactacctcactgtgtgttcaggtgccacctcactgtcttgtttctacaccctggagccattgtccccacagcatcccccatcaagccaggtcccctgagctgtgtgtcctcccttctcccctagctaaagggccaacctgcgctccgcagaatctggggaggcctcttaccttctaggtaagcattacatgaggacactgccaggctccaggccaacactgcttctcaacaccacctgctttcttcttgttgtccgtgggctccctccaccatcttgtggctgatttccaggaacagccttctcttgagctggatgggcccctcctgtggggtcagagcactgggtggagacaccttgggcttcatcccccagggcctgggcctgctccagtggagacttggaagagatgaggtggggcctaaaggacttgaggctggggctgagactttcagcaaggcagatgccgcctctccagaccatctagacgtcactggtgcccctgcagcccctgacgcttgtgccgctgaagcagggcagggtcaagatcctctaaagtcttcctcagcctcctgcttgtccctgaacaggggtgccctggctgctagggctgccggcctcctgtctgcatcccgta

SEQ ID NO: 193456 - DNA, 1038 bp, Homo sapiens
tacatcgtcatagcttgattcctatgatggtaacaggagttgagatagcacggttgagggatgccaggcagatgcttggggatctgtctgctgatatttggtgctcatcttgtgcccggaacctagttggtgcattctgaggataggggaatctgtagcctccccaccacacagaccatgggccccatgggtcacttggtgtggtctagggacctgcatgctgtgggtggctccactcagtctggcgaggcctgccacggggctctcctctgctcccaccttccatggggaccagccgtggctctgctgcccttgtgcttagcatcctggcccctcagcctggggatgcccctggctcccactcactgtgtgtgactcccgaggaaggccacatagttcagggactacctcactgtgtgttcaggtgccacctcactgtcttgtttctacaccctggagccattgtccccacagcatcccccatcaagccaggtcccctgagctgtgtgtcctcccttctcccctagctaaagggccaacctgcgctccgcagaatctggggaggcctcttaccttctaggtaagcattacatgaggacactgccaggctccaggccaacactgcttctcaacaccacctgctttcttcttgttgtccgtgggctccctccaccatcttgtggctgatttccaggaacagccttctcttgagctggatgggcccctcctgtggggtcagagcactgggtggagacaccttgggcttcatcccccagggcctgggcctgctccagtggagacttggaagagatgaggtggggcctaaaggacttgaggctggggctgagactttcagcaaggcagatgccgcctctccagaccatctagacgtcactggtgcccctgcagcccctgacgcttgtgccgctgaagcagggcagggtcaagatcctctaaagtcttcctcagcctcctgcttgtccctgaacaggggtgccctggctgctagggctgccggcctcctgtctgcatcccgta

SEQ ID NO: 193457 - DNA, 267 bp, Homo sapiens
ctgcagcaaagtaagctttctgtgactcagtttcttcttctctgtaggatataaattgtaataatcctacttatgtctgttatgaggattatatgtcagtcaatacacagaaaatatgaacataaattctgtgcaaatgtttactattatgttcctcatttgacactggctacaataaagctctcttgattcttgaacttttttttttttttttttgagacggagtctggctctgtcgcccaggctggagtgcagtggcgcaatctc

SEQ ID NO: 193458 - DNA, 371 bp, Homo sapiens
aattagctgggccgtggtggtgcatgcctttaatcccagctactccagaggctgaggcaggataatggcttgaacctggaggcggaggttgtggtgagccaaggccttaccattgcactccagcctggcaacaagagcaaaactctgtctcaaattaaaaaaaagaaaagaaaagaaaatctttacaatgaaatcccttagttctttctgttaaagtgagcccaagaaccttctaacttaatatatatgtgaaaataaaggtgagtgttctgctagactaacctgaaatactctaaacttggtggtttttacacagtacagtcacagaagatagagcaataattttacctgcatgaattaaatcttaagat

SEQ ID NO: 193459 - DNA, 120 bp, Homo sapiens
ttaagatacagagtctcagtgttgctcaggctggcctcaaattcctgggctaaagcaatcctcccaactcaacctcccaagtatcattttttttcttggatttcaatagaagtttgtgtt

SEQ ID NO: 193460 - DNA, 798 bp, Homo sapiens
aaaaaaagatacaaattattaatataaaaaataaaatggaggctgtcactgttgatgtcaccatgcagataccaaaaacgtctaggggaataatactctgaacaactctgcgcatatcaatttcatgactgagatgagatggaccaattttttgaaaagcacaaactaccacaacttactatcaaatggataatttgaatagctctattatttttaaggaaattgaatttgtaatttggctctcccccatctctaggcccaaatgatttcaatgaagaattgtagcaaatgtctaaaaaagaattaatagcaactgtatataatttcttccagaaaatagaagaagaggaaataattctaactcactttatgaagctagttttatcccgatatcaaaactagaccaagataatactaaaaacaaaaacaaaacaaacagctacagaacaatatccctcatgaatctaggccaccccccacccacaccaaaatccttaacagtatcttaccaaatcaaagccagcactatttgaaagaattctactacaacatgaccaagaagggtgtattctagggatataaagctggttcagtatttagaaatcaatcaaggtaattcaccttattgacaggctaagaaagaaaaatcacatgattatatcaattgatgcagaaaaattatttgataaaatgtaatgcctatccatgataaaatctctcaggaaagtatgaatagaaggaaacttctttaaactcaatatggagtatctacataaaacctggagctatcattgtact

SEQ ID NO: 193461 - DNA, 265 bp, Homo sapiens
cctactgggcgtatgtgatacgtggtgtcgtatgcctataatcccagctactctgaagactgaagcccaaggatcagttgaaccgggggtgggcggtggggcaaaggttgcagtgagccgagatcatgccactgcactccagcctgggcaacagagcgagacgctgtctcaaaaaataaataaaataaaaaactgttaaatttggggaggagtcaaagttacatgcagattttcaattattaggggagtcagcacctctaaccac

SEQ ID NO: 193462 - DNA, 193 bp, Homo sapiens
tcagggggctgcagtctggttgggtgggagagatgtttgtgacctatttgctaggcctggggtccccatccacccaggacacacaggggcacccacttctgttgcatcttcatgctcctgcccctagtggccatgttctgagaggtcttaacatctgtccgtcccgtgctgaagtacagagcagccatgtggt

SEQ ID NO: 193463 - DNA, 250 bp, Homo sapiens
tgattcctattttaaaaggtaggatccttcagtgtctgttagatgcaagttaccgtggcaacctaatagcaaactgcaaatcccaggtcatgctcagcaaataaaaaacattctcagcaaataaaaaacatcgtcatcacgtagtgtttgggtgtactgtcttctatatagaatctcacattccttgtgagaagcgtatcacattttccctagtgcgttatccattagcttatgtctgagtgcttgctaa

SEQ ID NO: 193464 - DNA, 671 bp, Homo sapiens
gagtaggcttcctcagatttaaaggatgggaaagtatattttggcgtttagaggaaactcagcaaagatacagagaaagggtgactgagaaaagacaaacttggttgtgaagcaaacatggagaaacagtaaagcaggcgttcaggcttatgcatttgattgtaaagccactgggtgaataataaaaggtgataagtagcgaaggatcaggcattcataaagtaaatatgaaaactaatattggtagtcatgcatgggatgccccagggttctgcttaggatgcagtatttataagcgaggtaactgattctggataataggtttggcagtggggtagatagtgcagatacagccgaatgattttgctgaagttgtaccagtcacatttagcagttggttgtatatagaggataggaattctgcaaggaattttaccttgaagtgttagtttgggtaatgaaggatgtcaaggaaattgagaggtccatgatctcataacgtatatcaggagcactaggggtgcttcttggaaattcagataactggtctcagtctacatctgttgaatcagaattgttgacgattgggtctctctgctttagacgatgagagatccaataggaatagtcaggtggagagaagaattttctgatcttctgcctttcgggga

SEQ ID NO: 193465 - DNA, 215 bp, Homo sapiens
gcgtctctacagtggccaagccctgctcctcacatacaaacctcactttaaagactagtaaaaacccaaggctgcttccactaaattccttagagtcagtcaaaagagaaaaataaaaccctcccttggaaatacagccaataatctctgctgggcttgggctgagaagccttcctcctagaaaacatctgtgctaacacttgggctgccagact

SEQ ID NO: 193466 - DNA, 220 bp, Homo sapiens
ctcgcctcctccccaagaggctcaggaggggacaaggatagggacagaggtcgcaggaaggccagtgcgccgtgactgtgtgtaaggccacagggctggggccgtggtgggaagaagcgaccatactcgggatgtattcccagagcaggtgccgggacacacggaagtcaggagctgaggaagggtccggggtgagggcccgctgttccacggcatctac

SEQ ID NO: 193467 - DNA, 637 bp, Homo sapiens
ttttcttataaaaattttcccttgatgacttgagcgactaaatcaagcttgcattcagaaaaagtccatctggagaggtcatgataaaagacttcaaaactcaaaaacttgtactttgtcaattatatcactttgtccacattttaaataatatgtgacaaaccaatcatggaactttagtgatagctagacagtttaaataatggagtccatattactatggctagtagagtcagcaaatctatgatagtcaaatagctgtaagaagagtctgggttgctgattatgctactcatttcctccaatggcttttaagaactaaatatctggcgttttctcattactacacactctttgctggcatcggttccttatttggctatcacaaggtcatgttctctcaaagtaggtaaaataggaaaatgtacagttcagaaagcttattaacctctaaatcacagctctaatgatctaaagagggatgtgaaatgagaagaaaagcagaaaagggaaagagctggtttaaggttaagctagtcctgttatttatgtatgcaaatgacacgacaataataaaagactttaaacctgctgatcatctcacaagtaaattaatgatccacagaacatctgtggg

SEQ ID NO: 193468 - DNA, 320 bp, Homo sapiens
aaaaggaaaagaagaaagaaaataatccaattttaaaattggcaaaagtactgaatggacatcttaccaaagaagatataaggatggaaaataagaatatgaaaaatgctgaacatcatttgtctttagggaactgcagattagaacaatgagatacccacttcacatctactagaatgtcactgtgacaatgccaaacaagagaaaatcttattattgccagtgagaatgcaaaatggtatagctgctttggaagactatttggcggtctcttacaaaacttactactaccatataatccagcaatcatgtgctactag

SEQ ID NO: 193469 - DNA, 554 bp, Homo sapiens
aagaattcctggatcacatggtatagacctttgaaattttgatggaaaatgttcttttgagtaaaacaataacaaaaacctaatagggagatgagttactcggacctgctgctgactatttgttgctttaataattatgtggatattcgagttacacagcaaatagctcatgtgctaatcatgaaagattggtcacaggaagcatctacacacagatagttccttttatgacttagtttctgaccttggggaaccaggataataaaaactacaagggtgaaaagacaataacaagtgttggtgagaatgtggagaaatgggaactttcgggcattgctagtaggaatgtaaaatggtgcagccactttgggaaacagtttggcatttcctccaaatgttaaacacagttaccatatgatggaaaatgttcttttgagtaaaacaataacaaaaacctaatagggagatgagttactcaagtgctctatttagatgctttaataattatgtggatattcgagtacacaacaaatagtcagcagcaggtccggcta

SEQ ID NO: 193470 - DNA, 514 bp, Homo sapiens
tgatggaaaatgttcttttgagtaaaacaataacaaaaacctaatagggagatgagttactcggacctgctgctgactatttgttgctttaataattatgtggatattcgagttacacagcaaatagctcatgtgctaatcatgaaagattggtcacaggaagcatctacacacagatagttccttttatgacttagtttctgaccttggggaaccaggataataaaaactacaagggtgaaaagacaataacaagtgttggtgagaatgtggagaaatgggaactttcgggcattgctagtaggaatgtaaaatggtgcagccactttgggaaacagtttggcatttcctccaaatgttaaacacagttaccatatgatccagcaattccactcctaggtatacacccaggggaattcaaaaatgtatctccggcagggcgcgatggctcacacctgtaattccagcactttgggaggccgaggtgggtagatcatgaggtcaggagttcaag

SEQ ID NO: 193471 - DNA, 188 bp, Homo sapiens
tgatgatgatgtccatagcctggacctcttcccatctggctccttggattacctcacagcccttcctaggtacccagaatgtttgctctttggttataaggccagatgaatgagcaaaaactcccacctaaatctgtagcatgcggacaaccaaatgaatagatatttgattctactcacagatatca

SEQ ID NO: 193472 - DNA, 620 bp, Homo sapiens
ttttggtactgcttctatccactgccttttctttgtctaacttttcctctctgaggcctttaggggaagccagtttcttcctcagattctctgagtctccccgcacaaagcccctcagccctttcagctgccctcctaagagttgggggatcatgacttggcctcacagaattccatgccatcctctctggtctgggcagcctctccagggcaatgggagtgcagcccaccgggtctgcagagccccagctgaggcctgagcttccaggcaccgcaaactctcctgggctgcagggccagagtcagccccagtgcacccccagggccagaacaccagccgtatccaagtctctttccccctaggaacttaaggaatttttcttaagggttgtttcagtttcatacctttgaaaagaacttgcttctcctttgacaccttcgctgggactggggccagaccgtggagcagataatagttttgccacgtgtagtctcccatctccccatttattcaaggacatttattgagcacctacttgccaagccttgtgcctggagctgggaataatggtatcacttcgtcctgagggagttcctgggttggcataagcggacactac

SEQ ID NO: 193473 - DNA, 398 bp, Homo sapiens
gtggcttcaccatgttagccaggttggtctcgatctcctgacctcgtgatccacccatcttggcctcccaaagtgttgggattacaggcgtgaggcactgcgccgggcctagcataacaaactcttattagctatcacccagcttctagtagtatcaatacattacaaaatttgttcatttatagcttcccacctgctatcccttgctggttactttaaaaaatacttttatgtatacttttaatttacataccattaatgattcatcaatcttaagtatgtaattaaatgatttttagcaaacatacaaagttatgccataatcagcacaattcagttttagaacattgccattattccagttcatctcctgtggctgtttgaagccagtctctact

SEQ ID NO: 193474 - DNA, 230 bp, Homo sapiens
agcactttaaatatgtcatgtcactctcctgtcttgcaaggtttccactgaaaagtctgctgccagatgtattagagcttcagtgtatgttatttgtttcttttctcttgctgcttttagaatcatttcttaatctttgacctttgggaatttaattattaaatgccctgatgtagtcttctttggattcagtcttctaagtgctatacagcctccttgtacttagctat

SEQ ID NO: 193475 - DNA, 359 bp, Homo sapiens
tcagcttccgttaccctccctatctacccgcactgcagctgcctgctcaagcattgactggacctgggcagtcatactctgtttagaaactgaaacgacatcataggtacaacacgaatcaccatgaagacacacaaggatgcaggtatttatgctttcagttcatttaaatcttcctcacttctctctcctcccttctttctccctccctccttctttatggtataagctgagaaattcccaccccctcatttttttattgccgatgataacaggaagattaattgaagtatgtgcagttatacctaaaaatggtagatctcttttaatgtaaaagaaaaggctatctctgatttaaa

SEQ ID NO: 193476 - DNA, 268 bp, Homo sapiens
cccagggctctgcatacttggagggaccctagtctaactttcttttctgtactctgcttttgtggaagccgcatctcccagtcttgatcagtttttcctctgtggtgtgcgttgagcagagagtcctgagagactggcctaagctctgggggccaataaggcccccagggagccccttctggggagacctggtatgcgtgctttgacctaaccctgctggggacggcttcccaggcagagtgagctcgaggccggtccttgagggatg

SEQ ID NO: 193477 - DNA, 284 bp, Homo sapiens
cacgtggtccggaagtctattgctctatgcacttcacagcttctggcttagtatgaatgagaaggcatgaaaaagaggagggactgggagcaaggagttctgcaggtcttagaatcctccctgggatacatatttaggcagttcttactccaggtggcaaaaccctgcacagccattcttcttacatgaggagtagaggccgactgaaggctctacgatcctggcatggccatctcctatctttgggacattgagccagtatttagcccatctctttctcatca

SEQ ID NO: 193478 - DNA, 194 bp, Homo sapiens
cccatgcaccttggtcaacagattaatgaattgtagtacatccacaggatagaatactactcagcaataagaaggaatgaactactgatacacacatcccaccaaaaagtacatgctatatgatgattctatccatataaaattctaaaaaatgcaaactaatctgtagtaacagaaagcagattagtagtagc

SEQ ID NO: 193479 - DNA, 564 bp, Homo sapiens
agactgtctaataccctgcgacgttgtggcttatgtctgtaatcctagcactttgggattacaggtgtgagccactgtgcttggccaccaaaccctaattcagagcaaggccctaactcccttcaattcactgaaggctgagaaaggtgaggaacttgcagaaggaaagcttgaagccaatgggttggttcatgaggtttaaggaaagacaccatcttcataacataaaagggcaagtaaacagcaagtgctgatagagaagctgcagtaagttatccagaagatctagctgagatcattggtaaagctggcttcaccaaataacaaatcttcaaatgtagatgaaacgactttgtattggaagaagatgccttcaggctaggactttcatagctggagaggagaagtcaatgcttcaaagtttcaagggacaggcttttgtcccttgggctcttgttaggggctaatacagcttgtgactttgagttgaaggcaatgctcattgaacattctaaaaatcctagggcccttaagaatgatactaaatgtactctacttgtactc

SEQ ID NO: 193480 - DNA, 241 bp, Homo sapiens
ctcctcagcttgcaggtggcctataatgggccttcaccttgtgaacatgtgagccaattctccttaacaaacgccccttcatacatacatatatcctaaagacctttttagattattttaacatatttaaaaattttaattgaaatttttatcgagtgtattagggttctccagagggacagaactaataggatatatgtatgtatgaaggggcgtttgttaaggagaattggctcacatg

SEQ ID NO: 193481 - DNA, 367 bp, Homo sapiens
gcaggtcgacctagcaggatcccactacgtcgcatatggggtacagaaataggaagtgagtaaattcttagcccatctggggtggcttctcaccgtatggtggaacactagcagacatcacagatataaagatgtctaaggtctcttttacctttaatatactaatatagaaggaagcaaattcaaggagatcttaaggatttgaaaactttagttgggaaaagaatgattaataaagactttcaaggcctatacttattttaccaattttttttttttggagatggattctcactctattgcccaggctggggtgcagtctgtatttcgctttttttttggagatgtttttgcaacattttgctct

SEQ ID NO: 193482 - DNA, 248 bp, Homo sapiens
aagcaatgggtagcagccagaaatacagacgaagcttcaattgttacccaccattcacctcctgctctgtggcccagttcctaacaggccacagaccagtacatgtccatggcccaggggtcagggacccctgctgtggcacattgctaatagaggactgtagcagccatgtgccctgacctttccttttttttttttttttttgagatgccagaaacccagaattttttttttttttttttttttaa

SEQ ID NO: 193483 - DNA, 419 bp, Homo sapiens
atagttatccaaccattggatgtgcctgcggttttcacagggaagaccgtagacctcaggatgataactgagtaagaaagaagttttgtgtttgagcccatgtgtttctaaccagagtgctcttttccatggaataaatgtttcctaacactagtgtgaagatttaatcaaatacacacttcctcatcaaacgcacagtcaacttttatcttaaaatttattaatgtgatggttttcattttcaaatgtaagcattttcaaacacttaattgtttaactctcgatttgcaaaatgagttttttggtgaaatgtgtcatttgagggtcttttaccactgtttggttttatagcttgcttttcttgtttactttatgatgtaaactaatttttactaccaataaaagttttaggaatccta

SEQ ID NO: 193484 - DNA, 1002 bp, Homo sapiens
gcgtctagaggatcccggaacggcagagggagagagttgtctctggggaatacttcttggaaggggtgatctctgagctgattttgccaggaggccgaggggaaggaagtaggacagtctaggtagagagaactgtgggacaaaggcagttccctgttttctccgagtgggtgcttccaactacagtccagttctgtgccttcagccatctgccagcattcgcacaggtttagtgagcttcactttaaaccaacaggtaacagttataaatgcaaacacatcatctcttcctcctctaagacctgacctccctttgcttgctaatggtcccactaatctcccaataatgcactcaaaccatcatcttcgtctcttgccaccttttcttacttacatgaaatcagcatggactcctctctctcccttcctcccatccttgcttcctccctttcttctaaatcgtatcagagcgctgaattccatttggacagtgagttacataggacatcaagatgtcatatccctgtttgtgtcaggaaattgcagtttggatcccagtgtccttagtgagacatccccgaagcccacaaggaggaagcctagctctgtcctttctggcttttgctttcagtacatgttaccctttctctggagcgctcagtcttagttttgccctttcttatttcattctttctctatttctgtattttttttaaactggattttcattgcagtcagacggacctgggtttggatccagttttactatttgctgtgtaaccttggacaaattacttaatctcactacacctcagtttccttatcagaaaagtagggataataacgggaggacctcataaggctgtcgtgaggatggattgagacagtctatgtgaaatgcttagcacagtggctggcatggagtggatgctacctacgttttggctgcaatataacaataataatcattactattgtcctgctctggtatgtcttttgaaa

SEQ ID NO: 193485 - DNA, 255 bp, Homo sapiens
tgcagtgagccaagatggtgccactgcactccaagcctgggcaacagagcaagactccatctcaaaaaaaaccaaaaaaccaaaaaacaccaagctgttatttgcagaagatgcatgtacttagaaaatctaagataatttacacactattaagaaaactaacacatgaatttcacagggcattagatgtaatacaaggtcagtacaccatcagttacatttctatataccagcaataaacaaagacaaaggtga

SEQ ID NO: 193486 - DNA, 344 bp, Homo sapiens
ctacaaaaataggaccagaattctttctggatttttgcagagacccaaagccaactctgtctttggcagtgtctgccttggccttctccggcgcctcactgctgcagcctgatggctgccccctgcccacatgccactgcctgcagacatccccacactggtgcccgggccaaccacaggagagcaatgaaatatattaagtagactcagttctatcatacagtagtgaaatccaatccctgaaccagataaaaaagcaaacagacccctctgttatgtacagctcctaccaaagctctccaaccctgacacacacacacatacacagacacacatacagacac

SEQ ID NO: 193487 - DNA, 787 bp, Homo sapiens
tatgagtatttaatatgagggtagagaagctatcttttccagcttgtgtggaaataaagggcacacccactgacactttccctctgttgggtttgggaacattgctaggctgagactagcatgtaaatggaagggtttactgttaaagctggatgactggttgacggtgtatccactggggagtggagaggtctgccaagagaatgagagctcagtttgggtctaggttacattgttgtattgtcctcttctgctgctcagtctccttgcttcctttagatactttctctttagttaacctgtgccttgaggtccaatcacccttcacagtgtgcccagggctgtggctcaagtctgctcataaactacctctacttttgctttccatttcttctcaagggatgtagctctcagttatggcatctgtgcagacgtagcccctgtggttccaggatttagcttcacttcctccttgtctgacattccaaacttctatgctttctggtccatgtgaaccactcaacagtctctgctttcacatgtttacccatcctcccagactcagcctaggcacctctgcagagtagccttccccatgtagaggtaatcattccctctctggcacacccagcgtgctttgcattctttagttacacactcataaccttggtcctcctttgttttcctcctattggaaggtcaactcttcaggggtaaaggctggatcttaattaactatgcatgcatctccagcagttagtgtagtgcttatccaagatattgtgtg

SEQ ID NO: 193488 - DNA, 350 bp, Homo sapiens
cttgctgagcaaacagtgattattactgttgttgatgatgataacaataatcatggatggtgatcactattatacggggtgtgcaatgggaacaggggcctatgctaaggactttgcttatgctactgccaggagcaacacatccccgtgacacatgcgcccattttacagatgagaacactgaggctccaagaaggcaacaaacttggttccatgcacacgagcagtgagaaagaaaaccaaggcatgaatttggatcttactctcttactcaggagccctgggagaccaacggggattcttttgcctgtttagagatgaggaaaagagggggccgagagtgtagtgac

SEQ ID NO: 193489 - DNA, 147 bp, Homo sapiens
taaaatcgagctcggtccgaatgatggatctaagcattgattatcaatgcttagatccattcattcaataagatttcagacttgctctcactgtgttatttcttcttcctaagtatcattgtaactcatggattttaacatttggct

SEQ ID NO: 193490 - DNA, 551 bp, Homo sapiens
cattgttaactctctcttagaccctcatgtgctgccttcctaacaattcttatttcccattgttttccccagaacctggtgtaaggcctgggacacaaaatgtttgttcactgactggataatgaacagataaggcaatagatgtcactggaaaatgatctttccattccaagaaagtgctaaaagacatcatgaaacatcaaaagtttcaattgccaaattctgtgttatggcttacacagataatgtagtctgttaataccaaaaagttaacagaatggcccaaaagaatgcctcatttggttaagaatctcacatatgttgtaaaatatagacaaagtgaagtgtatactcagatatttatttactggaacttcattaataatgagcaaacaataattaagtaagcagcaacataaagctatgcttttaaaagagggctgggaaagagttcttggcaatagcttagggggccacatgatgataatgatcacaatcatggttaactatatgctacagacactgttctaaatgctttatttaaacctatt

SEQ ID NO: 193491 - DNA, 316 bp, Homo sapiens
ataaaaaattataagcacgcaaagaagtgggaaaatataacccataaccaggagaaaaaaaatttaaaaatatcctaaaatgacagcaataatgaaattagaaagtagaacatgaaaacagttacgtacacctgctacatatggtcaagaatctagaggaagactgaacatgataaagggagatatagaagatataaaaaggacacaaatgaaacttctagagatgaacaatacagtatctaaaattaaaaaaaattcacaagatgaaaataatagcagaggctgggcatagtggctcacatctgtaattccagca

SEQ ID NO: 193492 - DNA, 671 bp, Homo sapiens
ctgtaccctaaatttattatgtgtttggtttggacttctatgtccacaaatttctaggattcatttgcaaaatggtaagttaattttattctctcaaacatgagcaaagcatcaaggaaaaggatcttaaaaggtagtgtgacattttattctataaaattcccaacagcagaatctgaatgtctgtacacaatcctgtataccacctaactttaaaaacttttaaatgatataggtatttgtcaccagatggcatgggctataaaggcaggtaccttgtcttatttactctggcatctaatgcagtgtctggcacacagtaggtgttcataaacatgtatcacatattcaccatatgagtaattataatttaaggtggctttagaatttgagctaattatttcctttcaaacttattctttcagtctttcttgtcttagtaaatggtaacactgattactcaatggctaagccagaaacctgggcactgtccttgggtcttttctctccctcacacctcctatttaacaatccgtgtttttgctgccctgtgctgctgctgtgcaaaagtctgccacatcatttctgcttggacctctgcaatagtgcccttaccagtttctctgccttaactcttgtctgttaaaatctgttctcttcacagtggccag

SEQ ID NO: 193493 - DNA, 206 bp, Homo sapiens
ccctagaatcctcaaacttgatccagactcagaacctctgcctggaacattctactctctgatagctctagaactagaatataaggtaaataacacttgctgatttgaaaaatatactacaaacctaagtggtttaatacaatgtctttttttttttttttgctaacattacagtccagtgagagtacggcagcaatcaagtcacc

SEQ ID NO: 193494 - DNA, 655 bp, Homo sapiens
ggtctccttggttagttgtatcctaggtatacattttctttgtggctaatgtaaatgggatagtgtacttagtttgtactccagcctgggtaacagagcgagactatgtctcaaaagaaagaagaagaaatagagtccttctgagatcatatttagttcgctttaacaactcttacaggccagtaactgtgctggcccttaaagttgcaatgataagatcttgcttctcagagattgatgagtttggtgggagacatatataaacaatgacaactgaagtatataaatgcaatgggatcatagaagagggaacaaccaattttgctaacagttagtggtagtgaaaaaatgacttctcagtgaaagggacatttgattatgttttaatttgtatacttgtattcctccttttgtaaattataagcattggaagtaagaaatgtcttcacatttatatcaaagagtgttttaggcatttatttaaattgcattcatttatttaaattgttcagtgctccacaaagttgacatctatggcaataaacaactaaaggatcgatttgtatgagtatagtaattggataaacattttgagaatcatttatttctaataaaaattaagttatcaaaactaagcattttatagcagcaagta

SEQ ID NO: 193495 - DNA, 271 bp, Homo sapiens
gaccggaattgtcatttcatctaagtttcaaatttgttacataaacggttcataatttctaattcctttttcaagtctgtagtatccttggcagtatcccctctcttgtactttatattggtaattccttttttttttttgggagacagagtctcgctgtgtcacccaggctggagtgcagtggctgatctcggccgtgggcgacagagcaagactctgtctggaatacaaagaaaaaaaaaaagaaattagggatagtggtaaacccgag

SEQ ID NO: 193496 - DNA, 471 bp, Homo sapiens
atccccccttttgctctggaagagccttttgctctggaagatcaggtttaaggcaagcccttgctccttgtcttttccatacagcatgagtggcctctcagctcaggatcccaccagcacttatgctaatgtgggcacattatggtaacaagcacctaataatagagggaaatttaattccagcagcagcagcagcggcggcggcagcctctcactggagaggagccatcctccttaggaggaggaccggtgccgtttgcatatgagggtggcaggaagccaacacacttgcctcctgaatttggtttccttccctttattcacgtctataattgagcctttgtaagcagagggatgagtgtaaaggagctaaatttggagctgatttcacgggggtgatgagagctctggaggccagctctaccttatgttcatcttgccgaccaagaggaaattcttggccctgatcta

SEQ ID NO: 193497 - DNA, 542 bp, Homo sapiens
gatagctgatggtcgatctagaggatacccccgagtggccctgcatagacagggtttcaccatgttggccaggctggtctccaactccaggtgatccgcccgccttggcctccccaagtgctgggattacaggcatgagccactgcgcccagacaatatttaacaacttttaacctaagaaatggcaatatagtggttcatcctaatacttcccttgtaccttcccccatatacaggggaaagtgaagcaatgagagatcaagcaccttaatacaaagctgggcgtctgactcctaagtccattcgagtacccacagtgcacttcaaggctagtctcagtgcccctgcccggccaaatttgcctggatgacctcttgctcttcaagagagtgcctttttttttttttggaaatggattcttgctctgtcgcccaggctggagtgcagtggcccatctcagctcactgcaagctccacctcccgggttcacgccattctcctgcctcagcctcccgggtagctgggactagaggtgcccgcca

SEQ ID NO: 193498 - DNA, 589 bp, Homo sapiens
ctttgctctgtttatgtctcgtagttgtcttctctttagttaaatatcctgtttcctctctcttataaggtcacttgtaattgtatttggagagatgaggaatctctaaaggaattcaggggttggtggggagggaggatgagggccaaggcaggagggctattaaaggtgctctatgccttctgaaggtaaagggagaactaggaaaaacctcagtaggcaatccctagtacacatatagatgtactctgcacaaaggtgtctagcttgggggtatgagtcgggcctgaaatcatgccctagcaccatgcacaccaacttggggctggttcagaggcgtgtcagccaagagtaaacatatgctcacttgggaaaccatttttgaaatgtgaaaagccacttacatgcaagcaaccatctcaactaactgaagatgaatgtgccatagctctaaagttagaatgcctgaattcatgattcatggagctctctgggttttcctctctttattcctctgcagcattcagtaaagatgtctttaaacatgacagccttgtgttagttatgacatatgttgtctactcttggg

SEQ ID NO: 193499 - DNA, 500 bp, Homo sapiens
aacactgaatactaaactgattccctaccggatctgccggaagagaagcatgcagccatttgggaagctgagggtcaaggtcatttatattccaggtattctcagacaggctcttacatgtcagtgcctagtgcttgacagaataatttccctcctgagttagatgattcattggaaaatgaagccctcctgtcgagccctttcaaaaaaaagtctcctttctttactcccttaattgcagaaagtagaaagaaggtgattaaatccccattagcaacccagggatcaagctgctaagaaacctcagaattgcataagcaccagccctcttcactgcagtcagatgggccaaaacttggaagagaaattgacttgctgtgatggccgctcatttgacagccatgcctggccactgagccgtaaatctgacaacacctgagcaatgctctattttctaaaaccagacttcgtttttgttctgaagatgctgtggtttaact

SEQ ID NO: 193500 - DNA, 268 bp, Homo sapiens
ctttctggtaaacagcacccatacattttatgaaatattttagtctttagagaataaggcaaaaacagctccaggagtctagagctgacatcccctcaccacaaggccaagtcttttttttttttttttttttgagacggagttttgctcctgttgcccaggctagagtgcaatggcacaatcttggctcactgcaacctctgccccccagattcaagcgattctcctgtgccagcctcccaactagctaggattacagaagcaggcc

SEQ ID NO: 193501 - DNA, 407 bp, Homo sapiens
cattaaaacattttcatctcattacaaatgatttcttcctttaaaatttcccagaaagtatggcctctgtattttctgctgctcagtttaaacacatcatcaaagacagataattattaatgtcatatgagcataacaggagatttataaatcagaaatgtattttctgggaaccaactttcaagttagtcaggtaagttttattaacttcactggtgaagtcctaggataaagcagtgcctagatcaggcttgtttacccttggccttatatggcaccaaacactgtttcaggacagtggaagaacagcctgggaggccttcggccttggccagccttgccgaggcccgctcaccaggagaaataggaaggaaggccagtgagtgtgcaaaggagcatggcttatt

SEQ ID NO: 193502 - DNA, 241 bp, Homo sapiens
ttcatttatttatataaaattgtatttttcttctatgtagcaggcactatgctaggctctggggattcggtgtagagataacagtagtaacagtaacaatacagtgtgacaaatgctatgataaggagaagtcagccaacttatgtattaggggagctcatttactgtaggtatcagggatgacttctttgattaagtgcttgtaagtgatgactatttgaattagccaaataagaggtag

SEQ ID NO: 193503 - DNA, 574 bp, Homo sapiens
ctcccaggttcaagcaattctcctgcctcagcctcccaagtagctgggattacaggcacacaccactacacccagctaatttttgtatttttagtagatatggggtttcaccatgttggccaggatggtctcgatctcttgaccttgtgatctgcctgccttggcctcccaaagtgctgggattacaggtgtgagccactgcgctcagcctaatttaatttttaaaagagctggaatgcgtccattcctttcccatttgcaaagggctccagaatcatcccagatgatggctttcaaaatgatagttcaataagggagatttaggataaagtgcttctttctgatgcttcacttaagggtccctgagagtattagtttgctagggctgttgttaaaaaacaaaaacacaaactgagtgacttaaacagcaaacatttattgtctcccagttctggagactaaaaggctgagatcaagggtgtcaggaggattggctcctttcgagggctgcaagggagaacctgtggctctctcctaacttctggtgtttgctggccgtctttggcattccttg

SEQ ID NO: 193504 - DNA, 437 bp, Homo sapiens
aggtgatccacctgcctcagcctcccaaagtgctgggattacaggcgtgagccgccgtgtcaggcccacagctggtttttaactgaagaaaactccacttccacaggcctaaaactcaggtgaagcataaaattacgttcttgtttgagtcccttgataggcacatttctccttctggaggtaacaaatggagcagtcgtgagtccgagggaaggacggcctttctggctttcccgaggggggttttcatctatgattaagtctttcctttgcgtctgggtgaaatagaaacagcctagccccagggaccccagtctctggcagacccccacagcccagtgtaaactttttatgcctggggacaaaagacctcagttgtatgtgtttcatttagtgaattctttttttatttttttttgagacggagtcttgctctg

SEQ ID NO: 193505 - DNA, 301 bp, Homo sapiens
tggcatttgctcttggtgaagttggggtggatgacggcccactggaatgaacccagaagtgatgtgatctttaacactatcactctggctgcagtgttgagaacagactctgggtcaagggtagaagcagggaggctggtaaaggggaggctcaaaagacagtgggaaaggaaccagaagaggcttgtactgtggagctggagccaacagggttgactgaggacttggggtgtagaggagaagagcaagggtggcttcaaggcttccctgcatctgcccagcctggccctcacatcctgtc

SEQ ID NO: 193506 - DNA, 246 bp, Homo sapiens
tgactacaaagcaaaatctataatggataaactaaaaataaaaagcaagtatttaaaacatactaccagacaaaataaacccaaaagaagacagtaagagaggaataaaggaatagaggagttataaaacaatcagaaatcaacaaaatggcagtagtaagttcttactactatttataataaccttgaatatatatggactacattctctagctgaaagacatagagtcactgaatagataagaa

SEQ ID NO: 193507 - DNA, 128 bp, Homo sapiens
tttccttcctcaatctctacaccctcccaatgtggaagagaaaccacatccaggtggcatgagtgacttttctctccatattgacattggccaccgtgtccagcacacagaggaaacagatggaagat

SEQ ID NO: 193508 - DNA, 387 bp, Homo sapiens
ccatgtagagtagaatgttagcttcccatggggacaagtgcaggtaatgctatttgccaggatctgactgctaacaaaggaagtcattggctgttgtttacgttgcatatccatgaactttgtcctaaaggaagtaactgtatttggtgaagtctgggattatccgaaactctacttctcaatgttcaagtcaatatcatatttttcttaccagaagtctccacactcctggctgaggtcaggctataatgtagtccagctctaatttccaaaatatggagaccactgaacatctcccagctgcactcttctgtaccagctcttcacaggagagctttgcaataacatggtttcctgttacagccacacctcattttttttttttct

SEQ ID NO: 193509 - DNA, 276 bp, Homo sapiens
agcctgtccaatcccgcgcactccagaaacccagaacacgggagacattgaagccaagagtcgagtctttgggcactttggacgttctacccgggcagagtcagctgggggactccaacggccaaaggtccacctgctcctcaccgtctgctcttcactgcttcccccgcctgctcttcaccgtctcaaaagtcgccggcccctctacaggcgacaactgcagcttctccggcggaagtcactcgctttcccattcttagccccgcttcacacctt

SEQ ID NO: 193510 - DNA, 1396 bp, Homo sapiens
aagtggagctgaatccaccatcccttacgccacactgccattgcagacccaaatgggcacatggagaccagcaaccccatcccctctgtgccaacattgccaccattgtgaacacacatatgaatgccaaggcctggtgcctctctctgtgccaccactagcatgaacacatgtacagatgccaaaaactgccaccactgcaaacacacgctcagaggctggcagccctgtgcctgccagcagtgtgatatagtgccccacttctactggtgtgagtgtgagcaagaacactgaaacagcactctgatgatactgcaccccagccaacatgaatgcaccccagcacactgccactgctgctggcatgtgcaaatgaacacattccactgccaccatccctaaaagcgctttggctggcaccacctattgaaatattgtggttagtggtccaggaacacatcaacctctctggcacagctggtgtgaatgtaaattacttcagccagcatggaaagcagtttggtgatttctcaaagaacttaaaacagaattgccattcagctcagcaatcccattatttgttatctacccaaaggaatacaaatgtttctgccataaagacacatgcacgcatatgtttatcacagcactattcacagtagcaaagacatggaatcaacctaaatgcccatcaacagtagactggatgaagaaaatgtgccacatatataccatggaatactatgcagccataaaaaagaatgagatcatgtcctttgcagcaacatggatggagccagaggccattatcccaagcagagtaacacagaaacagagaaacaaatactgcatgttctcacttacaagtgggagccaaatattgagtgaagatggacacacagaaagaaacaacagacatgagttcttacctgagcgtggagggtgggaggatggtgatgatcaaataactaccaatcatgtagcatgcttcttacctgagtgacaaaatagtctgtacacaaaacacctgtgacatgcagtttaccaatataacaaacctatacatgtacccttaaaattaaaatacaggtttttaaaaaatcctcaatctaatggtctagaaactattggggaggggatttgttaaagattcctgaaatgttagcaaccaacagaccaagaacattgacactttgtaggtagttttagttcagattaatagatgcacatttgtttcacctggtaagtctgcagtcaggagctctgggagtcaatgctgtatgtttcaacaataaccggacggcaataacccggacgacaataacccggacgacaataacccggacgacaataacccggacgacaataacccggacgacaataactcggactacta

SEQ ID NO: 193511 - DNA, 319 bp, Homo sapiens
acaaaatcattataggaataaatcagttggaacagacagacgcatacgtggttagtactctatgagaaaactggggcttgaggggtagtatggaacaaagttcaacaagaaaacaggtcagaaacaccagtaccttgggatggtatcttgacctatgatgggggtgctcaggggaccagggaagggagtcctgctgatgctgctctgcttcagggtctcactcagggcctttgtgctagcagcagacatagggcaatgtctgaaaacaaatttggtcgtcacactgggagtggatgctactggtatctagtgggtggag

SEQ ID NO: 193512 - DNA, 491 bp, Homo sapiens
atttttgtatttttagtagagacagggttttaccatgttgaccaggctggtctcgaactcctgaccccaggtgatccatccgcctcagcctcccaaagtgttgggattacaggcgtgagccaccaagcctggcttatttctgtataccatattttgatgtgtaaatctaaaaaggaaagaatgagtgtgtatcatttggggaacattaatttgcaattgaatttgacaagtctataagtagctgccaaaaataagtattaaggcagttttggtttttatttgtttgtttgtttttttgagacagaatcttgctctgcccccaggctggagttcagtggcgcgatctcagctcactgcaacctccgcctcctgggtttaagcaattttcctgcctcagcctccctgagtagctgggactacaggtgcatgccaccatgcctggctaatttttgtatttttagtagagatgggatttcaccgtgttggccagg

SEQ ID NO: 193513 - DNA, 501 bp, Homo sapiens
aaaaaaaacacacatatatatatatacgcacacacacacacacgtgtgtgtgtgtttaaaaaaaaaagtctggccaaagtaaacacaaaaggtaaaaaatttctttttgacgcggtagccagatagagatctttctcagccccaaacagactgcatgtcttgcacgactgcgtctccttaagcctcaaggtccccgcttccgtagtggggttaataatagaagccagctcggggtgggaatgaggattaagcaggactaagccgctgtgagcacagtgcctggcgcaggggaaagcgcaggtcacgtagccattggggtgggggtcggggtcctgtgctgctgctaagttggggggtgggcggagggggaggggcagagctcagaagggggccgctgccccggcggatgcttggggctcctctcgggggacccctgggcgatcttccccaccgcgccgggcccaggccccctacccggccgccggcctcccctgcggccgc

SEQ ID NO: 193514 - DNA, 333 bp, Homo sapiens
cacctgggtggttggccagtttggtctgcagtgcaagcagggaattctgtccactctgagttttttaataaagtggaatatatgctatagtttccactgagttgaccttttatgaccatttttgaaaagtttgggaaatcctggcttagggcacctgtcttcacttctcagaaattctcctggtccctgaagtaataaggaaagataattaacaagtagactcttaccagttaggagagactgtacagacacagaactccacagtagcgccagagtgtcaggatttaccatcagatgttatggacacactcttgccctcagttttatctttca

SEQ ID NO: 193515 - DNA, 162 bp, Homo sapiens
accaaataaaggctggggtttggtgaatggtagtgttccaatgtcactcttttagtttcgacaacagtaccacgacagtatcagacattcgcaatctgggaagtcgagtactgggaggtctgtcgttgcctctagagggatccttctgctccctcgggggct

SEQ ID NO: 193516 - DNA, 392 bp, Homo sapiens
ttccagtctatgctaacaaagatgctaatttgaccgcattcctaagatgaatgaattcaccacgagggcccttgaagcagcaagtgtgtttcagctggcactacaacatagcatctccaggacgaaagggacttcagggtcctctagtctagtacccatttgcattaaatcccttcgatgaccttcctccaactagtcatctagtccaccattttccaggagagcttacaccatcagttcctgtggcttacaaacagcttcccaggctttgtgcaagacactggtatccagaaaattaacagcagctagctcagccttaaggcactcacattatagagaatttttagaaagtcttcacaaatctaccttcgtgttacctctccctatagctt

SEQ ID NO: 193517 - DNA, 298 bp, Homo sapiens
caccacgtgagttgagtttgtccaggacctgagctgtattgttttgtgatgtgggacaatcttctcgagcagtatcaatgcttctgagtcacaagggtcagaagagagttatttccctggggctacaactttctgagtttgcacaacttccagatgcagaattaatttcctgaggtcatctgcagcatggtgcagataggtcacttaccctgcaagcagtttggaaacctgatatctagaattgttgactattctgtgaaacttgtttctcatatcttatttctccacaatggcatgc

SEQ ID NO: 193518 - DNA, 361 bp, Homo sapiens
atggctgaggaggaagttgtagaaagagaatggaaaagcaagtaaaaaaggagatcattattaaagcaagaacttgcaagagggagaaggtttgaggtcaaaggcaagaggaaaggggtaaaaaaggaagaatgactatgttgaaggaggaaagaaaataaggatggataagaactgtaaatcaatttagagttgcaggagaagtagaataagtccagaatgataggaatctggaaggaaagatagaggatcatccagaatgaaaagaatagatgaactccaggaagaagttataaaggaaaattttcctgactgtaacaactatttcctctgtgaagtagggaaggtaatctgcaaagaa

SEQ ID NO: 193519 - DNA, 467 bp, Homo sapiens
ggaaatctagattgccaatgcaagctccagtttaagaaaaaggcccaagttaactaaccatggtttgacaaaaattacccagttcaagctgtggaattgcctgatgcaagatccaggctgcagcaggacatgtggttatatccaaggaccaacatcaccgcttataaaacagcatttcatgagatttcaagttaagggggtttagcaatccaccaactgcaaagctcaacatcaaagaaaattgaatgaaatgtctttcagttttgccattacttgcgtcttaaaatttttacaaacatacatgtgcacatatgcttacacatttgtatacattttaccaaatgcacactcatattattagaattagaaacaggttttaagatggtgaccagattaatttattgatttgaaatgtatcagctgagtacatattgctactatacattgttcttggtgctacagatttc

SEQ ID NO: 193520 - DNA, 491 bp, Homo sapiens
gtctttaaaggctcattgttgacaatcacttccctagatccaaaacttttcatgagagctgtggacttcagggcctgccttgttttctgcactatttcaaaatcaaagaactgtatttatttatttatttttatttatagagacgagatctcactatgttgcccaggctggtctggaactcctggtctcaagtgatccttccgccttggcctccaaaaatgcagggattacaggtgtgagccaccacgcccggatggattttcttttattggtctgtcttgggataatgtattttcatattacaacgtgctttaattttcctgggctttaaatttcctggaaccaaaacatagtttcagtctcttttacttttgtctttacatttgtaaacggttaacgggatttaatattagcatcctaatcgtaacgtgcatattggttggatagtatactatattactgaatggggtgatgctcaaagatcttggggg

SEQ ID NO: 193521 - DNA, 333 bp, Homo sapiens
agaagctgtattaaatctgtaacatctctttctaccctgagatcctacacatctattccaaggtgcctgctgtccctcttttccccctttagtcttctatttccaggtgtccctgctaacccttgggcttgcttgaaagccaaaaaataataataaatctttgaaatatattctacatgatcatctaaaaatgactacccccgttgaaattactttttcttaagacttaagaagttactttggtctctatgaagtctattttaggcaagtttctttatttgggacacgttcattcaacaaataatgatagaatggctcctatgctttcaacac

SEQ ID NO: 193522 - DNA, 301 bp, Homo sapiens
tgtctcatacaaagaattttcctgccacaaacagctgacaccaaatgctgattaagaaaataacagtccaccatggaagaattcaagcagagcagcgttgtgtattgggatggagtccggagagtattttcccaacattttcagctgtgttgttttattcagaaaatatttatgaaatattgtgtgtgatctgattagaaagtaacattttttaaaagtcaaaaagctggacacagcagctcatgcctgtaatccaaaccccttgggaggagaaggtaggaggactgcttgaggcaaggag

SEQ ID NO: 193523 - DNA, 246 bp, Homo sapiens
atgtcctcattgttgagaaagcatccctaagtatatctttgtgattaagaacgaataggtaaaaccactcaggatgaggacctgcttgttgttgacttgagccagttgatccttaaggagcaaagaagtcctcaaagatgaggagagataagttccagaaatacttttttccatgatgaaaagtagagacaagaaaagaggaacagagcaagacctaattttaaacttctggaggacagagattct

SEQ ID NO: 193524 - DNA, 531 bp, Homo sapiens
tctgtaagctccataccagggagatgacaatatatggtgttcacatagtaccagggagatgacaacatatggcgcgcacgtacaccacttccttcttccttacccaaggcagacatttctaatcgatcggggctccttcctggtggtgcaggtccagcctcaccatcctcaatgcacagcttcagtatctgccgatagtcggcgctgcccctagaggtgaaacctatcagccttgaagccctcaccttgctgccttaagacaaaaatgcttgctttgaaattcccacagagaatagcagaaatgactgagggaggactcagtcacttacaagagtaacttggttggtgcatccctctgtgtgggaggtggattgtatgcttcatggtcttagacattctgtcaccagccaatgagaggggttacccagggccacctctatctgttctctataccaccttgtctgctcatcaaaattacaactgaaaagcagaaggggaaatcccagactcggaaatgacagcccgagagca

SEQ ID NO: 193525 - DNA, 473 bp, Homo sapiens
gaataaaaccaaaaacgacaataatacatggggctgggggaaggaaatgtcctccagggacagctgagagctaaggtctggggaaatgcaagaagtgatcagagacagaatgattataattcttcaaaaagaatgttgcagactattggaataaaggcagaagaggttaaatggatgtcaagaccactacctttaggcacagaacattctactaagatttccatttttatgtaaggttaattttaatccctaggatttcaaaattctctctttcaggatcctgctcaccctatcttcactattgcatacctgaaacttcaaatcacctctctctataaaaatttaagggtggagaccacagtcattgcttcaaaggcatcaaagtagaacatatctagaagctaactgcatttcaaccaaaatattgatgaaaatttattacaaactagtctctctccagacccctgctttta

SEQ ID NO: 193526 - DNA, 393 bp, Homo sapiens
ctagtatggaactcaaagtctcccaaaacctgttttgtctcctaatatattattcatattacattgtcttacccatcagtaatttttatcagactgaagacatgccttgcctttcttaccctttactattcccttaattttaaatacatttcctgtattttaaaacaaatgctattctttaccatttaggtcaaggtcacccattcattaaacatatcaggcccttaacatgtgctagggaaagttccagatcctggaggcacaataatggaaaacacatgctgttaccctcaaagtgtcccagggtccagtgtgaagcctttcctaattacttctgttgaaagcagatttcttttcggctgggtgcagtggctcatgcctgtaatcccagca

SEQ ID NO: 193527 - DNA, 510 bp, Homo sapiens
ccttttacacaaacttccagaacacagggaaggtgttcctcagctcactggcaaggctgccacccccacccccacccccaaccacctaacaggacaaggacagcacaggaaaagaaggttgcagccagtctcatgggaccctcaacagaacatcggcagcttgattccgcagtgggtggacagacctatgtgctggggcaggtggagcttagcccagatacacgaggatgcttcatccttaggggatcctcagcagaacatcagcagcttgatcccacagtgggtggacaggcctatgcactggggcaggtggagcttagcccagatacacgaggatgctgcatccttaggaagtctctcagttagtacacagacttcaaagccgaccagagtctctcagttaaagtacacagacttcaaagctggatatgagtcctgcctccaccttttccaagctgggtgaccttggacgcatgtctgggactctcagagccttggcttcctcagctg

SEQ ID NO: 193528 - DNA, 412 bp, Homo sapiens
tttagtactgaaatcccacatcctgggaaacctatgcggttggccaccttacgggattgcacacttcacagatgtggaattgtgcagtcacacgtgcccctctctcagaatcgccctgtgcttggcttaatgctctgctattgccatcttcaattcttagtaatttttcaacaaggggtcctacgtttttttgcattgggtcttgcaaagcatggagcccatcctgatgacttgtcaccctatattctggacctgacaactgttttgctctgtaagttggctttctgtctcctgccaggtggagcccactgtctggagggacccttacagtctggttccatcttccctgttcatattctttcccaccatagccacctgagaccatctagttttctggcctctggtctctggg

SEQ ID NO: 193529 - DNA, 410 bp, Homo sapiens
agccgagcaatacatcaactcatgacacgggagcctaaatcccctcttttggtggtctctcgtctgtaggtactgcaaagggtggataacaagataatgagccatttttcctgtgttcagggtacatttgggtctcaaaacagtcggctctggaacagcctaaattccaggcagcacctggaaggggagggaaaccccactagggtgtgcttttctgtttgctttttagggtgtacacagaacagaaaaggtcttatgacattgactttcccttctcctcatttcacagatgaggagtcaaggagtcggagtctaggtgctgggcagggatgaagaccttttagggacccctggtggatccgtgttagaggccagatcagagctcagttccctcctgattgctcagcgct

SEQ ID NO: 193530 - DNA, 178 bp, Homo sapiens
atgtatccagagtgatctatacacagaacactttcactcttaccctttatggaagagactgctaattgcttactggtacccaccttccccttcttacttttactaatggaagtcactgaatggtagctgggcacccatgcctacctttcttagtctcccttgcagctaggtaaggaca

SEQ ID NO: 193531 - DNA, 569 bp, Homo sapiens
cggcattgagtgggtggtggtggggagacaaaaagctccttgatgtggccagcacgtagaacaaaagaggggatagttcacagagaggagttaagtagcattcagatgatgcagactttatctataaagaataaagaaccactaaagggttttaagctgaaaagcagagttcaatttacattttagagaataccctctagtagccatgtgaagaactgatttcagggcagtggtctgagaataagatggtggggaccaagagctatgtagcgtgaatgaaaaagtgaaggaagttttaagaatcacggtggaaaccatcataatgccaggatgaaggtcaataaaaacttttacacttgatcatgacaaaagaatgctattcactatagtttacactccttaatgacagactcaagtagacgaccttactgacatcttagcctgacagttcctaaatacaaataaatttcagtgtactgtatgtagactaacacagtaaagttatcactaagaactgccgcatattccaaagctcaaaatctgaaatccttcttgctactccggtacat

SEQ ID NO: 193532 - DNA, 422 bp, Homo sapiens
ctacatcggagtccctaaatttggtattgagcgcccctacacagatgcagcacctggagtgattagtgcccaagtaagatttagccatttaaggttcagaatgtcctctctttatagaatcaggtgaattaataaccaattgactctatgattttagtcatattggctaatgctatatggacaggtctatcataggaaggcaagggagttgacaactactttaagaaatatttacaaaccattctacagtttcttcatagggcatatgggagcctgatgcttcttaccagaaataggtgaataaaataggactcagatagatgttcatataggtttttagaaaagaaatagtctttgcccagagagcagaaaagattacaaataaattaagactacagataaagccctttttaggattatgc

SEQ ID NO: 193533 - DNA, 208 bp, Homo sapiens
cctccctccttccagcccctggcagccacctcagcgcctttcggttgctataattttgtctagcgtaggcacctcacggtctagtggaatcatatggtacttgtctttttgtgactagcttattttacttagcataatgtcctcaaggttcatccacactggaacatgtcagaatgtccttcctttttaaggctgaataatattccat

SEQ ID NO: 193534 - DNA, 168 bp, Homo sapiens
catgtcctgaaacatgcctttagagaatctttggcttgaaaaagatctcttggctgggtgagatggctcacacctgtaatgccaacactttgggggctgaggcaggaggatcactttggcccaggagtttaatccgagcctgggcaacatagtgagaccctgtcacta

SEQ ID NO: 193535 - DNA, 277 bp, Homo sapiens
agtagagatggggtttcaccgtgttagccaggatggtctcgatctcctgacatcctgatccgccagcctcagcctcccaaagtgctgggattccaggcgtgagccactgcgcccagtcgatatatttataagtggtattggttagttaatgtgaatagtttttaacaacttcacatacagtcattgtttcttcttgaaattacttctacactaatttaggcaagatagcaggcatccttgtcgacgcggccgcgaatttagtagtagtaggcgccgc

SEQ ID NO: 193536 - DNA, 592 bp, Homo sapiens
caacagctcgtgaatcgcgccgccctggcaggtctccgggggtggaatctggatatctcatagtccgaatcatggctggaatgttctcatagtctgaagtgtcaacgtgttgactttcaggatgaagagaaggggccaatagagagggaagagaggacagttgatgaggcaggctccaagagaggagggcaaagcgagatcaggggctccagtgaaatgcctgagtgtgatgagaagagcgctgtcttgtgaggctagagagggaaccaaggatgggtgggcctgggaaggctggagaggtagcctgtcagggagctgctaacccacttagaaatactcttattgacataacaaggttttttgttttggttttttgtttgtttgttttgagagagcgttcgctcgttccccaagctgaaatgcaatggtgcagtctcagctcactgaaacctccacctcctgggttcaagcgattctcctgcctcagcctcccgagttgctgggattacaggtgcatgccacgggtgcagtggctcacgcctgtaatcccagcactttgggaggtcggggcgggcggatcatttgaggtcag

SEQ ID NO: 193537 - DNA, 393 bp, Homo sapiens
gtagacgtggtgactccacgcttcgacatttcatgaaccactgaaaaataaaaaactgggagggaactccaaatagcgatttggccacatatagacgtttgcacaaacatcaaaatcaacacatcacaaaagaaagaacctttaccaagaaaaaaaatgcaacgaacagcatctcacaatgaaggtttatctcttaaactgaattaattaagtttctgaggtgttcattgcaatggccctattatccttactcactgacgatggggatgctgggagaattaagtgagaagagtatcaacagagagacaacaaaaatatgcaggaagtagtagtgccaaggaatgtgtgagcctcagagaacaagactagacggtcacttcgttccacacaata

SEQ ID NO: 193538 - DNA, 525 bp, Homo sapiens
tatctgaatcagagtaggaggctcctatctgaatccagatagcacgtcctcattgctccatgaatggcaaataataccttcaccattatctaactacttttagatctttattcaaacaactcaaccttcctggaaacaccctacactcatgtctattacttttcttcaagatccgggaagcttttccgggctgacttcaatccctactcttcaaaatgctctgtaggtattctcctaacaatttaaaaagtttctccagcctgggcaacaagagcaaaactctgtcttaaaaaacaaaagaatattggaaataaggaggagtgaagagtgaaaattttaatctctgtcctgctctctgggagagagagtgctctaattttagacaactagacattatttttagacagaaccattgctacagaagggcagtttgccataatttgatagaactgttgcctaagaatgttcaactttcatttgttccaattctctgcttatcaagcaactttctgatctctaatctgg

SEQ ID NO: 193539 - DNA, 166 bp, Homo sapiens
caaaagaccaataatcaactggaaaaataggcaaaaaccaggaacagacaattcataattaggaaacttgaaaagtccaataatctggaaaagatctcaacttgggtaataagcaggaaaatgcaaatccaaacaacaataaaataccaaacttggccgggcacag

SEQ ID NO: 193540 - DNA, 496 bp, Homo sapiens
tttatagctttctaaaaataactgctggtaagctcgtaagttcattagttaatcccaatgggactcaataacgcatattacagatctcctgattgttatatattagattttctcaagaattcccttacctgttattatcaacatagctatattgacagggtcttcattacttcctaattgcccatactcctttttcttgttaaagatcaatttttaaaatcaagccttgtcattttggaaatatcatagacatattatcctgttaatattaatgtgtttcatatctttctagtttcctgcctcctttatcatagtaatttacaaagtttattcattacctttttctttaaaaatgtattattttgtggggggcagggtgagagggtaggggcacatgtttgggttttttctccctggaacaaagatataaaagatgatctttcatattcaaaggtgaacaattgatattccctattctaagccagaccctaggaag

SEQ ID NO: 193541 - DNA, 815 bp, Homo sapiens
tgccatcaccctaaattattatgctgaagctctaatactcaatgtgatggtattagaaggtgagcctttgagaggtaattaggtcatgagggtggatcccttgtgaacaggaatagtgctcttataagaagaaacatcacagaaatgacttctcactgccatgtgaggacaaagcaagaaggcacctgtctgtgaaccaggaaaaagaccccaaacaggaaccaaatcacctgacaccttgatcttggacttctggcctccagaactgtgagaaataatgtttgttgtttaagccaccctatctaggatattttgttgcagtagctcaaagagactaagatgttatgcttgttagtagtactctaaggcaggcagaaccccaaattatgagttgctgctgaattgataccaggttctgtagcagttgaagaactagttatcaaaaagtgagaaggtaactgagagtactattatctacgcatctctaaaaaacatatataataaattgttaagtccatgttttttctggattcattataaagctttaactttgcaacagaataacattaaatactccctataaaatttgtgaaattctcctctccatgtaaactcagacaattcaagccatggcagatttgttattattttaaaataacttagggtgcgttcatcttcacagcatatgtggacaacagtgttccataaaatgcagtacttgaaaaagaaacacatattcttggaaatactctatcacactgtgccagcaatgccatctatcatatgcatccataataaatttagggttgatgagc

SEQ ID NO: 193542 - DNA, 555 bp, Homo sapiens
tacgatcgaggcggtaccgactgcatctgtgcctcactgcaacctctgcctcctggttcaagcaattcttctgcctcagcctcccaagcagcaggtgcacactgccatgcccggctaattttttgaatttttaatagagacgaggtttcaccatgttggccaggctgggctcaaactcctggactcaagatccacccaccacggcctcccagagtgctgggattacaggtgtaagccaagatcataccactgcactccaccctgggtggcagagtgagaccacatctccaaaaaaattaaattaaaatttttttaaaagagttgaaagggccaagcagggtggctcatgtatcctataattccagcactttgggaggccaaggtaggtggatcacttaaggccaggagttcgagaccagcctggccaacatggtaaaaccccatctctactaaaaatacaaaaattagccggccgtagtgacaggcgcctgtaatcccagctacttgagaggttgaggcccgagaatggcttgaaaccaggaggcagaggttgca

SEQ ID NO: 193543 - DNA, 334 bp, Homo sapiens
tcctagaggtatcccccgtcccttccaccagcataaataagaggcctaatgataataatggctaatagttaagcacttaaaatgtgtcaggtactgttctaaattctgtacatttgataatccataaaatctccataacagcactatgaggaagatactgttactttaaattttgcatcagagcacagagaataggaaacctgttgaagattccatgcctgttaaatggtagagccaggtttcaatcaggtcacctaactgcacagctccctctcaaaaccactctactttctgcctcaaatttcaagaccgagatttccagatgcctttcagt

SEQ ID NO: 193544 - DNA, 342 bp, Homo sapiens
taataccaatccttcaaaaaatagaagaggaaacatttcctaacccatcctaggagtccattattggccctggtaccaacaccagacaaaggtatctcatccacatatataaaccaacaaaacacagaatggatatataccaatatccattatgactattaatgtaaaaatactcaacaaagtatcagcaaatgaatgcagtgacatttaaaaaggattatacatcatgaccaagtaagatttatcccagatattttagatgggttcaaaataagaaaatcaatcaatgaagtagtatatattaattaaataaaaaacaaagatcacataatcatctcaaca

SEQ ID NO: 193545 - DNA, 265 bp, Homo sapiens
tgcagtatttgtccttcttcacttagcgtaatatccatcacttagcaacaaggttcatccatgttgtaacttacgacgagatttctgttttaaggctaatattccactgtatgtatacaccatatttgctttgttttttcatttaagatggattttaggttgttactaccttttggttattgtgattaatgctgcagtgaacaagggggtggtgcaagcatttctacaagattctgatttcagttttttttgatgaatatccaga

SEQ ID NO: 193546 - DNA, 451 bp, Homo sapiens
gccaccgagcccggccaagaatcagtattcttaatgctttccaaggagggtaaacagtggaacaccgaggtcatgattgagagatcggctgtgcctaaatcctgccactcactctggacgtagtaaaggtctgagagattgccggtgaatttggagatatgaacaagagtccttcactcaaagaacaaaggagacatcccgggaagtcacaaaaccaagtctaggttcaggtagagacttttaaaacagtgcagatccccagaccttaccttttttgatcctggtgagtgagtgttggtggggcctgggatttgtctgggaggctgcccaggtgcttggggtcacactgtctcaagacccacctgtgctggtgcagcatctcggaactgaactggacgccccacttggcacagacaggaataatcttgcagatgctcagtcgaacggactt

SEQ ID NO: 193547 - DNA, 276 bp, Homo sapiens
gtcactgaacttggaaggcaaaaacttggattcatgtcccagcatggccctcaactatgcaacagccgaaaaattgtttactaactctaggtcctaactttaaagtgtagtccttcaatgatgtgattcctactgtctcttccagctctaaagtaaagatgctaagaaataaagatgataatgctaccattatctggcatgcaactgacggccacgggacaggcgacttattgatgtacatcaaatcctaaacctgtaattttgttcagcagtgtc

SEQ ID NO: 193548 - DNA, 519 bp, Homo sapiens
ttcaagttgactgttcagtgaaggatggaagttatgaaacaaggtgtgtgcatgccgcccttcatattaaaagaaaaatccacgcacatggatgtttgtatgtaggatctcttagaggtggctgttactagactggggacgagggacaagcaagaagaggagttactctagttactctatattgtatccttttgtaattttgaatttgtgtcataattttgtattatgtgcatgtacagcctgatcaaaataatcagcatgttgctaaacagacgccatctctagaagggtttacagtctttacagcgggtcagcatgttgctaaacagacaccatctctagaagggtttacagtctgtacagccgggaacacatggaaatggtgtgggcaccgtaaacatccggaaggcgttttgacctgcagaagtgacgtttagcctcaatagtcagagcattcgttctcagtcatgtcacttaaaatccagcgggggctgggcgggaggccaaggcgggtggaac

SEQ ID NO: 193549 - DNA, 711 bp, Homo sapiens
ttatcccaggtatgcaagtctgattcaacattcaaagttcaattaataaaatccatcactcaacagactaagaaagaaaaaacagatgattacattaatagatgaaaatattggggtttttgttggatttaacaaaataatagcaacaatgcgttcagttaacagtgcttacatatatgcttatgtataagaaatgagtaacagcaatgataacaagggatggaaaagaaaagttagggttattttgtcatataggatacttgcactatctgcaaagtgctatagtgttattacaaaatggacttcatgattcatttcattcatttatgataaaaactctcagcaaactaggaatagagggtaacttccttagcttaacaaatattttctacaaaaacctacagctaacatcgcacttaatagtgagaaaccagaagctttcccaccaaaagcaggaagaacgcagtgatgccacttctcaccactgtttttcagcatcatactggaagtcctagccagtgcaataagacaagaaaagaaaataagaggtatactgattgagaaggaaaaagtaaaacaaataatgtcatctatgatcatgtctttgttcacagatgacatgactatctatgtataaaatccaaaaaaaaaaagactaaaaatcctcctggaataaatcatagcaagattgcaagatataggattaatata

SEQ ID NO: 193550 - DNA, 545 bp, Homo sapiens
tcagtgtgttttgcccaactgaaactcctttccactttgtaacctatttgaagcccatctttatttcattattttttaaacacagcacagggagaatcaaaatgagtttccaaagaggaatgacaaatgacagcacatatcataaccaggtattttctgatattttttcatccatgcctcttctcaacaccaacagttactaaatgtccacacctcagaactcctgataagtaacagcaataagccgcattggagcagagtaaagccaaaatcttcacggtggtcttcaagagcctcattgtcaagattcccccatccctagactaacgcctgccattcttccctctccttccactactccctggctccctgggagccctcttcccctagatagctgtattgtgacctccctcaacaacttcatctgtttgctcagtcactttctcaaggaagcctaccctgcccaccttatataaaatcgcaaaaccctttgccctggaattcctgaacccctttatttgctctactttttaaaattgcatttg

SEQ ID NO: 193551 - DNA, 1068 bp, Homo sapiens
gccgagatcgtacaactgaactccagcctggggtgacagagcgagactccgtctcaggaaaaaaaaaacaaaaaacaaaaaacgttggaacattgtgtagagatgagcactggataggggtttggaaacctggattctggtcttggttctagtgctaacaagccatgttatactgggcaagtcccttctccctgtctgtgaaaaacaaaggaactgtgttcctgaaattctctgcattgtatgatcttctacaacaaaaatgcaagctttgctaaagcagtgttgtacgccttgtctggggctgagtcctagaatggttcctggtaccttgcagatgactcaggaaatatttattgctattgaacagcttatggtgtgcactggccacagaaaaggctctgttgcatgtataaagctgtagttatttttcaaaaggctttcagttagcaggcactcaacactcacgggtctgaaatattccatttgttctcaaggggaacacaccttacttgctcatacagaaatatgggcatggaggagcctagtggacgggggaagaagacaggcttaggagtcagaaaatctggctcaccactaatgactgtgtggctttgggtaagtcattctgttctccaaagttccgtgctctcatctgcaaggtgagagagctgactcagaccccgggacccttctagaggcacacctctgactctggtcctcttattcttgtaatagataacaaacgaatattaagcgcagatgaaagcattcagaagaatgtggggctgatgaggaacaaaggcaagaaaattagcacagaggcaccagctcattagaaacatcaagacaggcagactatgctttttatgttcaccacataaaatcctttatgagcatctgctggggtgtctcttcctttgctgttactggctcagcaaagcaggtcatgccctcagccatgtctgctgcccaagtagctgtcacagggaggtagcaccaggagagaaagcctgccagcttgcaagtccatggcaatgtccgtgttctttaaaccgcccaattgtggtg

SEQ ID NO: 193552 - DNA, 559 bp, Homo sapiens
agctggcatcaggaaaggagagtctaactcccaagcacttactagactcacagtctctctccgttttgttttgttttattttttgagccagggactcagtctgtcacccaggctggagtttggtagtgcaatctcaaactcccgggctcaagcaatctccctgccttgccctcccaaagtgttgggattacaggcatgagctaccatgcctgccccctctctcagtttaacgagagagtggctacttgcttctcgaatagaaaggaatgtcaggactgggcatagtggctcacacctgtaatcctagcattttgggagactgaggtgagttgattgctcgagctcaggagtttgagaccagcctgggcaagatggtgaaactctgtctctacaaaaaatacaaaaattagtcaggtgtggtgtgcctatagtcccagctacttggggggctgaggcaggagaatcatttgagcccaggaggttaaggctgcagtaagccgtggtcctgccactgtactccagccagggcaataaaatgagaccctgtctcgaaaaaaaa

SEQ ID NO: 193553 - DNA, 335 bp, Homo sapiens
gaaagaaaggggcggagaaagactgatacagatagaaaggctgggagcattctggattacaggagactaaagaatactgacagttgaatgcaatatgccatcctgcactgaatcctgcactgggggaaaacagttgcacagaacatttgtggaactacttgggggaaatttgaatatggattgtatattaaataattttattgcatcagtgactcatttcttggggttgataatggccttgtatgttatgtaggagagtatccttcttcttgggagatttatgtacaaatatttaggggtgaagtgtcataatgcaaattactttcaactgtttc

SEQ ID NO: 193554 - DNA, 215 bp, Homo sapiens
aagtgtaggtaattatactttaaagagaacttgctttgtacattttaatttttataaagaaatgagcagttatctccctgacaccttattaaatgtataattaaccttatgatccctagctcacttgtgaatgcttggcagtataattggagaggaataatgtttctttttttcctctttctttgcagtcctaaaccttattctgtggttgttga

SEQ ID NO: 193555 - DNA, 369 bp, Homo sapiens
aagtcctccaaggcagccaagacttgaggggccacgattccaaagaaaaaggaaatgacagcatgttccacttctgaagctgcctgtgcatgagaggaaaggctatggggactaagcagaaagcagctgctcagaagctaagaagctcagtaatgaattcaagagtctcatagtattggggaatgaaaaaatggagttcagagacaaggaggggaggtttctacaaaacacaataggctttcactggagtcctgggtcccctcaacaaatttccactttgtctcaagagagagaaaactataaatagattggttaaccttcacatggcctgaaacccatttccttcccttcctccctccctccctcctt

SEQ ID NO: 193556 - DNA, 445 bp, Homo sapiens
tcacaaggaagaaacacatacaaattatttacaaagaggaaagttcattttaaggatgcacatgggctaaaaatgaaatgacctcactattggcacaggtcctaagattacattctctgagaatacacaatgaagaaatgggcttcatgtgtaatagcgacaataattaacacgcgtactgagcagttaattcctttcaggcaccctgctaagtgcatcctaaccactaagccttttgatcctgatgaaacatgctctgagatggatcttgctcatgattggaatggtgtaaaattgttgtataaaatgggaattgtatatggtgaagaaactcaggcttgaggcggttaaggaggtcttccaaagttatttcgagagaggatggcagagccaggatcccagggacagacagccactgagtcagctgtggcagctcgagggatgt

SEQ ID NO: 193557 - DNA, 323 bp, Homo sapiens
gctctggtttcagatgccagcagcctccccggccgacctagtgtctcttttcaaggtctgcccaggatgctgcttcccggcatgcaccttgtttccatgttgtcatcctcccatggcttcccctgccctcactcccctctggctggggaagtgtttcccaatcctttgaccattcctccccaaaagcattttaaagaggcggttgcaggactctgagctggaaattgaatttgagtttaaactccacgttaagctgtcagcatacacaaacacccaaattatgccatgatctcaaataaaaggaacattttttttccctcttt

SEQ ID NO: 193558 - DNA, 602 bp, Homo sapiens
  misc_feature (456)..(457): n is a, c, g, or t
  misc_feature (490)..(490): n is a, c, g, or t
ctggcccatcaaggagtccctgaaggccatgattgcctgggaatggacgatagagaaggccagggagggtgaggaggagaagacggaaaagaaaaaaacgcggaagatatcacaaagtgcccagacctatgatcctcgagaaggctacaaccctcagccccccgaccttagcgctgttaccctgtcccgggagctgcaggccatggcagaacaactggcagaaaattaccacaacacgtggggacggaagaagaagcaggagctggaagccaaaggcggtgggacccaccccctgctggtcccctacgacacgctcacggccaaggagaaggcacgagatcgagagaaggcccaggagctactgaaattcctgcagatgaatggctacgcggttacaagaggccttaaggacatggaactggactcgtcttccattgaaaagcggtttgcctttgnnttcctgcagcagctgctgcgctggatggacatntctcaggagttcattgcccacctggaggctgtggtcagcagtggcgagtcgcaaagtccccacatgaacaggagattaaattctttgccaagatcctgctccctttgatcgc

SEQ ID NO: 193559 - DNA, 309 bp, Homo sapiens
ctttattagaacttttcctgatatattacagaagtataaaacagttatgttctagtgtctaactccatttcagaactgtaaactgcacaagtacgttggctaaaatcacagttttaatttgttgctcatgctgtctagctgtcacaagatatcataagtcaatctgaaatcatctacattgatgatgattttgttaactttacaaacatctttacactatcaactatgtgtcagaatagttagctaactgtatggagctcacactctagcaatgacagaaagcccttaatgttctaaatgttcctctag

SEQ ID NO: 193560 - DNA, 470 bp, Homo sapiens
ctcagcctcctgagtagctagggctacacatgtgcactaccatacctggctaatttttttatttttgtagaaatgggatctctccatgttgcccaggctgatctcgaactcctgggctcaagcgattctctcgtgtctgcctcccaaattgctgggattacagacgtgaaccactgtgcccaattttcctgcttcttcctaatctcttttcctccctctgaggatgaggataattcccaaagatgctaacaaagctgtgaatgtggaggaaccagaattttgctctgcgtctagggcaacgttttatttggttgttagaaacacctaattaatatacacaattttacttcacgtgcctgttgtttcttgaaaggcgaggggttcctctttgagtatcatgcaatcccatctttatcaaatgttatttgagaaaactgccactgaaaaatcaataaaacagttattggaaa

SEQ ID NO: 193561 - DNA, 968 bp, Homo sapiens
cacagatgcctatccttgggacatacactgcttgattgctctcctggctagagataaccagaagctaaaccttgttaaaataaatgacctaagtaagacaactttctcctccaggaccttgccctttagttatctcttctttctgtatcatccatatcattagtctctgctggctttccactcaggctacaaacccactcaaccctttaaaatgaaacagacagaggagagagagattgtcccgtgtctagctaatgccccttctctcctttccctgtcttaaaagagtgttctgactacccagggaccacttgtttacttccatttactccttaacattggcagcccgatctcttccaccattccagtgaatcctctctgcagaatatctccagtgacctgcacattgccagttttccaatccatatcttcctaagtctctgtgccatttaaaatttttgactactcgacgctcccagatactcattactcccttgtgcgggatccttctcaactaactcctgtatctacacctaaatataactttttaggattatctctgtttttcttgtggagacagggtctcggtatgttgcccgggctcttcacgaacttctggcctcaagcgatcctcctgcctcagcctcccaaagcactgggattgtaggcgtgagccaccatactggccgatgttttaggattctcattctgggcaattgcgcttctttctactgacttttcttttgtcatttcatttattatcacggctgcagctcccacactcacctttatgctactgcgtgagctccctcaccataatcctgtccttactgcttctctgactgctgggacgtaacaggaggccctcagcctcaagataatttttttcttctgatatcagctcttcctcctgcattccctccctcaggtagtgcatcatacactgaaatagaaaacctagtcataat

SEQ ID NO: 193562 - DNA, 416 bp, Homo sapiens
tgatctgaggatccccagactaacccactctgctatgaagaatatggcgaaaggtccggctgcatattctacgttaaagcctgatacaagttctgactctccttctgtaaggtcgaacggggctcggttggtttctgctagggttgagataaatcatattatggctaggggtcaggatgtaaagattattcaaatgtgctcttgtggtgtgtccgggtaatgtgtgatgtgctttgttgtgcatgtgtagtacacaaatgtgatgtgtatttaggcttgtatggagtgtgtgatgtgtgtggtgtgtgtatgtgctgatgggatactgtctggcatgtaagcacacgcatgtgtggcgtggggtataatgtgacatgtgtgcacgtgtgtggtgtgtggttgtgggatatcgtgtg

SEQ ID NO: 193563 - DNA, 456 bp, Homo sapiens
tgcgccgcccgccggttcaaagttgattctccatgtcataatgaaatcaaacacttgccaggaagtcaacaggagagagaaaggagttataaaacacaggcatgcgactccttctgtagctgctgtttttaaagaaagatgcgagaagaaaagaactgtaatgaatggcgcagtgacgctgacatgttgtagaatgtgctgggatggagatttttctttgcaagcatcactgagcatccaagaagctaagaaacagtagatgtagagagtctttgaagaaccacatgccctaaatatcgtacttgatgacatgtcttctgggttcaaatccctatatatattgtccttctgagtgacgctccaggtacaatcgaatttttctgggcaagtatctttgcttacatgtgtaaaggtataaaaactaccatttgggcggggcacggtggctcatgattg

SEQ ID NO: 193564 - DNA, 319 bp, Homo sapiens
ttttctttatggtgataaattcctggaaatcttggtaaaccccagctttatttttctgtaacagaatgcacataaaataggtaaagcacatacaggaggtaaagttacgctcattttgaaagcaaaggaatgtcaagggtcttaatggctgagattaagattttgaatatgtggaaataataatagattgaaaatgcagttgaccaccagtttatggaaaggaaaatacatattttggtggttctgtttagggttagagtctgggaagataaatatatactcaaaactaattgttttgtaacaaaaggcaaagggcagt

SEQ ID NO: 193565 - DNA, 318 bp, Homo sapiens
gccaaggtttgattgctccataattaaccgcagtgcaaataatatctgcatctataacttccagcgatgagatcagaagccaattgaatttggcactgattgaagctgtaaatatcccgtggtgaaaaatgataggtttgttctagagggaaaacttacagaaatggacatctagcaaatgtgatcgggggaaagaaaagggcaccagaggaaacggcaggaaggaagccttacctttcatgctgcctttttccaacattaaaacaactcttttttcacattccttttggattagtgactaggcgtgctatatttcct

SEQ ID NO: 193566 - DNA, 322 bp, Homo sapiens
ctggatgcaaggtcggcccacctggttccttcctgctctgtgtgagcagctcaggccctcactgagagtctgtttccccctgtaacatgcgggttcccgccttgcccaccacccagggtgcactggggcagggagggtggcacagctctcctgctggacctgcagcccatcttccgggtgtctgacctcacctgcactggcgccacctcctccaggtagccctccactcccaccacacccgggccctgtctgagctgctccaaccctgtccctgtaggaggcattgtggcccgtggtgggcaaacatggggcttgtggctca

SEQ ID NO: 193567 - DNA, 222 bp, Homo sapiens
taactaacgtatcttccattctttctcaaagacattgcataactcgatccatctctctcagtcttcccccgtccgcccctctcgccacctaataagctactgtgatcatgctccgtggatggcagaatgagctcacccctccacctcgcccagggacctctggaagaccccccagggtcatgtaccccttcctcctggctgtcctgccatgacttattattt

SEQ ID NO: 193568 - DNA, 286 bp, Homo sapiens
accttcagacacatacataccccaaaagaaaaacaacaaaaattatcaccaagtccagatggtgttactggtgaatggtatcaaacattgaaagaagaaataatgctaatcttataagactctcaggaaactgagtttattttataaagccagaataatgagtatacccaaacttagaaagacattacagaataagacaatgataaatcaatatctctcatgaatacagacacaaaaatatgcttaagaaagtattagcaaatcaaacctagcaatatgtaaaaaa

SEQ ID NO: 193569 - DNA, 474 bp, Homo sapiens
gagatggagtttcactcttgttgcctaggctggagtgcaatggtgtgatctccaactcctgggttcaagcagttctcctgcctcagcctcctgagtagctgggattacaggcatgcgccaccacacccggctaattttgtattttgagtagagacagggtttctctatgttggtcaggctggtctccaactcccgacctcaggtgatccgcctgcctcggcctcccaaaatgctgggattacgggcatgagccaccgcgctcggctggatgaatataatttttattgatacaatttacatggatgagtgaccattttaaatcgtacaattcaataatttttagaatactcacaaggttgtacaaccatcaccattatctaatttctagagcattttcattacctaataaagaaccacatacccagtagcagtcttttcctagtttcccctctccccagaccctagcaaatgcag

SEQ ID NO: 193570 - DNA, 144 bp, Homo sapiens
tcttgaacaccatcaagtctagacttggtggcttcatatttctatcataatccctgggggtaagaaatcatatagtcccaggttgggaaggggaaaacggtttgcaacattctcctccttgtaggaggtgagctctgtctcact

SEQ ID NO: 193571 - DNA, 230 bp, Homo sapiens
gctatcgcccaacactttaaatatctcaagagcataccacattttaaacacattatggtcatgtagctatttcaactattcctgggagtgttggggataaatcactcgcccaacacccccctcaccctcagctctaagaaactattactgcattttctgtctcgacaggtttgtctattcttaatgttttgaataaatgggctcataccatatttgatcttttgtgttgg

SEQ ID NO: 193572 - DNA, 258 bp, Homo sapiens
agcaacttaactcttacctctctgagcctgttttcttatttacagaatggggctgaaaatatcagtctccagcatctttttgagaacttaatgagatgacatatataaagcctctattatcctgtctcagataaataaatgttagcaatgttagttcttttcttcctctttcttctttcccataattctctacccaactgcactttcttcaacttttgacaatagggtctgatacaaaaagagtaaaaaaaaaaaaaa

SEQ ID NO: 193573 - DNA, 673 bp, Homo sapiens
atatatgcttaccattatttagctcaatctatttatcacttcaaggatttttaaaaatagtttataagaactgtacctatactttattatggccaatgctcaaaaaattattgagttggcagcaatgccaccaggtcactggaatgcagaggaaggcatctgtttgacatggtgctgactattggcaaaaaagggcttctgaacatatcgatcagccaaaggggtagcctgttgcttaaagggcagttacagctgcttatggatgagtctactgttacaaaaccagcaaacaaagggaaaaactggttcagagaagctgcttcaggaatatacagcttgcacaagttctctccacaagccaccagttagttggaaatatgatgggtacccatcctaataacatagcaagttcccctccaatgatgtggctggcaggctcatgccggccggacggcgggcagcctgctatccatactcaaaaaggtgattctctctagtagactttaagaaagggtcagactactgttttctcagattagaatcatgagctgccaactggtagtctaatcaaatccagctcatgacatgatcatttggccaggccaaaccttgaaagcttagacaaggcatctgctctgagtttgccaaagtttccaccactcccaattgtctc

SEQ ID NO: 193574 - DNA, 508 bp, Homo sapiens
gaactttgcttttcctacggcttggagggggtcattttagccatgctaacagacatttttgcatgtctacaggcaatagttattttgcattgctaccaattacctacaacttacggaggtatgaaatggatcaaaggctacaatcagataccttggaagggtatgctctacacaatgcatagttttccactggaaatactcagtaatgttttctgctaattccaaatttcctcctactatgacatggaaaataaaaagagaaaaactaaaggtgtggatgagaacagaaattcatggaggcaactccaccgctaaataaaaatgcaaactaaaatgaggaaagattaatgcacccactgtgccccatgattaaagcacccactgcgcctacagggtcatatagaggaggtaagtggagcctgggaccacagaagatgggtgaggggatgacagtgaagtgagtcagctgcccatcttcccaacaggcacagaccgcacccgggagtcc

SEQ ID NO: 193575 - DNA, 736 bp, Homo sapiens
ttgcatcttcctccacacccatgcctgcttcctgttctggtgccccttgcctttcattgtggcaactgcgtgcatgatctgtctgcctttctgctgctgcttttccaacaccctcctcacctggaagctgggcagttaaggcacagtcattaatgtgtcattgcaatagcacctacagtcaaagcaaaaactacaactgcaaaactggtgttgcgtaaacagaacagccaatgacttgatccagatagatgatatgtttctactagtggttgatggcctctttcagctccatcgctatggaggcgaggttcatcaataactcagagaaacttgtgtccagagttggtcttgggtatgctctatgtattcagttttgtaaataatatatagattagatcaagttgtgatgtaaaattttaactcaaattgggtactactggttggaattttacattaactacaaataaatgattaggaacagaagaaaagtggaaaattcttgcttagtggtataaagattatgcttagatttctgcctatatcttgtgttttatagcttgttagtgaggcatgggctaatgcagaatgtactgcatttatgcaattagcaaataactgctagttttcattttatctattatattagcaacaaaaatggcatttaactgggtaaagctcctacctaaatatttgagtattgtgacatctctacttgcaaggtttgagtgaaagatta

SEQ ID NO: 193576 - DNA, 429 bp, Homo sapiens
ggtaataaacatgggaagctgagttataggtggttgtctgggaaggatgaatttcagatggatttagtcatgaaatagagccagaatggacttttggacataattgagtccaattgtctcatttggaagatgaagaaacagaagtcctatcacttaatttatccgagtctcaagatagaaatgtcaaacagagtagaaattcagatgtggagatggattcgggtctatataaggtagccattgattttcattcaactgggctagttcttaatttatgataagagatgaaagctgtggaccttctcatgcctcttactgtgaactgcacataggcacaaaattgtgcttacagattgaagggtttgggattctactgcttatctgtgaacctcgaggaatgggggactgcagattaagaacctgctagaa

SEQ ID NO: 193577 - DNA, 644 bp, Homo sapiens
cttatagatccttttgtcagagttggattccccttgttatggatgaagctatatttactactaatttctgggaattgaaatgttgattgtattttagagaaactcattgaaatttattcggtatgttttatatggtgaaaattatccttattaattgtttgataaacagaaaaagaatcctcatgttttaaaaaatcattcttttttattgagcttatcagtaaatagaatttgatcagttcatattgttttctgtttgatttaaaatatagctagaaatgtgtttcataggttatagttgaagaaaagcagattatttgcccaattttaactctggaaacaaaaaagttattgcaactatattttaaattttcacaaatttgggggatctttatcacataagtctttaaatgttgatggagtccctttgggaattgaaggagtaaaatctggaatccacatcttgctttgtattcatcttgaatgttttacttagtttatgtcaaagtaatggaattttttttaaaatttaggtaaattacaacattttctttttttcgaaacttttcctatatagtgtcacaacacactgccatatttctagtaaaaataatatatgtaataatttcaaactattgatgatt

SEQ ID NO: 193578 - DNA, 140 bp, Homo sapiens
ttcacacaaactacttttttgaactagagtgtgttggaggcagagaaaaatcaccctgtgtgctggctttgcctgccgtgagccagtgaggagtccgagaagaggtgggcaggtcagtgatgggtttggccagagatgcc

SEQ ID NO: 193579 - DNA, 554 bp, Homo sapiens
ttttgtttttcccgtggtgaggatagcatttttgacagtgtttgagtaactgtaacatccatattgaaagacagaaaagacataagcatcatcactttgaaactattcatggatacaatgaaagtcacattaagaacaatatcctagtgatgacttaaaagattgggattgcttctcagcaagttagttgaccatacattctcaggagcatactactgtgcagatgtggtccaccttgcagaggacctaaagcttctgtctgtctagcccatacctctggtctttgccacgtaatttttccaaaaagagaaacctgaatacagaagagcagagtgttatttgagccaagagctggtgaaacattaagtcagaatgcttcctagaaatcagtagactaagactgtgttagctcatgtttcatattacacaagagaaaataaactgaaaggtcagttgaacagttacagcattgcccttttccaaggtaatcagcagagcatgtagcaaagacctgaacaggagcgtgactggaaagagagtggctgataaagagg

SEQ ID NO: 193580 - DNA, 507 bp, Homo sapiens
tagtgggctggggtgaaggtctctgctggagatctaggagttttccctaaatcctcatctgatcttcctctcctgtagattgttaggataaatgagcaagaagattctgcgcaacaaactgataccttgctttcttttgtgagcagcagagctggggcgtggagagggtacgtccagtgttggatgtcaggaagttcacgtcccagggtatctagtacatctgagctctaagcctgcaaaggaaccttctttacaaattgcaccattgttatggttggcattctggttaaaagttcatctggatctcaacctcgcgtgaaattgcagagctacgactggaaaactcggcatcagttgagaacctttggggacttctcagacattacagttagaattgagcaaaacatgctgagttccattcactcacattttggtgagtgggttaaaataacagtttagtttcgtcatttttattacctacttttcagacagatccagaaaaataaa

SEQ ID NO: 193581 - DNA, 573 bp, Homo sapiens
tttctcaccattttctcagttattttgaacgtctgctgaaggcacgagggcctcatctgcagcctctttcctagaaagccatctgatacctgtcagcgcctgctaacttgagcaggtccattgggaaacatgtttctatttcttgtcagttacactaatgaccattccctggagagcagagagctcttcctactagaactctgcctctcagcttcagagtcattgcctgggagctgtgtggggcaaaagtgaaagccctaagccagggccgggccaaccgcatttgaatctagtgttctcccttagttagccaggtgaccttttcagagcagacagtgagttaccatgaggcccaactgaaagaagtgtgaatgagttctctgcagagcattgtgcagatgtcacaggggatgtgatatcatcatcagtaacagcagcagtgatggcccctggaacagcacccagatggtggactcagacccctggggagtgacccacagttccatgatgggagggaccctattttgttcagcactgtgtgcccagctagctcctagcatagggtttatgacg

SEQ ID NO: 193582 - DNA, 272 bp, Homo sapiens
acagagcagaagtgccaaatctgaataatgggagtcgcagaaggaaagagaaaaaaaaatggagaaaatatttggaaaaataatgagaatacatttcccagaattaaagaaagatcaaaggactcatagaataattagtaagaaaactgtacaaacagaaacattgtagtgaaagacatttaagaccaataagaaaagcagaaattctgaaagctctcagagaaataacagatcaaatcagatggacatcaggctttttaacagtatcagat

SEQ ID NO: 193583 - DNA, 491 bp, Homo sapiens
tcttggctttattgaggatgataatatccaccttcaagggttcttttgtgatctaataagatattctatggaaatatccagcagtatgcctgccatgtactagagatccataagtgctgattgattattttttctaacattcttctttagttgacagtgatgttaatggaatgtaagaagtaactaggataaaattttcattggatggattggcacaacatgttaactgactggatgttgatatatttggaaacaagattcatggattatactaagatttgtaagctctatttttagttttgaagaagggaatgggaccagatgcgatggctcatgcctgtaattccagcactttgggaggccgaggctggtaaatcacttgaggtcaggagtttgagaccagcctggccaacctgctgaaaccccatccctactaaaaatacaaaaattagctgtgcgtggtgacaagcgcctgtaatcccagctacttg

SEQ ID NO: 193584 - DNA, 488 bp, Homo sapiens
tggcctggagttttcttttttcattgtgtctctaccaggttttgatatcagaatgatgctagctgcatagattgagttagggagaagttcctcctcctagattttttgagaatcatttcagtaggattagttccagctcttctttacacatttggcagaattcagctgtgaatccatctggtccaggaatttttctggttggtaggtttttttattactgattcaatttctgaacatgttattggtctgttcaggtattcaatttcttcctggttcaatcttgtgaggttgtatgtttctaagaatttatccatttcttctagattttctagtttgtgtgcagagaggtgttcataatagtctctgaggggtttttttgtatttctctggagttggtggtaatgtcacctttgtcatttctaattgtgtttatttggatcttctctcttatttctttattaatctagctagccatctatcaatcttat

SEQ ID NO: 193585 - DNA, 436 bp, Homo sapiens
gttctgtgccttgattggagcgatggttgcataagtatacaggtttgtcaaaactcatctgacagtgtacttacagggctgcattttattgttaagttatatctccatagagttaatttacctttttaaaaattaaaaacattcaggccagttgtggtgactcatgcctgtaatcccagaactttgggaggccaaggcaggtggatcacttgaggttaggagtctgggaccagcctggccaaaatggtgaaactccgtctctaccaaaaatacaaaaattagccaggcctggtggtgggtgcctgtaatcccagctacttgggaagctgaggcaggagattcacttgaactcaggaggtggaggttgcagtgagccaagatcgcgccactgtactccagcctgggcaacagagcaagactgtctcaaaaacgacaa

SEQ ID NO: 193586 - DNA, 233 bp, Homo sapiens
cgattcagatgcacagagtaaacggctcctccattccccggggtgtgcacgttaccagtggcctggacttgcaggcccgagctccagttcaacggctttttgtttaatcgtagagtttcaggaagaaaactctttaggcaacaaaactataaaacacacagtgtctttaaggttcaccttgttttggtgaagcaggaagtcctgggagtggttgagcctcaggtctttttggg

SEQ ID NO: 193587 - DNA, 584 bp, Homo sapiens
ttcaagaggatccccgttgcactttgctacacaggcagcaggcaaagacaattcccaaaacctcgacaaaagcaattccaagggctgctgcagttaaccaccagctcattttgtcatcagtagaaggacgcttgagttcagtacttggaagagtggaagggtgcagtattccttgggccctgtccctttacgtttcatggtatgccagggatgtctgtgtttactacctccaaccaatgcaagaacatacctgaacaacccaaactcctgactggggctaattggagttagtgacagagaagaacactattttacagtgttgggtatttttgttgttgctctggaggttgggagggattagtctttgtcaggagataggatttagcagaatatatctatttatatcttgttttatctattacatctccatcctattgacttctttcctgaaccggaattaagcaatgaatgctgtttgggcatttttagtgtggctgttcattattacctggataattcagagtacttctaggtcatgacataaaaatgctgttatttgtattagcttacagatactgttggtc

SEQ ID NO: 193588 - DNA, 767 bp, Homo sapiens
aaaggggcgagaatgggaggagagttaagagcctgttgccttagaccaggtgaatgatttggccagcgtggactcatcttgccaggcaacccttccagtggtgtaggaatttctgttaaaaaccagaaaattgacaatccaggttaacttgaaagcaggagatcaacgttccttgagcaggcttgagatattaagacagaaggttaaaaattctaatgatttacatttctgctgtatctcttcttatataagagacacatacacacacacataggttaaacataacctatgtttctatataatttaaactatcaatagttttaacctaagctatgaaaaccaacatgcctacaaatgtcttgagttccatcatttgaattcatttaactctttattaactattatacatcctgtgtgtggctcttttggcttccagaataaacttttgttgagtagatgctgagattaaggtgctagcagactgcttatgagaagtgacgtcttaggccctgcacagtggctcatgcctgtaactccaacactttgagaggcagaggcaggtggatcgcttgaggccaggagtttgagaccagcctggccaacatggcgaaacctcgtctctacaaaaaatacaaaaattagtcgggcatggtgtcacgtgcctgtagtcccagctcctcaggaggctgaggcacaagaagcactcaaacccaggaggcggaggttgcagtgagccgagatcgcaccactgcactccagcctgggag

SEQ ID NO: 193589 - DNA, 457 bp, Homo sapiens
agggaatgggaaattatgattcaataggtacagaattccagttttacaagaagaaaagatttctaaagatggatggtgatcattgcacaatagagtgaatgtacattaattaccactgaactgtacagttaaatatggctgaaatggtaaaatttatgctgtgtgtattttatcacaatttcttaaaaatcaactttctaggccaggcgcggtggttcacacctataatcccagcactttaggaggctgaagcaagtggatcacctgaggttgggagttcaagaccagcctgatcaacatggagagaccccgtctctactaaaaatacaaaattagccaggtgtggtgatgaatgcctgtaatcccagctactcgggaggctgaggcaggagaatcgctggaacccgggagggagaggttgcggtgaactgagatggtgccattgcactccagcctg

SEQ ID NO: 193590 - DNA, 164 bp, Homo sapiens
gtctgtcttcgtcatgccacctgggagcttacaggcaacttcaggcagggccatagtctctcctctctgggaacccagcctgagccatggtgcctggcacagagccatgatctggaattcccatgacaacacacctacagccgcccagaggacacaaatcccca

SEQ ID NO: 193591 - DNA, 384 bp, Homo sapiens
gtttaagaatcattgctatagcccacctcttcagaaagtgttacttgattgtgtttggagcatggggtgactagggaagagtgattaaaatacagagctgtaagtcatgagcagagtgaagtgccaaaggaaagtgtttgaactttgtccttaggccagtggctgcaccttagaattacctgacagctttaaaactatagcagtgtctgggatttgtcccagaccagctgaacccaaatctgagtttctgatgcacagtgagagttgtgaactatatatagttctgattataatagtgtacatatttattgaaaatgtatcaaacatggtgtcaagtagcttacatgcataataattaaacaacacagcagttttatgtaggta

SEQ ID NO: 193592 - DNA, 538 bp, Homo sapiens
ttaaggaaatataagtgattgaagttaacaactaatggaaagagtgctgtaagaaaacacaaaccttttaatgacatgtagagatttccagttcatgtgtgggtgaacagtactatgttaactaaggaaggtaacatggagcaggaagtttgggtgaggaggtgataccaaaagggagaatatgatcatgattttacttagagctattttatatctgaagttacttatatcatatctaaacctcagaacccaggaataagatctgggctaaggtgaaaaatttgggaatgcatttgtgtcagaataagaaaattcggaactgtaaagggaagtgttagaatttaaaagttccaacatataccaatttctccttcctacagattaaattaattgtcaagatctgcacaccatttgtctctcatcacacttcaaatcctttacctggtaattctatcatgtacagttgacccttgttattcctatgaatcaactgttgttccacacctgtgaatttacctacttgccaaaatttattgga

SEQ ID NO: 193593 - DNA, 477 bp, Homo sapiens
gtcactaccttcttcattccacagctcaacctgaaatttgaaaggtatcagccttggctgtcccatctacacccctatccctaactccttaaccatttgtcatctagattccactcccacaaagctagggaactactttctcaagatcacgtaccagccacagccttccagggtggcaagtagtagctcagagaagatagctccaaaccagacttcagctggaggtggtcaaggaaggctttctggaagaggcagctctcaaatggaggttttaaaggacaagtaagacaaagaagaaagaaaaggaaccatatgtaccattgatcctggaatagggagatcttatggtcttttataaactgccattcttctttacttcttgatattagtgactcatcaccatagtgacctgggaagaggcatgagaagggtggggcctagccactgtgatgcagttatagcacatccccttgggag

SEQ ID NO: 193594 - DNA, 391 bp, Homo sapiens
tatattttcttttagttttctctgctactcttaagggtacatgtaaatacatttcttagcgtagagcaaatgttgcatgcaatatgactggccagtggcattttatttcaaagatctcatgctaatatataggagactatatattatttttttttgtatcagcatgtttaatttttttaaggttaactgtgtgcaaatgcatatttgctgtccaaactagttaatgggcttacaactgaagggtgtaaattctagtatctgtattctccagcttgaagcagtgttgtctgaagcctgaaacggctgatgttaatcttcagcttattttgttgatatccaaaaattaacttgaagtagaataaaatgtgatgtaaatcgacttctctgcata

SEQ ID NO: 193595 - DNA, 602 bp, Homo sapiens
ccccttcaccttctgccatgattgtaagtttcctaagacctccccagaagctgagcagatgtcagaatcatgcgtcctgtacagcccatggaatggtaagccaattaaaactcttttcttggctgggtgtggtggctcacacctgtaatcccagcactttgggaggctaaggcagacagatcacctgaggtcagaagttcgagaccagcctggccaacattgtgaaactccatctttactaaaaatacaaaaattagccgggtgtggtggcatgcacctgtaatcccagctacttgggaggctgaggcgggagaattgcttgaacctgggaggcagaggttgcagtgagccaagattgcaccactgcactccagcatagacaatgaagcaagaaaaaaaagaaaagaccttgtctctaaaaagagagagagagaaaccctgcatggacctccattcatatggccgttctgttactagaagggtccagaccaacacaagagcactaggagccaaagatgaaattcacaaaagagcaattatgagaaatgggagaaagatggagggactgcaacatagggctaatggaagttttagaaaaacag

SEQ ID NO: 193596 - DNA, 344 bp, Homo sapiens
gcatgtcgacgtggcttcagtgggcagttggtatttggcctctggcttgatgggaatagcagtgcttcctgtcacattggttcattgcagctaggtattaagccaaataacttagcattttctcatccaaaaaggaaagtagaattctgttgtatttattcaatttccccgtcactctttatacactccttaaagcttctttgtttttttaagatgtgggttggctacaatttttcaagtcagcaattggagtcactgaaaagctgtaggaccccattacatattccctcttcaaagactaggtttttagtccccagcagcattatcccaatcagtgaagcact

SEQ ID NO: 193597 - DNA, 482 bp, Homo sapiens
acatgctcctccccagctgagcgactactttctgtttcctttcccgagtctgggaagagacgcggcggccaccctgccctggcctccgactacctgtcttcatgagcgtctcggccccctgcccgggccccctcgcccctctgctgtcccgcgcggtccagggagaggagactctcggtctccgaatcccctcaagtggggacccgaagaacggggaggggcactgagcggggacagggaacgcgcggagcgcagctggcatcgggcgcccccgttccacgtggcagagccgaggggttacgatctcggcgggagacgggagggcgggaggctgggttggcgacgcgggggagccaaggtgggtgcggggaccatggggacggcccctcgcgccgcgaacccccgcacgtcccggagactagcaggtgggcgggctcggccccttcttcccgttccgcgctccccgcggacagggcggccgc

SEQ ID NO: 193598 - DNA, 180 bp, Homo sapiens
tctaacacttcactttgcctgcgtagacagacagacacacacgtgacccacagcttctcagaaagaccacagtcagcatcagagaagcccccttctcaacaggcaggaagcaggttccctgaggctctgcacagtgcccaagggacactgattcacgcattccgcttggtgaacattcac

SEQ ID NO: 193599 - DNA, 343 bp, Homo sapiens
tgctgagattacaggagtgagcctctgcgcccagcctgtactttcttatttttccagttacttcattttttcaataaatatgtgttgaaaacctggtatgtactatgcacctaggtgaagagtgaaaaaaagaaatatccagtatcttggagctttcatcctacttgagggagacacaatgaagaataacataataaatagtaaatgtaagaaacaaattcttagaagatgataagtgttgtggaaaaaaaaatatagaggtgggaaatagggattgtggtgctgagggttggggcacaggtttcagtgttccacaagaaaattggggtaggccttagtattg

SEQ ID NO: 193600 - DNA, 197 bp, Homo sapiens
gtgtgtaatgtatgagcatgtgtggatgtgtgtgtagatggttatgtgcatgtctggtgtatgtgtatgtgtgtggtgtgtgtatgtgtggtgtatatgtgtgtaatgtgtgtgtagatggggtttgggtacatgtggtatgtgtgtatggtatatatgtgttgtatatgtatgtgtggtaagggtgtagttgatgt

SEQ ID NO: 193601 - DNA, 379 bp, Homo sapiens
acagcctctgtcatagcacccatcactgcacttgagcaccacaggagactatttactcacctgtcctttggctgcctcgcctgctataatatcagcgccacaaaaacagggccttgtatctattattcaccactttatccccagggctcaacacagtgcctagtacatagtacatgctcagtaaagttgtgatgattgagggaaccctgcctccactgtatacagtgcagaacaccaagccagggccaggaaaacccctgacgttccctaggtctgagctgggagcaagagaaaagggaatgaacagtaaccctttgatgtattcagtaactgtctaatgagtcccttgtgctaagacttctaggggataccacaaaca

SEQ ID NO: 193602 - DNA, 459 bp, Homo sapiens
gtgagttcccgcgagatctgatggttttataaggggcttccccctttgctcagcactcattctctctcctgccgccctgtgaagaggagccttccaccataactgtaaggttcctgaggcctccccagccatgcagaactgtgagtcaattaaaccccttttctttataaattatccagtcttgggtatgtctttattagcagcagactaatacaaacccaaaacccaagcagtcacagaaacagatgggttgtctaatgaagctgaagcagggtggcaagcaatgagccagtcattaatgatgagtaggagtgatgggaaagtcagcagagcacagttacaaggtggacaaaaggatgtgtcttacccatggctgatgctccaaagaggagggttatcacacgaggggggaaaagcaatgatccaggacagccatgacaagaatgcgtgccaccaatc

SEQ ID NO: 193603 - DNA, 200 bp, Homo sapiens
gattcttgcccataacaatcattactgtggtatttgcctaatggaaagtttctatttccataattccttccacattttcaattggaattctactctaaacaagagctgtctcttcttccttttaatttattcattcatttgtaccaatatagactcataaatcttggctcactacaacctccactccctgggttcaagca

SEQ ID NO: 193604 - DNA, 121 bp, Homo sapiens
ttaaagtgtacttctatccaaatagtttccatttctcacaaaagttaaatcactaaagacaaccaatcataccaaaacaaaaatttgaaaatctgaacaaagagaaaaagcaaatgagttc

SEQ ID NO: 193605 - DNA, 332 bp, Homo sapiens
ggggattactcagggtatgagtacttgtaagtgaagatcattaagagtcatttcagatgctgctaaccacagcagttgagtatagacgcatatgttttggaggaaagggagaaagactgagtaagattcagagacttttaagagctttgctaattttgcttctgtctttgcccaagcaccttggttcagtcttttgctttcttttttttttgccatagtggcaaaaaccacacttttgcaccaacctaatagcactttgcttcatgtttgctgtattgttgtttccttttgagagaatttaccctgaaaatagcctcgcttatgtgttcacc

SEQ ID NO: 193606 - DNA, 514 bp, Homo sapiens
tctttttctgcacactttccatgctttctcctgcagaaggtaaggtagtaaatggcagtgttgggtctggatgcaagccactttgttaaccctgctggagagaaacatatctgcttaattcacaattgggtcattttattattagcacacactcagttcctttatgagtctttcagatattgattgagacatggcaggaaaaaaataaaaagaaaactcttagttccttaacatgctggacttctctgtgacttttctcttggcgaacatctcctgacattcctttggcaagtccccacctctctctttcagtccatgtgttgggggaggtcagggctggccaatcagggtcctacatggttccagcctcagcgacttgttcaaagatgagcacatgaaccaaggccaactatagacttaatctcctccacaaccctgtgaaattggtactattataaattcctgttaaagatgagaaaactgagacacagagagatgaaataatttgcctgag

SEQ ID NO: 193607 - DNA, 471 bp, Homo sapiens
accaactgagacaggaaaggctgagggcagataaggataaagtgttgtgtggtggtgattgaagagcagatgtttggcttccctatattatttatcttgctcttctctaatcctcatcacggcccaattagagggcactactctgtgtctagtgctctgccaggtacatcacatgcatttctctcatttaatttatcagctctttcacaaatgcgaaagctaagatccagacaggttgaatcacttgttctatgtgatagggctggtaaagttctatatgatagggatttgactcaacgaccatctcctgtggtcacattctggatgtattttgtagctgtgttaccctggacaacttagttaacctttgtgtgtgttaacattttctacaaacaatctgacacactttagatgtaagagcctaaggccagtctgagtgtgtaggtgtgttaatttactcagggagatgtg

SEQ ID NO: 193608 - DNA, 357 bp, Homo sapiens
gccaccacccctggccaatatgataaaatattttaaatctcccgtatattttgtgagtgaaagacagggtcagtgtttcttccactgaccctttttcaagatcattcctgataattatggttttattgtcctctaaaagttgctgtggggttgaaatttatgttttgagttgttttaccttgtctataactttctgtaatcttcctcatcactaccatcgactgatctttaggtcatgaagtcttgtcatcatacaggattacatattacttgtactatggtctccatgaaatagtttctattattattattcactttttacacatgactctgagatctggagaagataaataactt

SEQ ID NO: 193609 - DNA, 225 bp, Homo sapiens
tctagaggatcccgttcgacggaagcagatagaagagttagaagatttgggtcacaagtaggaggtgaagggagataaatattgaggaaagagagctagtataatgaatagagggacgaaagcagtggttaccaaattttaatgcatatcacgatcatcaagggaacagatttttttctttatttttttttctttcttaaaaaaataatggcatgcttccggtcg

SEQ ID NO: 193610 - DNA, 123 bp, Homo sapiens
aaacataaagagatatgacttaaaaatttttcatctgaactgtcaatttccataaatagcttaatatagtgaaaaattgagaggttcttgaagccactaagtctaataaaaaaatgcaattcc

SEQ ID NO: 193611 - DNA, 326 bp, Homo sapiens
aatacgaccgggcacacagggcgtggagcacagtgtgagccctcattaaacattaaccgacattatgatgatttgagaggcggtcggccagagcagggctctgggccagaactccggagttagaatcccagcgcacaacttatgcatcgggtgaccttgtgcaaatcacttaacctcttaataccaggttaagaccccctaagactatagtgaggactgaataagctcatacaagtaaagcgttaaaaagagggtctagcccatagtgtttcatgagtgtttgccattattatttgtgggagggttcccccttctcctgtcaccag

SEQ ID NO: 193612 - DNA, 221 bp, Homo sapiens
tgttggctcattacagggatgaaaggaatctcgggctgtgggggtggggcaggatcagagctgaggtcttcacccctgcccgatttcctgcaatgcactgtgctgccttctgagaatccaactccaaaactggctttagcttgaagtttgaaaggaagaacaaagaggcagagatggaaggacaggacagaggatatttaacgggttctctgagcgcaaca

SEQ ID NO: 193613 - DNA, 637 bp, Homo sapiens
ggcaacatggaatcaaggcccagtctctctctctcaaaaaaaaaaaaaatctctcttaagtttatatacctaccttcttaaatagagtatgagtctgatttatacttttcctctcattaaaaatattgagtgtctgttgtgtgcaaggtgctgtgctagtagacaaggagttgtgatgagcatccttaaaatctgtaatacgtaatatgaagaaaaactagaagtgctgtgagagcataaaataggattatccttaatctagatggagttcaggtggggctttctgaagcagtaatgttctgactgagataaaagatgagtggtaattaagcagacgaagggggaagaggtgttgctagcagagtcttttataaagacccctagtgtgaaagaagcagggtatactggagaaactagaagtccagtccagaagtccagaaatgagcccggagatcaaggagtgaagagtagtggaagtagagttcagagactgtcgaatgttgtaggacagtttagattttgttctttaccctcagagtagtgggaagtcattaaagtgttttaaagggacaattgatagatcagatttgcatttttaaaagattcctctgacagctgttgggattccattggggga

SEQ ID NO: 193614 - DNA, 367 bp, Homo sapiens
ggcataagccatcacacctggctccctcctattattgtattgcagtccatctttccctctagatctattaatatttgcatatatacttcagagctccactgttgtatataaatatttataattgctatatcctcttgctaaaatgacctttctcattatgtagtgaccttgtctctttttatagtctttgatttgtagtttattgtatctgatataagtatagctattcttgttctattttggtttccagttgtatgaaatatcttttccacccttccactttctgtctttgtgtttctttataggtgctaagtttcttataggtggcataaagttgaattgtttctttatctgttcagccagtctt

SEQ ID NO: 193615 - DNA, 455 bp, Homo sapiens
atgccaatcaccactttgtatgcttgtatacccaaagcctatttcagcgttcctgaaattttaaagctaaagaaaatagactcaactctaaagtgagttttgagataatgtaccaatgtattgaagaattttcaccaagaactcccaaaaatatggagggaaacagagctcactagagggaaacctaagaatggcgtaactatactgggaagtaggcactgttttttcttgcacaaatgctttattgatttggtgtacctgtgcatgccaggcactgacaaaatagaggtaaaaagctcttgtactttcatgttctagtcttggaaacaactgataaatgtgtaaacatatacaaatgcctatattctgtttccaaatttaaagtgcactgagtttttaatgtttaaataacctacaaattgtgtttctagataaagacttaaagaaaatattac

SEQ ID NO: 193616 - DNA, 383 bp, Homo sapiens
ggtgcctgctgtgtctcccgtggcttcctctgggatggctcacctccacccatcttccacacagctctcagagggagctttctaagatgcacttctgtgtgtgtcccctctgttaaaatccttaatgaatactcatgcgttccccatctgacccaagcctttcatgatctgacccacactcactgtgacagcctcctcctaggtccccattcacaggcaccctgggttctggccaggccatacgcccagcaggttcctcaccaggccaagtgccttctcctctccatgcttctgcacctgcagggtgcgctaggacagaaattcagcttcaagactgcaaggacagaaactcacactcaaacaaaaagagaaacgatcaacat

SEQ ID NO: 193617 - DNA, 686 bp, Homo sapiens
agtgttaacctgacctccccactttacagatgagaaaactgaggtgaagggaaattaagtaaattgtccaagatgacccagctagtaagaggaggacacaggattcacattcagcaatctggagccacaacctacactcttccattagctcactcacagggctgccttacagatcaaagtttacatttattatctaccttagtctctcctatcaaggtgtgcagcaaatgtggcttctcaaccttcattccatgttaaccttatactgtttacattacccttgaacactgagaccaaggatctcaccacttgctttttctattttccttccatcacccagaatggcaaacattcaaacatttccactcccgaaacatgcagcaacgccagaatgtttatccagaaattcaaaatgagctctagtgaggctggcatgaatatactctaacacaatgttttcaaatatcgtggctcaacaacaatgaccagtgctaaggttgctgcgaatgacatcttaggcctgaaattgctctctgctgtaacccagcactgaaggtgactctggcctttgcatgctggctttgaaaggtcccaagtctgtctacttggaaataaattaaaatgttgtctatatttaacagataaccaggccttactaagcaatctaaaacacatactctagaagc

SEQ ID NO: 193618 - DNA, 460 bp, Homo sapiens
atatgcaaacacaaaggacacatccagacagactaaacccagcaagaccccagcaaggctgctcttcactaccttttcaaaagttattcactagtgttctctaaaccaccatcccttttcacccaaccccacaactttccggaaagacatgttatcttaaattttatcatcaatgcttggctattaaattacagtgaataactaaaaatccattcagaatcattccctgaaaacgtaaaaaaagaaaaaggtaaaccatcctaaagaaggcatttcaggctgggcgcggtggtggctgtaatcctagcactttgagaggccgaggtgggtggatcacctgaggtcagactggccaacatggcaaaaccccgtctctactaaaaatacaaaaatcagccatgtatggtggcacatgcctgtaatcgcagctactcaggaggctgaggcagaagaattgctt

SEQ ID NO: 193619 - DNA, 493 bp, Homo sapiens
aagatttcacagttgcagtgacgtttccaggggggcttgccttcgaggagctaactctacaaatgcaagtgtaagtatttccaaacaaagcagaatgacccttacattccaggcccctgaagagttctctgctacagagcagttctctaacaacagagcagttgttagcaaacagctggaatgtgggggttttctgggttgagcattcgttgtctggctagtatccagtacctggctgcccttctagggtccccctcaagcccttgcctggagatggtgaattggtttcatgttcttctcagggttgttggtggctttctggagtccggtcttgagagggagtctcatattgattcttggcttggtggaacagagcatcatgattaattagggatggctgactttgcactacaataggagaaattgcagcagaataggagaaatagtagcataatacctttgcatttcctaacaatcagagctgcatgatttt

SEQ ID NO: 193620 - DNA, 441 bp, Homo sapiens
tgtcccaaggaaactaagtaggaggagtaagaaaaaaagtatgcactgtgtatatttatgtagccatcacaacaacctcacagtgattattcccattttagagattaggaaactgatcctccaagaaatgccttctccaaccattgttaggtagggaaaagcataggaggaaactaaggctcagagcacttacatggcactgccaggatcttaatccaagtcttcccatttaaagttcaaggcccttttctgtaccaccaagctgccccctggcagtcaaaggaagtttccacctccaatattctattattttactacataaaactgctgtcagtttctgactgtgggcttcgatgaatgtgctctcttggtactagccttgcttttcaaattctcccgctactttcccaacttgaacatcataccgtttcgcgaagtaaa

SEQ ID NO: 193621 - DNA, 609 bp, Homo sapiens
ggtgtttcgccatgttggcacactctcgactcctgaccttagcattaaatgattaattaactcactgacctcaagtgatccacccgcctcggcctcccaaagtcctgggattacaggcgtgagccactgtgcccagcctgataccttctttttaagcagcttaaaacaacatttatttgttagtattaaaatttgttatctgccagtgtctgtgtgtcaggaatctgggcgtgggttacttgggttttctggttctagaacttttacaaggtgctggtgggtgctgcagtcatcttccagggaagaatccatgttcgagctcacttgtgtggttgttggcaggagtcatctcctgggcctttgagctaaaggccttactggaagccacactcaatttcttgccatgtgcttctctccttagggcaacttgcttcttataaatatgtaaaaagagagtgagagagtatgaggtaaaagtcttttgaaacctaatttcagaagtggcattccgtcatttttgctgtattctgttcagtagaagcgagtctctaggtgcgacctatactttaggagagagaattacacttggacatgaattctaggagatgg

SEQ ID NO: 193622 - DNA, 495 bp, Homo sapiens
gcagtgcacgcttgatgctgtggtcgatctgaggatcccccgtcagcagacacagcatttatttgttagtattaaaatttgttatctgccagtgtctgtgtgtcaggaatctgggcgtgggttacttgggttttctggttctagaacttttacaaggtgctggtgggtgctgcagtcatcttccagggaagaatccatgttcgagctcacttgtgtggttgttggcaggagtcatctcctgggcctttgagctaaaggccttactggaagccacactcaatttcttgccatgtgcttctctccttagggcaacttgcttcttataaatatgtaaaaagagagtgagagagtatgaggtaaaagtcttttgaaacctaatttcagaagtggcattccgtcatttttgctgtattctgttcagtagaagcgagtctctaggtgcgacctatactttaggagagagaattacacttggacatgaattctaggagatgg

SEQ ID NO: 193623 - DNA, 271 bp, Homo sapiens
tagccctacagcctgtgtctgctgggaaaggccatttaaacttgtgacgctcattaaggacattctcaccaccatcatggatctctaaattaaagtcaaaccgattccaaattggaacttaaaggtacaagagtcagaacgcggcacaaattgcatcatgccagtgtcagtcccatcctgttcctcttacccttctcttcccaaatggaaaaaagtgacccgtcctgcacatgggagacaagagcttgtgaagggctttccccctcctcag

SEQ ID NO: 193624 - DNA, 147 bp, Homo sapiens
acggcgcccggcgtgcatgcattttttttaggcggttctctgaactcttggggaacgagatgttatcgcgataatattactaattattcaatgtcatcactttgcaagccccagggaaactctaacacccacccccatccacccctg

SEQ ID NO: 193625 - DNA, 265 bp, Homo sapiens
tgatatataattcagtgggaacctgggaggatagggaggaggtgggggagctgaagaaacatgagtggccgaatgcttaacaattgttattgttaggttatggatacccggggggtggttgtactattctttccttttgtgtatgtttgaaattttccattataaaaaggacaaaaaaaaaagagagagaaaactaaaaaagaaaaaatagtgttgcgcttgttagtaaaaccaatcttaaggccagttactaaaaagtaaactc

SEQ ID NO: 193626 - DNA, 300 bp, Homo sapiens
ggttgaattttatgttgaaggatccctagaccctcacctttgcctagccagtccccatgtaaggaatcaacttaaatttaaatggcacttcctctgggaagccttctgatcttctagaccggcttagactgtgctgttacatatgcacagctctctttggtcattttgagcactcgttcagataattcagcaatagcgtgttattggctgtcagtccagccagtgtaagcctgagaacaggagccacatctgcctggctcttcacagtattcccagcacctgcttagcaaagagctttgt

SEQ ID NO: 193627 - DNA, 314 bp, Homo sapiens
cagtatagacactcagcaaattttaccacaagtttgttccctgctgatcttgtccttcctttaggtaaaatgtggtcaaaattaatgccaaaacctacaaaaacctggagaaaaagtcttcaaaagtaaataaaacatagcccagggaggaacctgattcttacagttcccgggccataatgtgtaaggagtttatatccaaattacacataaccaccagtagctgcatccactgctgtttcccatgctctgcttccttggtctctgtttgtttgttttgagacagtgacttgttctgccacccagctcgcgag

SEQ ID NO: 193628 - DNA, 542 bp, Homo sapiens
tctgtgggggagaggagaaggaaaaaagagctgagctgcaactccggtttcagaggttgtgtcctgtgcttgaaaaacacgtaggaattggtgaaaattagtctttttagtctatgcattgactcttgggaaagtatgttgtgcaagagatgagagtaacaggtgagagtactatactgtattagaaagtgagagagccctttgttccatgtaagacagtcttgccagtccagttttggttacatgtggacctgagtacatcaaatttgaggattcagtttaatgaaaatgatgaacattgtaacattttagtttgatttgtttcatagtgctgtaaatactacttcatgctgtttcttttttgttaatttgcttttatgaatatatagcacttatcttgataaatatactacaaatgtgattatttattgaggttggcatgtcccacgaaagtttaaaaattgagtgtgaaacaattttagcaggaatatctttgctcaaagaatgaggtttttcagaactgaaaaaaaaaaaatgcattg

SEQ ID NO: 193629 - DNA, 189 bp, Homo sapiens
ctctaaactaattttctccttatacaacattgtagacccaacaggggaggacaaagcttgaagcaaatggctcccactagctgcctggaaagtttgatttttttttttttttttttacacctgtggttcccttccctaagggaaaagggaaagccccaaaatttttgaaacccgtcacccattgtgctt

SEQ ID NO: 193630 - DNA, 622 bp, Homo sapiens
ggagttcaaggcacccatgggacttgtaagtgggcccttgccatcagcagtcagaacagagctctgaggctcagcggccaggtgttgcactggcatagagacctgggagtcactggcatgttgatgtaaagactcagctagagtcagaggagggaaagacaaggagcaccacttttaaggagtcagcatgtcctgacaatgtccctagtataggttgagcatcagagtaacagggactcctatccctgtggcctccagtggtcacagcattgactgctggtgctggaaggccccaaacaccatggagtgtgacgtcagtttatcagtacatgggagacctgcccagttggttcagtgagcaaacatgttcatagggaagactttagggggccccagaacaggccaaggcccctcatatcccctctcccagcaccctgcactggccctttgaagcatgcattacgtttatcttttaaatgactagggggttatttattgtctttttccccaccagttccacagggaccacatctgcccagcataatacctgaagtgaatgcataaatgaacaggatgctccaagtaaacattcgagaccttggatggtgctacagtaggaata

SEQ ID NO: 193631 - DNA, 183 bp, Homo sapiens
ggcaaagatgaggacaggcagtcgtgtgggtgggaggcagtccttggatgattagcacaggtgtccaggagggaggggagggtatggaaatggtacaaacatgagaggaagctgtgccagtgggtcatcatgccccatttgtacagaacattgagtggactgtaactgtggacaactgaaata

SEQ ID NO: 193632 - DNA, 851 bp, Homo sapiens
gagtacaggtgtgtgccaccatgtccagctaatttttaaatttttttgtagagatggagttttgccatgttgctcaggcttgtcttgaactcctgggctcaagtgattttcccaccccggcttcccaaaatgctgggattacaggggtgagccaccatacctggccgatatctttgttttgtgatacagttctctgattattagtgaggctggacttttagatcttaattactagctcttatttccttttgtgaattattcaatttgtgcctgaatgttatttgtaagttgcaaatgtcgtttgttgcagatatgctcccagtaatatttgttgccattgagtctgaagaaatgtttgcaattccaaatataactgctgtgtggatacatgtctggttcttggtagccattttgagataacatttgtctgacctctatcttatttttgtttttatttttagagtggaggtcttgcccaggctggtctcgaactcctgggctcaagcaatctttctgcctccgcctcccaaagtgctgggattacaggcataagccaccttacccagccttgtctgacctttaaacagaaatccatttctttttatctaaaaggaaagcacttttgagtactgtacaacagtggtgcttcctggctctgggcatggggagaagacagggcaacattttgtccctaatgagaaactaatttagacaagaaacaaaacagcggtcccttctcccccatccattcagggactggtcttattttaaatatttctgagtggtctgagggaggatatgggcaatattgaagtgtccacatttatacatactgttaaatgctttgggga

SEQ ID NO: 193633 - DNA, 262 bp, Homo sapiens
agtgccgaagagtatataaaagcacccatattttaaagggttattgaaaagataaaaggtgaaaatgtacatattgatgatctggaaacttccattgctaagaatccaaatagtttccatcttctaggtattagaggaagacacttagatctgatgtcttattacaaactgatcttcaaaatggtcagtttttagatggtcttcctttctacctgcttttccttttacaagaaataaagcaaggaacaagcatcatgatagt

SEQ ID NO: 193634 - DNA, 370 bp, Homo sapiens
ttttggtgggaatataaaatgatacaactttggaaaaaggtctggcagtttcttaaaatgttatatatatttttccccatgactcagaaattccactcctatatatttacctaagagaaagaaagcatatgtctacaaagacttgtctaaaaatgttcatagcagctttactataaccaaaaactggaaaagtatgttcatcataggaatatggatgaacaacctgttatatccacacaatggaattctactcagctatgaaaatgaatgaactattattatgcaacaacatggataaatctcagaaacatctctgagtgaaagaagctggataaaaagcagtacctatttcatttatatgaaattctta

SEQ ID NO: 193635 - DNA, 270 bp, Homo sapiens
aggttgctcattgtgtctgtccctcttgggggagcacagagaataattttttgtggctactgaaatcttaggactcttccagtttaagtaagtcttaaagaaatactggccttgactttaggatccaaaataaacctgaatccttgtgagtgtctagacaacaactatagaaaacagcaacaatcagagatcacctgacagttaagaactggctaaaaatgtttgcacattaccaagatcaagcaacatataaattacccagagacatag

SEQ ID NO: 193636 - DNA, 115 bp, Homo sapiens
ggcactattataagcactttactggatgttaatgtatttaatcctcatcccaaccaatgtgctatcaatattatcctcatttgacagataaggaaacaaacataggaaggttaag

SEQ ID NO: 193637 - DNA, 446 bp, Homo sapiens
tcctcctcctcctgcctccatcaagatttctccctgctcccaacttttgcccaggctgttcctcctgcccagaatgcctgtcttatgaactcctacacatccttcaaagcccagctagtggtcgcctcctctaggaattacacctctaacctttttggagaagattgagccatccagggaggcttctttatgtttacaccaggggtggggcaagaccaagctagagtctctctcaggtaccaccctcccacataacttttactcctttgctacctgtgccagccatctgctccatttcacagaggtaaaaactaaggcaaagtggggcacccacagtcatagagggagaaatgtggcagagccaggtctcaaacctggagttctatgctctcagctatcaggcagagccgcgcgtggtggctcaagcctgtaatcccagcacttcg

SEQ ID NO: 193638 - DNA, 1024 bp, Homo sapiens
ggagttgcttgcctgtgttgtggataagggatctgaactttaatatttttgaggatttaatcagtattggaattgtttttggatcttgaaatgttctgatgtcaccgctcttgtcttgtgtgtcaattccagaattagtaatacggcaattaagtagttaaactgttagttcatcacattactcttaagctttatcaattcggtgaagatcaaaagtactgattttttttaaagtagtagttgctagattttacgtgactgttgatactaaggtactgaaaaataggctgctaccatagagtacaaataagccactgataagaatcgttagattctttctccttttcaaaagtatttcgataatattgggaacttaacagtagataaatgtgacaagcagtctttcctgactctgaacttgttttggtttctttttctcagatcagtaatgctgatgtgtattttttagcagttcggtgttctaaaagttactgatggaatgagaagaagtgaagttacaattaggttagggtatttttttagtcactaaatttttatcacacttaaggtgtgacatggattcttttagttgaaatgggaggtcaccccacctccagcctgtagtttaggtagagtaaatcttgtcatgtagaagaccagttttccatttacaatgcagacctaagtataattgtattaggttaaggaacagcagtgctggcatatcatgactcaaaaatattaaggaagaatttatttgctcaaatgatattatgtgaaaatactgtctgcttccccaccttttaaaaacaagtgtcataccctttgataattggagctatgtgtaatcctctgcctaaggagaggaaaaactggtggtggtcatgaacagttgagaaatagctttatttaagtgcctcacaagcatcccttaactacaacagtcacatttcacagaacagatgggtttataagaagtttgggccatcttgacatattgagtatttatgaatgagaggagaga

SEQ ID NO: 193639 - DNA, 514 bp, Homo sapiens
gctcatgcaaaggccccggggcagaaatgtgcttggtgtgttcgagcaagtaggccagggccagggtggtagaaggtgagagcagagggatagcaggggccagatcacatagaggtttggaggccaagatcgagagttttaattttacgcggagtgggatggaaagctactggagcattttgagcaaaggagtgttgtgatctgagttacattttgagggcatccctctggctgctgttgagaaaagctgtggggtggaagggaggataattgctgaagcatggagaccagttacaagaccattgtgatggcccaggtgggagataacagttgcttggcctagggtgatagtggtggcctagtgtggtaagaagggatcaggttctagatattatggatagtgtgaagttcctgagaaggcggatagggatgggaggtgacagaggtggaggggttggacacccactcccttatagcaggagagagcagagagtaggcccgaagtgggtcaggt

SEQ ID NO: 193640 - DNA, 681 bp, Homo sapiens
tctacaggccacagtggctgaaaaacaacaggaaagtagcctagatgttcactttttaatagtataacatatctttcctccctattttaagtgaaaacagatctctgtcattaaatgaggatataaatatttatgtcatcattgttgaaatcccaaagaatagaccttacacatttctgtgttcattttaaatggccgtcttttgtgtccaagttaaatttaaaaagctccctcatccctctaaaggtctcaccatagctagttagctttcagccttgatctccttttactcttgcctcctctaaaaactttttgatagttctctaagaacctaatcggagtcatacttggcaatacactgttaaagaaaatgtgtatcctagaagtccagatagtctttgtagatataaattaaacatacaaatcccttgctgtaatatgagcagaaagtgttactgttttagacaagtagctgctattctgtgtttcagtacagaacagggttttggtcaaatcaaggtagtgatgacagaatgtcagaacttcacggtagctaggagtccctactcttcattgtagtcatttattgaatattttgaaaaggtaaaaactgctcattgttttattgtctgtggtaaacagcatgaattagatatactttgggcataaagtgctcactga

SEQ ID NO: 193641 - DNA, 461 bp, Homo sapiens
gcccttagaacttagcagagagacaatcacaaatacttgtaatatgatgcaactgctctaatagaagcatgagaattatgtatgtaaagcacccagcccagatgcttagcacagaggaattgctttcttctccctgttcctctgtaggagtccaagaaagcttcagagagaagcactctgtcttggaggataagtagaaatcttccaagcaaagagctggagatgacaatggtgtgctggtgaatgttcaactggcattccaggagggggacaaaagccgtgattgtatcacttgccaatttccatggtgtaaatactcctcctgcagcaaatctcaagctaccaacatgatgtcactgaacacggagttgggactagaagtgtctaagctagttagagcagctccagcacaccatagggagaccagatgaaagaaacagcccgtgaactgaaaacatctg

SEQ ID NO: 193642 - DNA, 619 bp, Homo sapiens
cagtgccgatgactcactgataaggaacaatttggcattaatttaaatgaatccaatgaaaatatttcataggaagtttataaacaaatactgataggggctattgtattatttccagaacagatagtaggcatgccagtcaacctttgcaatttagtcaacattccctttatccttaacagaatccacatctacaagcattctcatttactcaataaatatatggatatgggctatgtgccaagcactgagcaaggcactgaggaatgtacaaagatgagaaaaatagtccctgcattaaagcattaaaatattcctcttcatcttcatctttccttcctctctctcctaacccctttactgaccgaatgacatcttaaattccttctggaagtagatgtgttattaagtcataataaaaaagtgacctgaaaaaggccgggcgcagtggctcacgcctgtaatctcagcactttgggaggccgaggcgggtggatcacaaggtcaggagatcgagaccatcctggctaacacggtgaaaccccgtctctactaaaaatacaaaaataaaaagtagccaggcgtggtggcaggcacctgtagtcccagctactcggga

SEQ ID NO: 193643 - DNA, 217 bp, Homo sapiens
aatgaagggaagcgagtcctcgcccattgacagggtattgacttttataaattcccttgtgttccacatgtataattagttttcacttaaatttttagtacttatctacattttcttatctctaaaatgggaagatgctactagatttgaagctttgccgcttatgaaaactactaaacctaagcggcagtttttaccatttgaccaaaaaaaaaaa

SEQ ID NO: 193644 - DNA, 660 bp, Homo sapiens
aacaagtattcatagtgccattatatgccaagcattattgtagcttcctggaatatagcaacatacaaaagagacaaactataagtaaattattcagtacattaggtgatgagtattataggggaaaaggagaacttggtaaaggataaggagttctgcaggggatagaagtggcaattttaaacagagtggtcacagtagatctcaatgagaagttaacatttttgtagatctgaagaaagcaaagcagctagcaaagcagctatctggaaaaatatctttagaacagataaaagagctaatgtagacaaaagccctaagggaggaatgtctggaataaatttaaggaacatcaaggaggccagtgtgactagagaagagactttactattaatatgtggattatctatcatgcagacattatgcacaaatttttatacttgtgggtatcctagcatttaataattttctactaattattaaatcagcctacctgaatgtactaaaaaaacctgattcttaaacatacaaatgttaggcttttcacataattactaagaatacagatataaattcatttaaaattcatcaatttaaaaaattgtatcagaactctaattcagtgatcaaagttccattataatcctcatttactcttaa

SEQ ID NO: 193645 - DNA, 418 bp, Homo sapiens
tgttattcaacatagtattggaagtcctagctaaagcaatcagagaagagaaagaaataaagggcatccacattgtaaaggcagaagtcaaactatatttgttttcagatgataggatcttatattgggaaaaacccaaagatttaaccaaaaacctatccaagctaataaacaaattcagtaaagttgcaggatacaaaatgaacttaaaaaatcagtagcatttctatatgccaacagtgagcaatctgaaaaaaaaaatcgaagagcaattccatttataataatggcaaagaaaattaaatacctatggattaacttaataaaataagtgaaagaactctacaatgtgtcgaaatggaacctcactgaggcagagaagaaggcatgggttgagaaactgactggagtttctatc

SEQ ID NO: 193646 - DNA, 383 bp, Homo sapiens
tattattaaagcagttcatatacatttggaaaaatattagtgcatacaacaaaatagaaaaaatagcactgatcatgttaaagaagctgctcgtggccaggtgtggtggctcatgcctgtaatcccagcacattggaaggccgaggcgggtggatcatgaggtcaggacttcgagagcagcctaaccaacatggtgaaaccctgtctctactaaaaatacaaaaattagctgggcatggtggcgcacgcctgtaatcccagctactcaggaggctgaggcagcagaatcacttgaaccccctggaggtggaagttgcagtgagctgggatcctgccactgaactccagcctgggcgacagagcgatactctgtctcaaagaaa

SEQ ID NO: 193647 - DNA, 515 bp, Homo sapiens
  misc_feature (93)..(93): n is a, c, g, or t
agttcgcagtaagatgatgatatttgaggaaggcaggtgatcggagatctatgtgcgggttgtatgatatgggcgtgatagtagtagtactgntgacattgttgttgatgcatcagatttgccttcttgttaggattgccttagctatttgggctcatttttggttccatatgaattaatttttttttctaattctataaagaatgtcattggtaatttaataaaaatagcactgaatctgtaaattgctttgggcaatatggccattttaacaatattgattctatctatggacatggaacatttttctttatttgtttgtgtcatctctgatttctttgagcagaattttgtagttcttgttttaaagatgtttcacctctctggttagttgtattcctaggtattttattctttttatggctattgtgaatgggattgcattcttgatttgactctcagcttggaaattcttgttgtataggaatgctactgatttttgtgcattgattttg

SEQ ID NO: 193648 - DNA, 309 bp, Homo sapiens
ccatgggacgaatgactttgtttttggaatagattaattgtaagggaggagaaataagaatgagactctataaattacaagatacttaggaacatttcaaccatttgcaatgtgtagactttttgagtcctggttcaaacaactgtaaaaaaaagaaaaaacaggtggggccaggcacggtggctcatgcctgtaatcccagcactttgggaggccgaagtcggtggatcacttgaggtcaggagttcgagacaagcctggccaacatggtgaaaccccatttccactaaaaatacaaaaattagctgg

SEQ ID NO: 193649 - DNA, 474 bp, Homo sapiens
ctccgtcttcctgctgcctgtgcagtgttggtgaaactcaggagtgaagagaagatgtgaagagacacgcttgggaggaactcttctcacctgaggacacctgcccaggtgtgtcacacctactcttatggtcagctactcgtatggtcagccaggttcaggcccacacacaccagtgctgggttcctggtgcctgcttatctctctggagccagggaggctccgacctggaagcctggacccccgtctgtgtttatctcatagataccattccatattcccaggtatatgcttgtaatgttattcatgtcacacatacatgtcatgtcattgaaccaaatgcaatttgctgttaatgtaatactgctcgtgacgtggcctacttggatgtctgatatgagcttagaagcctaacaggaagttcacctgcaaaattggaccctccctattcccttgtttccacaataacctagt

SEQ ID NO: 193650 - DNA, 318 bp, Homo sapiens
cagacggatcacgaggtcaggagatcaagagcatcctggctaacatggtgaaaccccatctctactaaaaatacaaaacaaacaaaacaaaaataataattcaaactttggaaaagataatacattcatatgacccaaaatgtagaaagaatgggcacagtggaaagtctcccccaactcttaatcctcctcgacctggctcctggcaggtgcagatatagattcttatccacctctgattttttgtgtgtgagccactgcactccagcctgggtgacggagcgagaccttgtctcaactgcgccactcccgtaccag

SEQ ID NO: 193651 - DNA, 420 bp, Homo sapiens
atgttagtactactaaaaaggaaaatccaataaatgtggttccaatgagacctgcaatctgagagatcatggctcctagttccatctgccgattgtagcataggctctcttctccttctgtagcctctatgactgagtagtatacggtaactggaatgattatgcccagtacaactccccatatgtaaatgcatagttttctagcaaagttgggctggcgaaattttttcagtaaatggccataaaatattttctcatagcatgaagtagtctcttgcgaggaatccttttgcattaaggtagcatagcggcttatggcaatccaacttaaaattaagagactgacaaacatacttgcatgcatggatagagttcccagaaaattgaccactctgcattgagcagattgatattcccatt

SEQ ID NO: 193652 - DNA, 203 bp, Homo sapiens
gttggttttaatttctaatgtgtgtgcctgtagctgtaccactcctcctgatgactcacctggctcctgcgggcatctgagatgtggtttctgctccacacttcctgggggagcagaggaactcctcagcctcctctcaaacttctctcaggttgtgctgttcactccctccccaggcttccggtccacacggacagctctga

SEQ ID NO: 193653 - DNA, 720 bp, Homo sapiens
cttgattatgtcataatttgactgatttgaggacatgggagtgcttctctattctcaagccattattattatgaatctagagtccttttttggcatggtagttttggtgagcctgctacatattcagtccaaaaatctctgatagctgtaattgaaagcattattgagagaaaagatcattttagttcaagcaaataccgaatacttttttactacgtggaaattctctccctcagtaattttgttacagtcagtgtaaaggccacatcttataatatggataagaaaagttactctggacaatgcctcgttgagataactattttcttcagaatgtcctgttgttgaggattacctcaggagcttgacacccagctgcagaacacagagagattttccttacactttaagcctttctgttgccttcctcatgactaaaactgagtagtgaaaataatagtgtatggagaaaacacaaaaaaatgaaaattaaaaaattgtatataaccacacatcctggttctttaccatgttataatgggaggaattgttagctattaattaaaagccaataaaaagtttaaatatctaatttacttgactacatttttagtgtagtgtttattttgtcttttgtttcttgagcatctgtttatcattgacagtattgttgggctacccaccaggagtactgagctaccatccaagcaaaacccattc

SEQ ID NO: 193654 - DNA, 574 bp, Homo sapiens
ctggtccttgaccccccaaatccagacaacacatagagagatgcacacacatctcccatccttcctgcatccctcttctcccactgctcaagaggactcttgtcccttttctcctctcagggcctctcaccatcttaagttccactgtagggtggacaagacgcagaactggaatgaggcaggcctgggtttgatcctggatctatttactgtatcacctggagtagtttacttcatcgctgtggacttcaatttctcatctgtaaaacagggccagtagaccaggtgctgtggctcacacctataatctcagcactctgggaggacatgcaggaggattgcttgagaccagcctggacagcatagtaagaacccatctctaagaaatatatgtattttttaaattagctggtgcagtagcatgcacttgtagtcccagctactcaggaggctgagtgggaggattgctcccagcccaggagatccaggctgcagtgggccatgatcaggcttctgcattgcaacctgggtgacagagcgagaccctgactcaaaataaaaatggggccactta

SEQ ID NO: 193655 - DNA, 509 bp, Homo sapiens
gcattgcttcctcccctgagccttttctcagggtgggccatccacatgggcagtggcctgtcatcacctgggagggaccgcaggcgtggcgtgtttcctggagtcataggggcgctcacatgaggcgtgcctcccttggcagtcggatgttgcctggggagggtcgtaggacagtaaaacccggccggtttgcctgtgagtgtgcaagcatgagccccgtcacgcgccccctgagatcttctcagggagctgctaatcgccaccttccggggtttctgtctgtctgggggaccgcccgtccctggcaccggctcccggcaatcatttattatttgagacaggtagtttaatggcagcctgacccgtcgcctcctggtcgcctgatgtgtctggtggggtgtgggcgtggccctctcctgcgctgctcctgtctgaccagccgcccacggtaacacagaaacatctggcaggatggagtggttggcggaagacacatctgacgagatcga

SEQ ID NO: 193656 - DNA, 642 bp, Homo sapiens
ttgccagtgtaagtggagccgaatccaccatcccttacgccacactgccattgcagacccaaatgggcacatggagaccagcaaccccatcccctctgtgccaacattgccaccattgtgaacacacatatgaatgccaaggcctggtgcctctctctgtgccaccactagcatgaacacatgtacagatgccaaaaactgccaccactgcaaacacacgctcagaggctggcagccctgtgcctgccagcagtgtgatatagtgccccacttctactggtgtgagtgtgagcaagaacactgaaacagcactctgatgatactgcaccccagccaacatgaatgcaccccagcacactgccactgctgctggcatgtgcaaatgaacacattccactgccaccatccctaaaagcgctttggctggcaccacctattgaaatattgtggctagtggtccaggaacacatcaacctctctggcacagctggtgtgaatgtaaattacttcagccagcatggaaagcagtttggtgatttctcaaagaacttaaaacagaattgccattcagctcagcaatcccattatttgttatctacccaaaggaatacaaatgtttctgccataaagacacatgcacgc

SEQ ID NO: 193657 - DNA, 406 bp, Homo sapiens
acgagaagttaagagtaatctaaaatttaaggtaggtctctaaactatcaacaaaacactattaatgtacctaaaatgaaaacttgcgaattccagggctaaatgattcaaacaaatgttaatagaaaaggagggcaccaatctgaccattagccaatttaaaaatttacgcattacttgttatacataatcagggcaactttaagacgccattccaggcagatttggggtagtaggcggctggcttttagctaactctgcttagctgcggggtaaatgtcaaaggtcagccccatggcgaatctccctaagccccctgtcgcaaccgaagccgatggaatcaacaagacaaagatgctcctgacccactggctagaatcgtgaagaaaacgctaatccatgtcaa

SEQ ID NO: 193658 - DNA, 688 bp, Homo sapiens
gatccccccagggtcccatgaaagggcatcatgagaggcatatcccagctagacttcagcagcaagcactggccttcttttgataaagtggcaacataaagtgcagtcctcatatttttcctaatcctcaaacagcttcccagtcgtgcttacctatattacgctctttcacagatgaaagagaaaacaccaagaaaaggcacatatattagccatcattcttgtgtgtgtggaaaaaggtgaaaatagaaatgataatgccatgtggtattctgaacaacagtaatccctaaagaattgcttaatcaaaatttgctttccaaaaagtatccttaagactggaatgaaatgtgaaaaaatgaaagttaattggttgagaggatagaattctagttgactttatttttgactttttattagtattataatattgtttatacagtaaatagaacaaattataattggttgaaattatccgttagtagctgaggggtataacttttcccccaaatatctgaatgatacaaagtcatggtcaaagactgtgtggtggtctgttctgttttacgcacatagtgttttatatattgctcttaaatcacttggtgtttggattgatgcacttgtatttgtcctgtgggagatgcccagctagctctgccagctaactcctgctggagtgacagta

SEQ ID NO: 193659 - DNA, 707 bp, Homo sapiens
cgcggcgcagtgccatgtggattgatggtttgactttttccacgttcagttacagtgagcgagttccctcagcgtcagcagggtttctcagtcacgtagattatttgctgctaagtggaaaacaagttggttggtggccttttgatgtgatgccagcctcacttctggagatgtgggttttcttggaacccaaagcagagaaggctgagtggtgaggtctgtgctgttgtggatgctgggtgttcccagctgcacctggcccgctgtgtccttcccccggtggccgcctcccagcagagcaaggggagtttgacgcccacttgatccaccggactcatagttttaattaatcatgccctccagcctgcgtgcaccctaggttctaaacaacctgccagctcacacctggaaagtgccgtcccccgtttttaaaggcttttgagctgccctgtgggtggcgtagttgctgtttctaagaaagtagaagtgagttttaaggtcaggttttgaaattttagatgatagaatttgaagtccaaaatagtctgaagtattttcccttttcttacagacattttaaaaaataaatggttctaaggtcttttttttttttttttgaaagagagaggttaaatatttatctttcatatgtgaaaaatactagtcacaaagtacatgcactcatcttgggttatttattcttctaa

SEQ ID NO: 193660 - DNA, 370 bp, Homo sapiens
cttccaacatacaatcaaccatggcattatcttagatcaaggtcacaaaaacaagcccttggcctacaatcatgttgtggctctagaacgttcttaacaagctttccaggatacttctttcctctattaagcagtctaggaccctctctatattttttctgaaatcatgaggatcttgtctgaatagacctgtgtacataaaagatgctaactattctcacttgatgtacagtacttttagagttccatccagagactctgagttgggaaggctggcataccacacaggattaggatttaatctgaaaatgataggcagaatacaaatcagaattcaagcagcctgagccactgttcatgatgatggaaa

SEQ ID NO: 193661 - DNA, 291 bp, Homo sapiens
tcgaagctgtgtgtccttgggcaacttacctaccctctctgtgcctcgatgtcctcagctgtatatggagatgataatgtctacctcattgcatttttgtgtgcatgcgagaattaaattaacctaatcatgtaaaaggcttagggcagtgcccggtaaaagagtaaaagataaacaaagcctcttttccttctcccatggaaaaatgacatagggttgcctgttgagttttgttcccatggaaacctgacaatagtgtgaggtcagccggtgccatggattgaatgttcg

SEQ ID NO: 193662 - DNA, 364 bp, Homo sapiens
aaatgacttgtttcttggcctaattttacccattaataaaatgggggccatggggctggcagtagtaatcaaattaatatgatatagtagaaaaaggaccagattggatgttaagaagatgtgatttctagcacattggctgagtgatcttgggcaaatcaattcaacttattgatcctctgttacttagtgtatgagatgggaaaaataatgctgattgctttccttacaaggttattatgagaattagatgacataaactgtaaatacttagatcattattaagtaaactatgactggcttacaagtatataaataaaactgtttttctttgcaatttaaaaattaaattaatttttgattt

SEQ ID NO: 193663 - DNA, 282 bp, Homo sapiens
taaaacgagttaggaaatattctctctgcttctatcttctgaaaaagattgtagaaaattggtatatttccttccttaaatgtttggaaaaattcatcagtgaacccatgtgggctttgtgctttctgctttggaaggaacacttgtttggtgttctctaagtttcctggatctgtggtttatttcctgactttaatttggggaaattctcagtcatagttgcttcgaatactgcttctgctccttttgctttcttctctttctggtactcccatacatgta

SEQ ID NO: 193664 - DNA, 302 bp, Homo sapiens
aggaaggcaagtctgaagcgtcaagtttacaagagtgtgcacagcacaggaaaccagttgaaattgaagatggcaacagagaacggaaaagattgaaggagggaatttggaaagctgagcctagatgaattcccagaggcagtgacttatagggctcggaggccctgtgtatagggaaccaccgctgaacctgtgggtcagagggagtcatcaaagatgttgtctcttgagaaatgaggagctactgaagattctctctctcagatacctcaacattttagagacatggagtgatcctacag

SEQ ID NO: 193665 - DNA, 337 bp, Homo sapiens
tctctaggcaactgcttctaaacccaagcctccaaccctaggaaggggtctcagagtgtcgtgctggctggtgaccctgacgcttccctgtcattctttgtagcttgtcctccggacacctttgggaagaactgcagcttctcctgcagctgtcagaatggtgggacctgcgactctgtcacgggggcctgccgctgccccccgggtgtcagtggaactaactgtgaggatggtgcgtgcagcctcttctggtgcttctggaattacccctgggctgtaagggaagtgggagacaccacccctccacgtcctccttgtctccttcctcccactggag

SEQ ID NO: 193666 - DNA, 617 bp, Homo sapiens
cctgcctcagcctccggagtagctgggactacaggcacccacaaccatgctcggctaattttttgtatttttagtagagatgggatttcaccgtattagccaggatggtcttgatctcctgacctcatgatccgcctgcctcggcctccctaagtgctgggattacaggcatcagccactgcgcccggccgatatcatctttctagagccaacgacaagagcagcacttatttcctgtaccatgaatttgtgggatgattcagaccaaattcctcagccctcttcaggacattttggctaactgaggtcttcttgtcatgttggagaaagggagcaagatggggattctgcacaactcaagccccaacatgtggggacagactcaagtagatcaccactgaggctttttgtggtaatgtggatactgggaagcctgaggaaggctgtggccacaaacaggctcattgaatttaccccttgaaatctgcacagaacttggacagctcactccccgatgagccaccacatttatacctgcagctatgacctttctcttgagcctcagacccttatatcctcctgagcactggttatttctactttgatatttaaaaggc

SEQ ID NO: 193667 - DNA, 552 bp, Homo sapiens
ttcctgagctcagaggatggccagtgaaacaacttgctaaaatgctgagactccctgcactcgcgagactacgaaaacacgtgctgaagtcagtgagagccacggtggccaaagtctttgctcagaaccagctgcgcaggtccctcccccggttcctcctaggctgagtactctggggtcgcagtcttcctggacgtcgcctgttggttgttgtaggggttttaggtgtttttttttagggttgtcttgctgcattttgttgcggaccacaacgcgttgcaatcctagtcagctcaggggcttttcaggtatttgacttaagagctgagtagctgggcaggctgataagaacagacaaagcgagctcttttgcaggctagtaaactttcatcttagactactttggttcaggtgagggcggctaagcaggtgggaaggcagggagggggaggccgacaagcaggcattggggcccatccaagcaggggcctagtacgtcctgtttttttgtagtttgctgacctaaaccggatcaagccaccttgtcttgga

SEQ ID NO: 193668 - DNA, 507 bp, Homo sapiens
ttcgtctctccccttggagccaggtgggcccatttgcagctggcctgtcttggggacctgcagccaggtggcgctcagtaatacctccttgttggctctgaaatgagtctttggaggtgggcagagattctcgaatgcagcctcttcagctcccatgagtcaccccattcctgagtcgagcagccccacagtctcccaaatgtgaggcagaaaagcaaactgtggccgggcatggtggctcacgcctgtaatcccagcactttgggaggcagaggtgggtggatcacgaggtcaggagttcaagaccagcctggccgagatgatgaaaccccatgtctactaaaaatacgaaaattagccgggagtagtggtggtgctcctgtaatcccagctactcgggaggctgaggcaggagagtcacttgatcccggggggcagaggtcgtagtgagccgagatcgtaccattgcactccagcctgggcggcagagtgagactccgtctcaaa

SEQ ID NO: 193669 - DNA, 440 bp, Homo sapiens
tctctgcctgttcccaggtctcagttcactctgcccctgccctagggagtctcccgtgagtcacagcttcactgcatcctgaataagacctccctggatcagcattggagactttccaggatctgacccagacccttttctagccccatctccaacctgtctctaactttgccaacctaaataggcaggctagcccagtggtaagagtaggggagtttagtgcctgactgcttaggttggagtcctagatccaacacttacttattagctatgggaacttccacaagccacataactagttaaagccatagctccctcccctggagaatggagaggttggcagaattcacaatacagaggagctgtggcaactaatggagacacgtatgtctccattagctggtatttgttggtatttgttctcttttaacacatccacc

SEQ ID NO: 193670 - DNA, 129 bp, Homo sapiens
ggaaacccttgatatctccagaagcgctcagagtcactctagacaactggtgataagtatatggagaaagaaacaaatgaaagaaacaaaacaagccaggagaagtggttcactcctgtaatcccagca

SEQ ID NO: 193671 - DNA, 464 bp, Homo sapiens
gttgtttcagcctctgaggggcacaagccatcctggattcccctaaccccatgaggagccattctagcatctcacagcttaaaccagctctagctcagtcctcctggcttagtccatttttcttcctcaggctctgagggcctcttgttccttgctctgtggggttttctccagttgtctcctggctgcaggacatggcaggacatagaatgctgtcatccttccactcttcattggcatctccacccagtgtcacatatgaccctagccctgctctccccttgccagtacccctctgggattttgcgagagtccacaagttgtgcatgtggtggatatattcaggccatcttgtgtgtacaagctagagggtctgcttccacctctggccctcagtgaattgctgactaacctgtctcaacacagcacaactgtacacaccttttcctggcctcatccctaac

SEQ ID NO: 193672 - DNA, 781 bp, Homo sapiens
ggctccatcgaacccgtgtgggagctgctcccgcggtttgaatggctgcgggctccgccatggataggccctgcccggggccaggccttccaagcccagaaatagaaacgtggccacagctcccacctcagtcccgaaactggagccgaagccctctgtccctggccgcaccagagccggcctccctgtgtgctgccagccacgcagcagcttggagaggacccgtccttaaacacttcccgactgccgggtccagagctgcgccctccctcccttactcatcgcgtttgagttcgcagttggtgtcctggttttccacctgagtgggcgctgggatggaagggtcccgcccaggcgtctggtgcggtcaggcgcacataagcagcctttgcaggaagccgtggctgggcctcgatccgagttctagcgccccaccgtaagggagagccaggtgcttcctgtccctcccggccacctcaagtgtaaaatcacggggttcagggcggtggtcttgggggctgcgctgcacagccgtttgcagctacagcagctgctcggagctgtctccgactttgcacccccgtttcacagagggagaaaccgaggcccagggagggcggggcttgcagcggacgggtggaggaagggctcctcctttcaggtcccaactctccacagtggcaatgaggtcgctcttttttcctttttttgagaccttgtctcgctctgtcgccattgcactccagcctgggcgacaaagtgagactctgtctccaaaaaa

SEQ ID NO: 193673 - DNA, 781 bp, Homo sapiens
ggctccatcgaacccgtgtgggagctgctcccgcggtttgaatggctgcgggctccgccatggataggccctgcccggggccaggccttccaagcccagaaatagaaacgtggccacagctcccacctcagtcccgaaactggagccgaagccctctgtccctggccgcaccagagccggcctccctgtgtgctgccagccacgcagcagcttggagaggacccgtccttaaacacttcccgactgccgggtccagagctgcgccctccctcccttactcatcgcgtttgagttcgcagttggtgtcctggttttccacctgagtgggcgctgggatggaagggtcccgcccaggcgtctggtgcggtcaggcgcacataagcagcctttgcaggaagccgtggctgggcctcgatccgagttctagcgccccaccgtaagggagagccaggtgcttcctgtccctcccggccacctcaagtgtaaaatcacggggttcagggcggtggtcttgggggctgcgctgcacagccgtttgcagctacagcagctgctcggagctgtctccgactttgcacccccgtttcacagagggagaaaccgaggcccagggagggcggggcttgcagcggacgggtggaggaagggctcctcctttcaggtcccaactctccacagtggcaatgaggtcgctcttttttcctttttttgagaccttgtctcgctctgtcacctacgctgaagtgcagtggtgcaatctcggctcactgcagcctccacc

SEQ ID NO: 193674 - DNA, 227 bp, Homo sapiens
atcagtatggccaccaagaggcgcccaggatccatcctgcatccacctttcatggcttctgccagctggtcaattgtttctgtacccacaagcctgcatctccctgttctggatccctgcacagaactaggagactccttgatcccagccccaaccttccaggatccactgtgctcattctcatcctttccctgtcccacaccaccaaaacaaccacaagtcccatc

SEQ ID NO: 193675 - DNA, 238 bp, Homo sapiens
ttaaaaccttttctctaatagaaccttttctctaatattaacgaatactactttaggctctgatataatttcaagctttgattctgatatttatgacaaaaatatgccactgcaacccttttttggttgttcatagaggtaatacactgtggtatagtttagagtctttcatttgtgactacagcctttcgtttctgactaaataaggcatattataaagatctaatgttctggatca

SEQ ID NO: 193676 - DNA, 163 bp, Homo sapiens
cacttttcttcacggctgcccgctttataagcactcttacactcccactcattttagcgattgaggagagactcagcaatcagttgaccaaagcatctaacatactttttccatatttctatatccttagtctgttcactgagggtgatttccaaggagtcga

SEQ ID NO: 193677 - DNA, 303 bp, Homo sapiens
gatgctgtggccgaccacacggtgaaggtgttggcacccaaagcctacgggaggcttttctaaaacaaggcctaagtcaggcctcacagcgctcagtaacagatgagaaggtgcggaaccaccttcaaacacccgctacctgctcacaagaaggaagtcctgccaggcgcggtggctcacgcctgtcatcccagcactttgggaggctgagacgggcaggtcaccggaggtcaggagttcgagaccagcctggccaacatggtgaaaccccttgtctactaaaaatacagcaattagccgggc

SEQ ID NO: 193678 - DNA, 506 bp, Homo sapiens
gagttttaagaatggggtggttgagagtcggaggctacagagaggttgaggagcttgaagaataaggaaaaggtcatcaaagtgggtgatttgatcattgtgactatttagtagagtgatgtgggttgaagccaagtttcagaaggttagggaggtaaggcaggaagtagtgaccaaagaggactcttaagaaatgggtggagaaggcaaagtgtatgatagactgcgcagtcaagagcataactgtggagaagagatgtttgtctaggggtgggaggcattactgtgagcctgtttctgagggtgaggaggtaagcttggagacaggcatatcttgaagatgcagtggctgctgttgtggattagagtttggtaagaagtgagaggttacagaattctaggtgttccagatagataaactgctttcttcccttttcatttggctctggctgtcattttaacgttctaattctttaaaatcaccagcagggggacagggcttgtat

SEQ ID NO: 193679 - DNA, 287 bp, Homo sapiens
ttgccaagaacctgtttgtgttagggaaatgcctaatccacactgtcctccagccacaccaggttggggagtctaagtgaagatgtaaggggtggcactggttttaaaaacaaaaacagaatcatggtttctgcctctgagaacctgctcccaccccggtacaatggctgcttccaaagaggtcctgctgctgtgtgctgtgttcccaggagtggccatgaagattccacttgtgctgtgagcatgtatagtcatacctcctgcatgcacgggagacacacactgtt

SEQ ID NO: 193680 - DNA, 508 bp, Homo sapiens
caaataaccagaagacagaacgaaagggatatcactttttttaattatgctttagttggtagcttaatttggctgtaaaaagagggaggagttcatctccctgagcatattctcactaagtaacacactgtgtagcacttttaaatgcaataccttgagatcagtattttaaatgtaatactttgagaagaaaccatgtcaaataggcaaattccagtcaaaacagtgttatgtttatggtcttcgggtcgtttacgacccgaagacaactgcacattcttcagctgcgtgaagatccacaaccagctcatctcgtccgtctccaacatcgcctgccccaactttgatgccagcatttgcatcccgggctccatcacattcatgcccaatggatgctgcaagacctgcacccctcgcaatgagaccagggtgccctgctccaccgtccccgtcaccacggaggtttcgtacgccggctgcaccaagaccgtcctcatgaatcattgct

SEQ ID NO: 193681 - DNA, 411 bp, Homo sapiens
gttagaggtgattacttgggagatctgaatcatgcttctctcttgggtattttggttggaggcggagaagtaatatgggggagcagaatgaggatagaagtctcataatgactcagtagctaatgggaagtgccagtgggaaaaaccagagtgctgtatgataatgacttactgtcttgtaaaaggaagagatacacaagaatacaggcttttgctcccttgtcaccactttcacttctctccccttccaagttttcatgtccatcttgcacaacttctctctctctctccattcctttcttgtttccccctgggtctcggtctctctctctatttctctaactgttgctcaattactcttcaaagagcattttcttttaatatctgccacatgttttagataaacttgta

SEQ ID NO: 193682 - DNA, 719 bp, Homo sapiens
cattgtgttgtacccttggaggttcagatcataatcattagataaagaaatctgttaaactgtatattgtatttttcaattactttgaccatataaccgttttatttgttagtaattaaaaccctaaggagttactgtcacatgttggaaaatgccagcccaagactcaggtataaaatggaggaggagtatttttcagggtaattgactgctcttcctcagcctggatctgaaattgttaacactgagaactaagcaaccctgctcacagtttgaaatgaagacacaaggaagaattccaggttcttgccctgtggtactccctgggtgaacttctgtgtcaattgtaaatctagttttaattgaaagttactaaaatacatcatgataaaaaaaatggtgactctacctgagacctcaatttggtggtaaatcatcataaaatagtgatgattaaggggaaaaatgagttatttggcttatctaaaatagagaggaaacaaaaatgaatgaacatgttctgtaatttgtggagaaaatctaaacacttatctcaacggctaaccacgtttgggcaggagaagctttgctatacccattcaatgttcatttaaatttagaacgggatccacagtgtaagccaatgcttcttaaagtttaatgtgcatctgagtgacatataggcttattaaaaatgcagggcccccaaaaggcactga

SEQ ID NO: 193683 - DNA, 146 bp, Homo sapiens
aactacaagttccatcttgaggtgtgattagattcaggttgaatatttttggctagaaaaattcataagtgaggcaggcacggtggctcacaccgtgagtgtgtaatctcagcagtttgggaggctgaggtgggtaggtcacctga

SEQ ID NO: 193684 - DNA, 427 bp, Homo sapiens
agtaaatgaagataaaacaaaacattttatttttcttaatctgaagtgatgtaacaaatagcagtttgttcgaaataataataccagcaatgtattcagtgattaccttatgaataagtgaaatacatgacaacaatgttataaagaatgaggctgggcgtggtggcttatgcctataatcccagcactttgggaggctgaggtgggcagatcataaggtcaagagttcaaaaccatcctggccaacatggtgaaaccccgtctctactaaaaatacaaaaattagctggacatggtggcatgcgcctgtaatcccagctactcaggaggctgaggcaggagaatcgcttgaacccaggaagcagaggttgcagtgagccaaaatcacaccattgcactccagcctgggtgacctcttgtcaaaaac

SEQ ID NO: 193685 - DNA, 524 bp, Homo sapiens
aaggaactgtttggggaagggctttccagcagatggaatgacagccagggacagctggggtctggaggccagcaggattggagcagaatgggcatgtggacaaaagtagtgcatagggaggcctgagaaagtagactctggaccacttattttgactttgcatgaaatgagaagtccctgcagggttctgggctgaaatgtaacatgatataacttaactttcagcaggatcactctgggagctgtgttgagaatgtagaggaaaacaggggagaagcagggtggacaattaagaggatattatagaaattcaggcaagagatcacagtgcttaggaaaaggtagtgagagatacttggattctaggtaaatttttaaagtagatttcctgataagattaaattagacatatgagagaaagagaggggaggcaaggatgactctgaagccttgggtctcaactaccagaaggatggaacgatggtcaagtgacatagcaggcagagcaatttttggagaggaga

SEQ ID NO: 193686 - DNA, 876 bp, Homo sapiens
cattcaaagcaaatggtaagaaaggaactttcaaaactgttttagttttgcaaagattagaaaagtacaattctactttctcaacttttcatccttgttaaaggcctggaaatttgcagcatttttttctttcttattttacttttctaatttgttacacaaagtgaaattccacacataaacatgcaagctgaaggttgggtttattcataggttttgtcttaattatagatatttagtttattgaatatcttattgagtattgagtacctgctgtggtccaggcatcttctgaggtcccaggtgtacaaagaggagccaattgtggttactgcctctatggaattgcctagaagtgggagagagagagatgagtgagccagcacttataatacatctacctaggataaaatgggagcacagaagaggaacatctgtatcagtgggtctctgagagcttcttcaggaaaataatgctttatctgtgatttgaaatatagtaggaatttagcaagatagagaaaaaggaaaaggaggtaaaatatttttcaggtaaaagaatgtacatgggtatagaggtgatcattattagcaaattggctacatcctaatttgtaagtatttgtggatttttcaaaccttatatttcatgtagaagagctgaatgcattagtctcatctccaagatccaggtattgaaatttaacccatgcataaattgaatttttttctgaagtctttaataagagaaaaataaaaggaaaaactacacagtgtatagtagatttcaatatagcacagcaaacactgatgaattttttttgcaatgagttcaatattataaaatagaacaaaattggagtttttaaaaccaaa

SEQ ID NO: 193687 - DNA, 337 bp, Homo sapiens
acgaaggtaactcctggagatcacatgagagcatgaggcagtggagatggagaagagcacccagcctcatgcctcagtgcttcttaggcttttacagcctatttgttctttcacatttggaggggagaaggtaagtctagagataaagatttgagagtcagacttatcaggaacttctagaggaagcttgagacaatcgaaggatgacagaaatgaaaaggttccatgaaaacatctgtatttagaagacggaaggaggaaggagaaccaagaaggaaatggggcaagaaaggcaaaatcgggtagaccaggaggaggaatcagggatcactggaca

SEQ ID NO: 193688 - DNA, 967 bp, Homo sapiens
aggaagggaatacgaagcctggtaaaggcagtaacaaccctagcccgactctaaataaagtcttcatgatagaagggttctctgcacactcagaaaactcttgggctccaagaaaagccggggaggaactcagttactgaatgaacaaaaccttatctgactcagccagatcccaaaggagtgaagaatcctggagctggatgagaccttgttcattcccctctggagagagtaaaggacttgcgtggggaaactgactagtttgcagtggtatgagattctagatccctggcttcccagttctcagaagccctactgagactacagcactgactcggactctaattgcaaaagatgaacacaggaggtacagtcagcattaagctccagacagtatgaccatttgagcatccataaaaagacactgagcaagcaagaaatatcttaagatggcttccacttagtgtcaaccccaattggctccctgcaattaaataagctgaccagaaccctaagagatgaaagataaatgcacttccttcaaaaatagatgttattcttacttctgtttatacaccaactgtaaaagttctgtttcaaattcttctctagtagggaaagcaggaagattcactgaatgctggcattgtgtgggtgtccccaaatgcactcatttgaccacaaggaccctgagaagtgggcattttatactcgatgcctactgcacactgccggggagaagccaggcctgaacagttttatctggctccaaagtccacagtcttcctccacatcctgttgccacctccgacattcaaaaagatgtcaccacttgcctgacaaacagggcactgagtcacctattcacacagatgcgaaatggcaaaaaaaatacacgagaaagatcctttatgcagaccagtttggccagaagcagcaaactatgctctcagcaaataatcctgcg

SEQ ID NO: 193689 - DNA, 389 bp, Homo sapiens
attcaaagctctacatcatttgttccaaatttctgttctctattctcatctcctactcaaatgccaacaggaagcgtactctgattttgaagaattaacgaccccggtctctgttctcccatggtgcttggataggttatctttaacagttcttaccaatcattttttgctctgtggcatgcatgtatatcttgctccctttctagaatgggaacttgttgatgtcagggactgtttcacttctctttgtgtgactggagagacccacataattgtccaggttgatttaagtatagaatccatttggacatggaaactctctctctctctttttttttttttaaagagatgggggctgggcatggtggctcatgcctgtaatcccagca

SEQ ID NO: 193690 - DNA, 185 bp, Homo sapiens
gagaagctgtgttggatgcagccacccaaagggacctcagattcatggtgtgtgaaggaagccaaacgcaagactatgcactggataattccatcttgaggaggtttaaaaatctggcaccatgactctttggtgatggaagccacaatagtattaaccttggggcgaggggacactgactggga

SEQ ID NO: 193691 - DNA, 305 bp, Homo sapiens
atttttttatagctcatcagctatcgttagtgttaatgtattttatgtgtagcccaagacaattcttcttcttccagtgtggcccagggaagccaagagattggacacctctgctataaaaaatactaagggaattaataaccaaaaattcagactagagattattggccgagaaggaagaggagtaactagggaaggcacaaagcggacttcaaagaaatctacttcttaagctaggtggtatgtacaagggttcatttatcattctcttaaacgtctatataatcttacatggtaaaatttat

SEQ ID NO: 193692 - DNA, 364 bp, Homo sapiens
cgtcagctcggacagtcggtctaccattgtagaagctgggatagtatcagtgatcaagtgagtccacatccacccttgtacagataaccaaccagaggctgggagaggtggtcacggtggcactcagaaccagaattcatgtttttggtttttctttttctttttgagatggagtcttgctcctgtcacccaggctggagtgcagtggcacaatctcggctcactgtaagctccgcctcctgggttaaagcaattccctgcctcagcctcctgagtagctgggattacaggcgtgagccaccaggcccggctgtctgtggtttttctttctggaatttctgttactcagatggtagaaccgact

SEQ ID NO: 193693 - DNA, 327 bp, Homo sapiens
tgtattggtggtgcttgcaattgtttgattttcctggtaccatcatctgaatcaaactggaaaatgttgaggaaattaaaacataaattttaattaaatttctttttctgcacatagatcaatttttcctgttttatccaacctcttgtacttaagagttaaatttcgagaaatcagttaagaaatctaacttacaaagaaatggataaattttatagttgttttcctagacttacatatctgcattttattcagatattgctgtattttcattaaaaattcctgttagtgtttgaatatagaaaactgttcttagagacttaacag

SEQ ID NO: 193694 - DNA, 419 bp, Homo sapiens
aatgacaataaatgtaagtggtctaaatgctccaataaaaaaacaaggattgttagattagatttttaaaatcaggacataactatacgctgccaaaagcaaacacactttaaatataaagatacggctagattaaaagtaaaaaggatgagtaatatatgccatgctaacactaatcaaaagaaagctgaagtggctatataaacattagacaaagtaggttttagaacaaagaatattaaaagggttaaaggagataatttcataatgataagtgggctaattcaaaagaacaaaacagtcctaaatacatgtatacctaattaccaaattgcaaaatacatgataatgaggaaaaaaaatgataaagccataagaagaagtagacaaaatccacaataattgctagagttatcaaa

SEQ ID NO: 193695 - DNA, 467 bp, Homo sapiens
tgcagaatgagagaccacatggaggaccagcctacttatccctctgagaccatcctagatcagcctatagcaagccagtccctgaacatacaagcaagtccagcccagatcagcagagccgcttaccctaggagcagatgcatcagtaaatccagaggagaccaatggcttaaacaataatcattgcaacaataataactggttctgtgttaagtcactgagtggttatttatgccaaaaaaatctgttactagagacaacaattagtgagataggcagaggaggtcagcttgagtaggactttgtaggcatgatgtgaatttggtgttttgtcccaggagttatgtgaaattactgaaatgttttgagcatggaagtggcacaattaggtttgtgttatagaaaaatgaacttggctattctgtggagtataaatggtgggagcagggatttagaatgaatcccta

SEQ ID NO: 193696 - DNA, 475 bp, Homo sapiens
tgaggacctcaattctacaaaagtacggaactgaattctgtcaacaacctgaataagctggaagtagattcaccccgcaaagcctcctgaaagaagctcagccctgttgacaccttggtaggccttgtaagaccctaagtggaagactcagttgagccacactgtacctagacttctgatttacagaactgcaacataatgagtgggtgttgattttagccactaaatgtgtagtaatttgttatgatagcaataaaaaacgaatacacctcttaagaggtgaaagagaaaagagggagatacaagaggcttagaaagcaactggtctaagataaattgatagacaactaggggaatgttttcaagaaaaaattgaatgagttccaagcagtagatagaaatggataaagagaacatgaacatactcagtgacatggtgaagaaagtatttatttattatttactctaaaggaaa

SEQ ID NO: 193697 - DNA, 204 bp, Homo sapiens
cagaatcgcttgaacccgggagaaagaggtcccacagaggcgggaggattgcttgtgcgcaggaatttgaggtggcagtgagtcatgatagtgccactgcactccagcctgggccacagagggagaccctttctcaaaaaaagagaggaaaatcaagattagcaatacggaaaagaaaagattttcttgatccactacccagag

SEQ ID NO: 193698 - DNA, 445 bp, Homo sapiens
cagaaggggagctgggtttgctgttggttttaacccagagtaatcatttaagagggaagagattaagtcagcagaagcccccaaatcttatttttgtcggtagctcccacccgtatgcatgaccccggcatggagcatttttcacccacgctcgctctccccgcctgtccgtccaaatttcattgctgccaaaggaccaaaaaaggctgcctgtctgccaagaggtgacccagagcctgggtccaggcacctgcatgttctcacgcccgccacagcccgtccctcccaggctctgggaccctgggtcctcagctgtgatggcacaattgctccaagcattccccagcaccaaaccccagtgaagtcagattctcccagtgaagtcagattctcctggcctttcctgggtcccgcgttcagactacctttgggttccccagcctct

SEQ ID NO: 193699 - DNA, 454 bp, Homo sapiens
cctccactaggttgtgggaaagcagaaatcatttcaggtgaaggaagttgtaattaaagttttcagctgaaatgtaactacagaaaaacttcttgttgagaaaaaatacaatatcataactgagcagtttcatgagaattgtctcattagaagttgaatcagtccgggcctgatggctcatcccagcactctgggaggccgacacaggcgggtcacttgaggtcaggagttcaagaccagcctggccaacattgtgaaaccccatctccactaaaaatataaaaaaattagccaagcatggtggcgcgcacctgtagtcccagctacttgggagactgaggcaggagaatctcttgaacccaggaggtagaggctgtagtaagccaagatcgctccactgcactccagactgggtgacagagggagacctctccaaaaaaaaaaaaaaaaaaaa

SEQ ID NO: 193700 - DNA, 226 bp, Homo sapiens
gaaaaaagccacgcgtgaaaggttatatattatatgattctacatatatgaaatgtccagaaaaggcaaatctatggagacaggaaaatagattcatgtttgcctagggttaacggatatgaagaagcttcataaaaagatatgatcttattggaatgatgaaaaaaacattttcaacctagatatggtgggctgggcatggtggctcacgtctgtaatcccagca

SEQ ID NO: 193701 - DNA, 188 bp, Homo sapiens
tcagcctcccaaagtgctgggattacaggtgtgagccacagtgcctggcctaagattgcctttcttctgttgctgtgtatacattttcaactgtatcttcctttgactgtctttgaaaaatgatgaattacatggtacccccatggtggacgaatcgagacatagtaaaattacatgtcgctcagtta

SEQ ID NO: 193702 - DNA, 378 bp, Homo sapiens
gaaagtttagaccagtccctaaagagcgccttcatgaccccactctgtaaccatcttccagaagcccccaactctccttatttttttttttcagagggagagaaaggggtagagatggaatctcactatgttgcccaggctgatctcgaactcctgggctcaagcgatccccccagctccagctcagcctcccaaagtgctgggatcacaggcgtgagccactacacccggctacttaatttattttttgagacagcctctctttgtagcccagactggagtgcagcggtgtgatttcggctcaccgcaacctctgaatcctgggttcaagcaattctactgcctcagcctcccaagtactgatctataggagtggtg

SEQ ID NO: 193703 - DNA, 274 bp, Homo sapiens
atgattagctctcttaagatgaaagaagcttcatctggcttcttgctcttgagaacgtgccctaagacgtggtggctcaagcctgtaatcccagcactttgggaggccgaggcgggcggatcacgaggtcaggagatcaagaccatcctggcaaacacggtgaaaccccgtctctactaaaaagtacaaaaaattagctgggcgtggtggcgggtgcctgagtcccagctactcggggggaggctgaggcaggagaactgcgtgaacccgggag

SEQ ID NO: 193704 - DNA, 423 bp, Homo sapiens
agagaaaatgaaaaggaaaataagataaagtcagaggtaagtttaccacacaaaccatatgctacaaggtcctatacagttataagagaaggaacacacatttgactttgagttcccttcctaagagagaaataacaatcagttacaagtcatgatgaccacgtaatacaagtgaaccagctggtcaaaggaaacagcttttcctggtaccgagacgtggagaaaaaattactaccatagattctaatgatgatgatgaagatgataaaaaacaatagatctgaaatgtttccaacacaaagaaatgataaatgtttgaggtaatggatatcctaaatatcctgatttgataattatacattgtatgcatgtatcaaaatatcataggcaccccataagtatgtactatttattttaaacatt

SEQ ID NO: 193705 - DNA, 647 bp, Homo sapiens
caagcttccgtctaaaaaaaaaaaattgctgctttttttgccctgttcagttcatgaatgaatttttagtaacttgtaagctatgggctgaaacttttaggcagctaacctaattctgtcatctactcaggtaagagaaacagaatttatatgtgaatacttgagtttaaaggccaataagtagtgattttgtttttctagtcttgtcctgttttttccatcccatccattttcttcctgcacactgcactactattaaatacctcttgccaaaatttggtttttgtcatgttcaagacttacttttaatgtatttgttcacttattcattctgcagatatttagtgcctactctgatctgggcagtgctcaactctgaattcttccaaccagctgtgcatgctgccatcctctctcttatgcagccttaagtttgtctgtccatggttcccatctttgctttatatccctggtcttaccacgctcttctgaagtacccatcctttccttcaaatacttttaggaaaaaggtctgataatagtgatttataatgtagttggatttaagtcgttgttttacgtctcaagaggcatttacattttgacttttcctataaatgtgaatgaaaagatacctctttcaaaaa

SEQ ID NO: 193706 - DNA, 396 bp, Homo sapiens
caagcttccgtctaaaaaaaaaaaattgctgctttttttgccctgttcagttcatgaatgaatttttagtaacttgtaagctatgggctgaaacttttaggcagctaacctaattctgtcatctactcaggtaagagaaacagaatttatatgtgaatacttgagtttaaaggccaataagtagtgattttgtttttctagtcttgtcctgttttttccatcccatccattttcttcctgcacactgcactactattaaatacctcttgccaaaatttggtttttgtcatgttcaagacttacttttaatgtatttgttcactcatgctcctgacatctgtcatactgttctgctggatttggcagcagtccacctttggttctttcactgccttc

SEQ ID NO: 193707 - DNA, 832 bp, Homo sapiens
gtgaccttctagttcaaaaaaaatgtatagaattatccatgcaagggattctggtataggaggtgtgggcggtgagcaaaaagagatagtggacgtagactacttgtttaaaaagcctgcagtgtatagaaggaaaaaaaaataagctgaccatcagttattggctgggagatgcccaggaaagacatgccttggctcacaccctggggcagattctgagggcactgctgctggaggctttcagctaactgtgcccatcacagctgagtgacaaaatgtcttgcagggagatctgagcggcacatgtccttggtataatttatgccactataaataggacactaacactgaaccatttatgccactataaataggaagctaacactgaacctgatgaacgaatccatcaggaacaaaagacagacagacacgcacacacacacatgcacacgcacacatcagcatggctgtatttggccatctatcagtagtcaacggttaatcagactgtatattgggaacatacatggctttgttttcttacagacttaaatttgaagaacagtgatgatgaactcattctatatcactttggtttaaaagttgcttagcaatgggacaaaaacaaaagcaactaggtttatatttagtgctctatctatatgcatctggagcacattttggaaataattcaaaaaggccaattcatttcatgccttctgctactaaatgaatgtgggagtcaagctgctattttcacagtgcaagacatttattgttgacttaaaaaaactctcccacttgcacataatcactatcctgacaaatgaca

SEQ ID NO: 193708 - DNA, 399 bp, Homo sapiens
cacgtagacgctgaactatgtgacgaaatagacaaaagctacctatggagttgtgccccctacgcaggtacttgcatatggcaaggccaagaacacgacaaagatacccactttcaccacctcttttacttatttatttatttttttttgagatagagtctcgctctgttgcccaggctggagtgcagtggcgcgatctcggttcactgcaagctctgccttccgggttcacgccattctcctgcatcagcctcctgagtagctgggactacaggtgcccgccaccacgcctggctaattttttttgtatttttagtagacagggtttcactgtgttagccaggatggtctcaatctcctgacctcgtgatccgcccaccttggccttccaaagtgctg

SEQ ID NO: 193709 - DNA, 233 bp, Homo sapiens
tctctgccctcatggagcttatagtctagctgagaaaggcaaatagatagacgtgtaatatatcaactggagataaatgctgtgaaggaaaatgaaactgggagtactgagggtaggatattgtgtgtgtatatacatacatatgtgtatgtatatgtgacatatatatgtagttggctaggaaaagctgctgtgatatggtcacatttgagcggagacttgctgttggaata

SEQ ID NO: 193710 - DNA, 571 bp, Homo sapiens
tataagattcacttaattcaaacatatattcatttaatgcactttgcaagtattcttctggaatagcatatgacaagaaactgtatttgcccacatttccttggggacatacacccaggggtactaactgatggctaaaaaagtggcatgcaattttgagagagattgttgtttctccatgtagacaaggagagatatttgtagaagtgatgcagcattttaccagatttatcactgaacaatttagtctagctgacttgatttatctttctgttgaatttaactagtggaataacttatcagtattggacagttgtgtaaaagtagtgaattactcattagcttgctggtaaggatggtgctgtgacagttcaattaaggtttcattaacaactgtctgctgtattttatctcaaagtaagagttccagtttacctggtaatgtgattgtgggataacctgagataacatttgttgccactgatagaatgttgtttatgggttatcaagatatcatatacaatttgaccttctttttgagacattacagcctccaaacacccacatggac

SEQ ID NO: 193711 - DNA, 285 bp, Homo sapiens
agttaggatttgaacgtggactatttctagaaataaagctaatatcagctacccctgattctcttaaatataagattaaattaattaaatataattataaggctaaatataattataaaattaattaccttaaaataagccgggcgtggtggtgggtgcctgtagtcccagctgctcgggaggctgaggcaggagaatggcgtgaacctgggaggcggagcttgtagtgagccgagatcgcggcactgcactccagcctgggcaacagagtgagagtccgtctca

SEQ ID NO: 193712 - DNA, 508 bp, Homo sapiens
tgctgctctaccttcaccttctacccccaccttggtcacattggaagagtctcactattttgtcttaacaaataactggctttttgtttagtttgtttttttatcttctgttacattaatttccacttctattttgatcatttcttctcatatacattctttaggttcacttttcagtggatatttttacttcttgatacggtttgtctctgtgtcacctccggtaggtatagatgaaggacgagtttgagaccagcttgggcaacacagcaagatcctgtctcttttcattacaaaagataaaaaaattagctgggcgtggtggtgtgcacctgtttccagctactcgggaggctgaggtagaaggatggctgagcctgggaggtcagagctgcaatgagctgtgatcacaccaccgcactgtagcctacgtgacagagtatgaccttgtctcaaaaaacttagactaacagtaaacaaaacacagtcatagagaattgagggtaga

SEQ ID NO: 193713 - DNA, 498 bp, Homo sapiens
ggaagtggatgggcatctatgggagtggacggctgggcaccatcctgtcactcaggggctggtctggcccaagtgcccagaggacctctagggggcagtgtcatgccattcaagacacattggagccagctcattcattcagtggtgaaattcatgtttactgagcccctcttgtggtagatactctgggaggtgctagggatgtggtggtggggatgtttcaggcctgggcctgacaaggagagaggaaatcaagcaatcccacatagtactccactctgtgagggaaacaacccagaaaggaagatagatgtggctctaggtggatgggagaggaagtcaagacctgaaaaaccaggagacagatgttctgcaaagagctggggagagaatgcatgcagagggaacactggtacaaaggtcctgaccatactcaaagccagtgtggctccaggggctccagatggagctcattcagctgtgccatgtgggacgcag

SEQ ID NO: 193714 - DNA, 886 bp, Homo sapiens
gacgaaatgtgtttaagagttcaactcacaaatttagtttatttctctgcctataaatagagatttgtagattcttataggtagagaaataaaccaaattccaactgctccttatgatcattcctctaggtgttaagagtgagagagggaaggcttgacaaatttactgaaagaggtatgggagtgtgaaagctttagacaaggtacaaagatccactctcagaaagagaaaatctgaaaaaagctccaaaacattgatcataggtttggagtttgatagttcacagctctatgtatggagaagagcttaaaggtaagcagtaccagaattggtagctttaaattataagcattgcctcataagggaaacatgaagacttggagacatgtcagtgaagacttggagacatggcagtgaagaagaagaaagaagaaaaaattcttcaggaaaagaaaaaaactgaacttagagaagagggtgttgttgaagtaggagctctgcctatgaaatgaacagaaatagaaaagagcaggccacatccatacagaactgtaagaaaaaacaaacaggaaatgtgaatcagcatttcaactgatgaaaatctacccccatcaaaaaaagcaggaaaaaattgacacaatgctccaagtgaaattaaacatcctcaaaccaatgtttggagatttgaaaaataaaattaagaaatattctgaaacaaatacacaagaacaaaaagcattaagaaatgaacacaaagtagattaaacagaaaaatagaagataaaatcataaccaataatgaagttttaacattcccacatttcaaattcaaatttaataaaaagtcttgaagaaaagcaggaaaacaggataattgagatgaga

SEQ ID NO: 193715 - DNA, 430 bp, Homo sapiens
aaatatgattagaaatttgctttgtgaatgtggaaccaaactagggaacgtgtatgtttggaacgttgagtggcatcagaggatgatagcttcacgcaaccatctcagtaggtttaagatatgccattgctttcagcaccagctggagttcatggaccagggaaaccctctgtcttaggtgggcacagccagcctttgttctgattctccttttcctgtaggaaaagcatgtttttgatttcaggataattatacctgtcctcttagagctctgttcattgcgatggtgttgtccacattctaagcatgctcaatgttgaatataaatcatacttaaattacagaccacacttttttctctctttttgcatatactattccatctttataattttgaatttttctgtctcctgattattttatctatcca

SEQ ID NO: 193716 - DNA, 300 bp, Homo sapiens
ccggacacggtttacatgcatgatggacactttcaacccttcacttcataaacttctctatcccaaccttgagggatagacttgaattttaggtatgtccaccatctttacaataacatttggccatctcccaggtccaattaaggtaatcaagagaaattgagattgaatatcatcctagttaacaaaagagtatgtaagtcaaatatatttgattataatttcaaatttctatcttcctagctgtatgatcttgagagagtaacctaacctctttgagccttagtttctgtctgtaaa

SEQ ID NO: 193717 - DNA, 1137 bp, Homo sapiens
ggtgataatgccaggccctgcccccggcagaggcggaagcggagtcggcctgagaggtctctcgtcgctgcaggcgcctcagcccagccgcgtgccttggcccatggccgcctactcttaccgccccggccctggggccggccctgggcctgctgcaggcgcggcgctgccggaccagagcttcctgtggaacgttttccagagggtcgataaagacaggagtggagtgatatcagacaccgagcttcagcaagctctctccaacggcacgtggactccctttaatccagtgactgtcaggtcgatcatatccatgtttgaccgtgagaacaaggccggcgtgaacttcagcgagttcacgggtgtgtggaagtacatcacggactggcagaacgtcttccgcacgtacgaccgggacaactccgggatgatcgataagaacgagctgaagcaggccctctcaggtttcggctaccggctctctgaccagttccacgacatcctcattcgaaagtttgacaggcagggacgggggcagatcgccttcgacgacttcatccagggctgcatcgtcctgcagaggttgacggatatattcagacgttacgacacggatcaggacggctggattcaggtgtcgtacgaacagtacctgtccatggtcttcagtatcgtatgaccctggcctctcgtgaagagcagcacaacatggaaagagccaaaatgtcacagttcctatctgtgagggaatggagcacaggtgcagttagatgctgttcttcctttagattttgtcacgtggggacccagctgtacatatgtggataagctgattaatggttttgcaactgtaatagtagctgtatcgttctaatgcagacattggatttggtgactgtctcattgtgccatgaggtaaatgtaatgtttcaggcattctgcttgcaaaaaaatctatcatgtgcttttctagatgtctctggttctatagtgcaaatgcttttattagccaataggaattttaaaataacatggaacttacacaaaaggcttttcatgtgccttacttttttaaaaaggagtttattgtattcattggaatatgtgacgtaagcaataaagggaatgttagacgtg

SEQ ID NO: 193718 - DNA, 544 bp, Homo sapiens
tgcggctggatttcctcacacatcccattgcacggcctgcctcacagctgcaagtgcaccttctcctgggacttagggggtcgggctgggggacaatcccccacacccccacccagggcgaaggtgacaagactttaagggatttcaccccattcacagacaggcatgcattgcccagtccctggttagtggtcagcagtggggccccgccaggctctgagggctgaggtctggtgggaagcctcaagtgagtttgctgcaactgatcttttgctgcttgaccgttcctctctgtctcagccatgtttgaccgtgagaacaaggccggcgtgaacttcagcgagttcacgggtgtgtggaagtacatcacggactggcagaacgtcttccgcacgtacgaccgggacaactccgggatgatcgataagaacgagctgaagcaggccctctcaggtttcgggtaactcactcactctggcttgtgtagcgtgtttcattttggaaccttggagccgttgaagttctttaaaccttgttggactta

SEQ ID NO: 193719 - DNA, 246 bp, Homo sapiens
atgagctcgtacagatgatgcgagaaccctttgctcccttctggaattccacttagatgagcgtcggccctttcatccctctccctccgtctctgtaccttttcacatctctccgtgtatgtttgctctattcttgattctgtttatttttaatgtacggtgtaacctgtcctttcagtttctaattctaaagatgacatatatttaaaatttctaaattattagttactttcacatcttatctgg

SEQ ID NO: 193720 - DNA, 1378 bp, Homo sapiens
ggtgataatgccaggccctgcccccggcagaggcggaagcggagtcggcctgagaggtctctcgtcgctgcaggcgcctcagcccagccgcgtgccttggcccatggccgcctactcttaccgccccggccctggggccggccctgggcctgctgcaggcgcggcgctgccggaccagagcttcctgtggaacgttttccagagggtcgataaagacaggagtggagtgatatcagacaccgagcttcagcaagctctctccaacggcacgtggactccctttaatccagtgactgtcaggtcgatcatatccatgtttgaccgtgagaacaaggccggcgtgaacttcagcgagttcacgggtgtgtggaagtacatcacggactggcagaacgtcttccgcacgtacgaccgggacaactccgggatgatcgataagaacgagctgaagcaggccctctcaggtttcggctaccggctctctgaccagttccacgacatcctcattcgaaagtttgacaggcagggacgggggcagatcgccttcgacgacttcatccagggctgcatcgtcctgcagaggttgacggatatattcagacgttacgacacggatcaggacggctggattcaggtgtcgtacgaacagtacctgtccatggtcttcagtatcgtatgaccctggcctctcgtgaagagcagcacaacatggaaagagccaaaatgtcacagttcctatctgtgagggaatggagcacaggtgcagttagatgctgttcttcctttagattttgtcacgtggggacccagctgtacatatgtggataagctgattaatggttttgcaactgtaatagtagctgtatcgttctaatgcagacattggatttggtgactgtctcattgtgccatgaggtaaatgtaatgtttcaggcattctgcttgcaaaaaaatctatcatgtgcttttctagatgtctctggttctatagtgcaaatgcttttattagccaataggaattttaaaataacatggaacttacacaaaaaaaaaaaaaaaaaaaaaaagagaaaaatttaaaacaaaaaaaaaaaaaaaaaaacaaaaactggggggggcgacaggagccccgaaaaaagtttttaaaaacaaagggggggggcggcggggcccaatgagagaaagagaaaagcgggcaacaagagggacaaggaaaacgggggaaaaaaaaagggggggggttcccacgaaaaaaaaaacgcgggggggagacaaagagggggtcgggagaaaaacacagagaggggagaggaggaacaggggggaatacacacgagggacaccaagggacagaaaaaaaaaccccgggaggggggac

SEQ ID NO: 193721 - DNA, 1087 bp, Homo sapiens
agagagcagggcagtagggctgggcaggatgagaaggaggaaaggggggggatttgagggtgaccgactctctaactaaccggcgctacaggtgccaaccctgagaccaaaattaggaaggtgtccctgagcagcagctgaagggaagcgggagggtcgataaagacaggagtggagtgatatcagacaccgagcttcagcaagctctctccaacggcacgtggactccctttaatccagtgactgtcaggtcgatcatatccatgtttgaccgtgagaacaaggccggcgtgaacttcagcgagttcacgggtgtgtggaagtacatcacggactggcagaacgtcttccgcacgtacgaccgggacaactccgggatgatcgataagaacgagctgaagcaggccctctcaggtttcggctaccggctctctgaccagttccacgacatcctcattcgaaagtttgacaggcagggacgggggcagatcgccttcgacgacttcatccagggctgcatcgtcctgcagaggttgacggatatattcagacgttacgacacggatcaggacggctggattcaggtgtcgtacgaacagtacctgtccatggtcttcagtatcgtatgaccctggcctctcgtgaagagcagcacaacatggaaagagccaaaatgtcacagttcctatctgtgagggaatggagcacaggtgcagttagatgctgttcttcctttagattttgtcacgtggggacccagctgtacatatgtggataagctgattaatggttttgcaactgtaatagtagctgtatcgttctaatgcagacattggatttggtgactgtctcattgtgccatgaggtaaatgtaatgtttcaggcattctgcttgcaaaaaaatctatcatgtgcttttctagatgtctctggttctatagtgcaaatgcttttattagccaataggaattttaaaataacatggaacttacacaaaaggcttttcatgtgccttacttttttaaaaaggagtttattgtattcattggaatatgtgacgtaagcaataaagggaatgttagacgtg

SEQ ID NO: 193722 - DNA, 892 bp, Homo sapiens
tcctgttgttgttgttttcaggcacgtggactccctttaatccagtgactgtcaggtcgatcatatccatgtttgaccgtgagaacaaggccggcgtgaacttcagcgagttcacgggtgtgtggaagtacatcacggactggcagaacgtcttccgcacgtacgaccgggacaactccgggatgatcgataagaacgagctgaagcaggccctctcaggtttcggctaccggctctctgaccagttccacgacatcctcattcgaaagtttgacaggcagggacgggggcagatcgccttcgacgacttcatccagggctgcatcgtcctgcagaggttgacggatatattcagacgttacgacacggatcaggacggctggattcaggtgtcgtacgaacagtacctgtccatggtcttcagtatcgtatgaccctggcctctcgtgaagagcagcacaacatggaaagagccaaaatgtcacagttcctatctgtgagggaatggagcacaggtgcagttagatgctgttcttcctttagattttgtcacgtggggacccagctgtacatatgtggataagctgattaatggttttgcaactgtaatagtagctgtatcgttctaatgcagacattggatttggtgactgtctcattgtgccatgaggtaaatgtaatgtttcaggcattctgcttgcaaaaaaatctatcatgtgcttttctagatgtctctggttctatagtgcaaatgcttttattagccaataggaattttaaaataacatggaacttacacaaaaggcttttcatgtgccttacttttttaaaaaggagtttattgtattcattggaatatgtgacgtaagcaataaagggaatgttagacgtg

SEQ ID NO: 193723 - DNA, 6006 bp, Homo sapiens
  misc_feature (874)..(874): n is a, c, g, or t
ggtgataatgccaggccctgcccccggcagaggcggaagcggagtcggcctgagaggtctctcgtcgctgcaggcgcctcagcccagccgcgtgccttggcccatggccgcctactcttaccgccccggccctggggccggccctgggcctgctgcaggcgcggcgctgccggaccagagcttcctgtggaacgttttccagagggtcgataaagacaggagtggagtgatatcagacaccgagcttcagcaagctctctccaacggcacgtggactccctttaatccagtgactgtcaggtcgatcatatgccgaggacgatgatcccgccgggggagtgcacgtacgcgggccggaagcggaggaggcccctgcagaaacagaggcccgccgtgggggcagagaagtccaacccctccaagcgacaccgggaccgcctcaacgccgagttggaccacctggccagcctgctgccgttcccgcctgacatcatctccaagctggacaagctttctgtcctgcgcctcagtgtcagttacctccgggtgaagagcttcttccaagtcgtgcaggagcagagctcacggcagcctgcggccggcgccccctcgcccggagacagctgtcctcttgcagggtctgccgtgctggagggaaggctgctgttggagtctcttaatggctttgctctggtcgtgagtgcagaagggacgatattttatgcatcagcaacgatcgtggactatctgggcttccatcagacggatgtaatgcaccagaacatttatgactacatccacgtggacgaccgccaggacttctgccggcagctccactgggccatggaccctccccaggtggtgtttgggcagnccccgcccttggagacaggagatgatgctatcctggggaggctgctcagggcccaggagtggggcacaggcacgcccaccgagtactcggccttcctgacccgctgcttcatctgccgtgtgcgctgcctgctggacagcacctcgggcttcctggcccgggggtcacaggcttggcagctgcggctctgctgtcccgagccactcatgacgatgcagtttcaaggaaaactaaaattcctgtttggacagaagaagaaggcgccgtcaggagccatgctcccgccgcggctgtcgctgttctgcattgcggcacccgttctcctcccctccgcagcggagatgaaaatgaggagcgcgctcctgagggcaaaacccagagcagacaccgcagccaccgcggatgcaaaagtaaaagccaccaccagtctgtgcgaatcggaactgcatggaaaacccaattactcagcaggaaggagcagcagagagagcggcgttttggtgctcagggaacagactgacgctggccgatgggcacaggttcccgccagggccccatgcctgtgcctccggggtggccctgaccttgtccttgaccccaaggggggctcaggggacagggaggaggagcagcacaggatgctgagcagggcctctggagtgacagggcggagggagactccaggacccacaaagcccctgccctggacagcgggaaagcacagtgaggatggtgccaggccgaggctgcagcccagcaagaatgacccgccctccctgcgccccatgccccgcggctcctgcctgccctgcccgtgtgtccagggcactttcaggaactcgcccatctctcacccgccgagcccgtcccccagtgcctactccagccggaccagcagacccatgcgggatgtcggtgaggaccaggtgcaccctcccctctgccactttccccagaggagcctgcagcaccagctccctcagcctggagctcagcgttttgccacgaggggctatcccatggaggacatgaagctgcaaggtgtaccgatgcctccgggggacctgtgtggtccgacgctgctgctagatgtgtccatcaagatggagaaggactctgggtgtgagggtgctgcagacggctgtgtgcccagccaggtgtggctgggggccagtgacaggagccacccagccaccttccctaccaggatgcacctgaaaacagagccagactctcggcaacaggtgtacatctcgcacctggggcacggcgtgcggggggctcagccccatgggagggccactgctgggcgcagcagggagctgacccctttccaccctgcacactgtgcctgcctggagcccacagacggccttccccagtcggagcctccccaccagctctgtgcacggggccgaggtgaacagtcctgcacctgcagagctgctgaggccgcccctgtggtcaagcgggagcccttggactcaccccagtgggctactcacagccagggaatggtgcccgggatgttgcccaaaagtgccttggccacgctggtcccgccccaagcttcggggtgcacattcctgccatagcgcagtgaccaccatccaagctcagatctgtctgtctacgctcagatgcgtcggtggctgggctgccctgctcctggtcaggccggagcccgtcctaagacacactctttgcagagctgtgcatgcgcagtctgctagtgtgtgtgtgcagcatacgcaggagcctatcctgaattttgtaaaatatcccaacagttcttaaatgaaaactggccttaagtctattcaagcatgacagcatttctctttgaggaattaaaatctttaggaaagtgatcatggctggacagcttcatgccccagaggcagcgagcacccgtcccatggctgccaagtccacagtcggggatgaagcagtcgggtgatgctcccaagtccgcagtcggggatgaagcggtcgggtgatgctcccaagtccgcagtcggggatgaagcggtcgggtgacacacctagctcagccctcccaggccacctgcagctcccagcctgtgctgtgcaggcagggtcagcccatcgccacagtgcactgtagaggccagcacacggcaaattagaaatacaacacgcggagaaaggggtccgtgagcccactcatagaggaatctagaatgttccaggcagcagaggctggcagcgtgggtcccacactgccccacaccgtgcggcaggtgctccatggcgccatgacagagtctgaggccagacctggactggaattgacagcataacccctgttccttctggacatctcccgagttctcagtgggtctctgcggacggttcttcctaatctgcctcttggtacatcacgtaatacagagttcacagactccgggtttggaagtacagagaaacacacaacgtagagagaagacacaggaaactgcgctgcctgtgggggtttctctctggctggctgtacagttcactcaaatgagggttcccattgccatcctaggagaataattagggacaagacagacaagtattaatagcattaaaacagttgtaaaggcgatattttctgagagtaggaaatttggatacaaaagcataagtcagaaagtgaaggtcaccaatccaccaacccgagaacctacagctgatggtgcatttcaggcttcttccacggtctggcctggaaccccacccggctggtgcaggcatcagatcagggtgtagaagtcaccccaagcaagaggaagccaggcagtgaggccctggggtgtggctgcagctgggcccacctgtgcgggggtgggaaggccccatcctcagggagagggcatcggcgccctgacgtcagctccactgggagtggcaggagctgtgggagcccatgggtgagggacccaccaccccgctgcactgtgcattgtgcctcccgtgtggacgccctctctgttgttggcccgcgggtgagggacccaccaccccgctgcactgtgcattgtgcctcccgtgtggacgccctctctgttgttggcccgcgggtgagggacccaccacccctagggacccaccaccccgccgcactgtgcattctgcctcctgtgtggacgccctctctgttgtcagtggctttgaggtgtcagtgcttacttagatgctggtttaatgctggacccatttgttaaacgcaccttcactttgtcaaaacccaggtttggttggcaggactgggtcttctgcccaatgccaggtgcctgcgcctctcagtggcctggttcttggacagtttgcccccatgtggcagggatagggataaggatctcctctcagtactggaggagaacagccaaccatctgagcccagagtcacagatccatcgtggccccctatgacccccaagccctaccgagggggcactcactctctgcttagccagggggcgtctttcaaaaggtgacctccatgctgtgctgtcgtgggtgtgagacgtgctcatggccttccactgccatctctcccttatctgatgcctaaagtcacgatggggacagagctacccaggggccagccatggggtgaccagccacctgagggtcagtcacctgtggagagcaggcacctgtgaagaccaggcacctgaggactggcgcctacttcccactttggccctacactggcacagagcccctctttattcatttctcatgctgagcatggcacacttctggcctctgggcatttatggatttaagaccaggatggtatttcagaagcttcccacttccttcctattctaaccgagtgcccagctcctttgctgatcatggaaagacccttaataattaggcctgcaggccaggcgcagtggctcatgcctataatcccagcactttaggaggtcaaggtaggaggatcgcttaagcccaggagttcaagaccagcctgggcaacacaggaagaatgtgtctctacaaaaaataattaaaaatcagatctgctgtatccctgaaaaagtctcaatcaacatgcatgttccactcttggagttccctgttctgagggccagccacgtcctgtgtcctggagcttagccctcagcagctcccttcagcctgggcgccgcctgggtcccaaacgtggcagctgctcttccagtctcggggccgaggagggcagggagctcagtgactgagagtcttgtgtatcacatgtcttgagtgtcctggagccaacggtgtcactgggaaaaacaccaggccccaaagatcgaatcagagacgtggctgcgtgtttgcgattgtagccaggcccttcagtgtcatcaaaggagcactggggcctccttaagcacagacggcagcccctgcccaggaggcttcttcaccacgtcctgccctgcagcctcccagacctttagatgcgcccctgcccaaggccctcctggtgacaggtgccagattgagtggtgggttgctgccaggcaggccacgctgtgttgacgctgcactcagcacgtgggtgttggctctgccggttttgtggtgtggggaccctacaggaggctgcggccctgagagcctgggatcagcgaggtgtccgacatcccttcctcaacggcaacaaaaactccccaagtcagcactttggttattttatagccacaaccctcttggaaaacagtggggaagactatggaacatagaaagtgtggatgtatcacttctctctaaaatgtcattgttagcactaattacaggttcatgtttttctgtttatgtagcttttccctatatagctgaaaaagtattaaagtcaaatataaggtgggaatgggatggaagggaggagatcaatacaacttatatttttgcagtttctactggaagaaaaaagttttcaatacctagaccaacttgttgaatttttaaaacttatgcactataaatgcaactttctctactgctttctcagtgcctttaggaagctttcaaatttttttgtactgtggtttgtattaaatttgcaatattgatgtaaaatacatgacatgctagtacatgtttaacaaaaatttaaaaaaaaa

SEQ ID NO: 193724 - DNA, 870 bp, Homo sapiens
ctggggatgtcagctcattacagaatgatatattcgggaagtgtctcagttctgagtgcctttgagggaatttgcacttccgttcccacacagccttgcattgtgtgtgttagaggctgtgggccttgggcaggaggggtgagtgttggcacatacctcccgtctctcccagccttctctgactctgactttccctcttgaaggctaccggctctctgaccagttccacgacatcctcattcgaaagtttgacaggcagggacgggggcagatcgccttcgacgacttcatccagggctgcatcgtcctgcagaggttgacggatatattcagacgttacgacacggatcaggacggctggattcaggtgtcgtacgaacagtacctgtccatggtcttcagtatcgtatgaccctggcctctcgtgaagagcagcacaacatggaaagagccaaaatgtcacagttcctatctgtgagggaatggagcacaggtgcagttagatgctgttcttcctttagattttgtcacgtggggacccagctgtacatatgtggataagctgattaatggttttgcaactgtaatagtagctgtatcgttctaatgcagacattggatttggtgactgtctcattgtgccatgaggtaaatgtaatgtttcaggcattctgcttgcaaaaaaatctatcatgtgcttttctagatgtctctggttctatagtgcaaatgcttttattagccaataggaattttaaaataacatggaacttacacaaaaggcttttcatgtgccttacttttttaaaaaggagtttattgtattcattggaatatgtgacgtaagcaataaagggaatgttagacgtg

SEQ ID NO: 193725 - DNA, 1287 bp, Homo sapiens
ggtgataatgccaggccctgcccccggcagaggcggaagcggagtcggcctgagaggtctctcgtcgctgcaggcgcctcagcccagccgcgtgccttggcccatggccgcctactcttaccgccccggccctggggccggccctgggcctgctgcaggcgcggcgctgccggaccagagcttcctgtggaacgttttccagagggtcgataaagacaggagtggagtgatatcagacaccgagcttcagcaagctctctccaacggcacgtggactccctttaatccagtgactgtcaggtcgatcatatccatgtttgaccgtgagaacaaggccggcgtgaacttcagcgagttcacgggtgtgtggaagtacatcacggactggcagaacgtcttccgcacgtacgaccgggacaactccgggatgatcgataagaacgagctgaagcaggccctctcaggtttcggctaccggctctctgaccagttccacgacatcctcattcgaaagtttgacaggcagggacgggggcagatcgccttcgacgacttcatccagggctgcatcgtcctgcagacccttgctccatcacccaggccagagtgtggtggtgcgaacacggctcactgcagcctcgaccctcaggctcaagcgatcctcacgcctcggacccccaaagtgctgggatcacaggcgagagtcaccatgctggcctgaatcttcaggaggttgacggatatattcagacgttacgacacggatcaggacggctggattcaggtgtcgtacgaacagtacctgtccatggtcttcagtatcgtatgaccctggcctctcgtgaagagcagcacaacatggaaagagccaaaatgtcacagttcctatctgtgagggaatggagcacaggtgcagttagatgctgttcttcctttagattttgtcacgtggggacccagctgtacatatgtggataagctgattaatggttttgcaactgtaatagtagctgtatcgttctaatgcagacattggatttggtgactgtctcattgtgccatgaggtaaatgtaatgtttcaggcattctgcttgcaaaaaaatctatcatgtgcttttctagatgtctctggttctatagtgcaaatgcttttattagccaataggaattttaaaataacatggaacttacacaaaaggcttttcatgtgccttacttttttaaaaaggagtttattgtattcattggaatatgtgacgtaagcaataaagggaatgttagacgtg

SEQ ID NO: 193726 - DNA, 890 bp, Homo sapiens
ggtgataatgccaggccctgcccccggcagaggcggaagcggagtcggcctgagaggtctctcgtcgctgcaggcgcctcagcccagccgcgtgccttggcccatggccgcctactcttaccgccccggccctggggccggccctgggcctgctgcaggcgcggcgctgccggaccagagcttcctgtggaacgttttccagagggtcgataaagacaggagtggagtgatatcagacaccgagcttcagcaagctctctccaacggcacgtggactccctttaatccagtgactgtcaggtcgatcatatgccgaggacgatgatcccgccgggggagtgcacgtacgcgggccggaagcggaggaggcccctgcagaaacagaggcccgccgtgggggcagagaagtccaacccctccaagcgacaccgggaccgcctcaacgccgagttggaccacctggccagcctgctgccgttcccgcctgacatcatctccaagctggacaagctttctgtcctgcgcctcagtgtcagttacctccgggtgaagagcttcttccaaggacaggggttggcagtggcagatgccgaagatgtggatgaccacacgggcgaacgaaggcccatgtcgttcaggaggccccgagcattggacacccaggccctgagacgtactcagttcggtctgcatctgttgatggtgaatattgcaggactgatagccactgaccgcctgtagtgatgtgtgaggacaatgaaggcaatggtgattcacaggcaggccagccccatatgggtgttagttgtaaattcatggttacataacataataaatttacctacgaattcattatttataaacaaatggagactctgacagctgagctg

SEQ ID NO: 193727 - DNA, 1064 bp, Homo sapiens
ggtgataatgccaggccctgcccccggcagaggcggaagcggagtcggcctgagaggtctctcgtcgctgcaggcgcctcagcccagccgcgtgccttggcccatggccgcctactcttaccgccccggccctggggccggccctgggcctgctgcaggcgcggcgctgccggaccagagcttcctgtggaacgttttccagagggtcgataaagacaggagtggagtgatatcagacaccgagcttcagcaagctctctccaacggcacgtggactccctttaatccagtgactgtcaggtcgatcatatccatgtttgaccgtgagaacaaggccggcgtgaacttcagcgagttcacgggtgtgtggaagtacatcacggactggcagaacgtcttccgcacgtacgaccgggacaactccgggatgatcgataagaacgagctgaagcaggccctctcaggtttcggctaccggctctctgaccagttccacgacatcctcattcgaaagtttgacaggcagggacgggggcagatcgccttcgacgacttcatccagggctgcatcgtcctgcaggtgacggaatggcttcacgtgggtttgtggtggtggtgggaggggcttgcttgccagcgtgatgcacctgaccttcaatctaaggagctgggcatgtgtagaattagtttttggagcttataaaagtgagtctcatctttggagaagtagccggttagtgaagtgtggacaaacatgttttcctccccttggaaatggcacagagcagcccatctgcaagacgtggtttttcagtatccggtgggttatttacatgtatgttctggtgttgtggttttttttgttttttgttttgttttgttttgttttgagaccgagtctcgctctgtcaccaacggtggaaatggcagtggcacgatcccggctcactcccacctctgcgtcccgggagaatcacttgaacccgggaggtggaggtttcagtgagccgagatcacaccactgcactccagcctgggtgacagagccagaccctgtcttaaaa

SEQ ID NO: 193728 - DNA, 535 bp, Homo sapiens
tatcatacttgtcattttaagatgttccctctgattcctttccagtctacaggtcacgttaagcggtcatgtggctcctggttcaggctgtttccttcctctagtctgtgaatatctcaagcattcttagtttatcttctttaacttaggatctcaacagctgccttctcggaggttcagttctgctgtggttctgctgacttgctcacggtggagagtaaggagtcacacttgctggatctgtcacacggcttctggctcccactgtggccgtggcaaagccgagtctcagtctcggtgtccgctctcacaggtaaatgtaatgtttcaggcattctgcttgcaaaaaaatctatcatgtgcttttctagatgtctctggttctatagtgcaaatgcttttattagccaataggaattttaaaataacatggaacttacacaaaaggcttttcatgtgccttacttttttaaaaaggagtttattgtattcattggaatatgtgacgtaagcaataaagggaatgttagacgtg

SEQ ID NO: 193729 - DNA, 1011 bp, Homo sapiens
ggtgataatgccaggccctgcccccggcagaggcggaagcggagtcggcctgagaggtctctcgtcgctgcaggcgcctcagcccagccgcgtgccttggcccatggccgcctactcttaccgccccggccctggggccggccctgggcctgctgcaggcgcggcgctgccggaccagagcttcctgtggaacgttttccagagggtcgataaagacaggagtggagtgatatcagacaccgagcttcagcaagctctctccaacggcacgtggactccctttaatccagtgactgtcaggtcgatcatatgccgaggacgatgatcccgccgggggagtgcacgtacgcgggccggaagcggaggaggcccctgcagaaacagaggcccgccgtgggggcagagaagtccaacccctccaagcgacaccgggaccgcctcaacgccgagttggaccacctggccagcctgctgccgttcccgcctgacatcatctccaagctggacaagctttctgtcctgcgcctcagtgtcagttacctccgggtgaagagcttcttccaagtgaaacgtcagaggagagagatacatggaaggaattgccaaaagaaaaggaaccagaacttgaagtgcttaactcgtgtgttgctgggttctgtccccctccttctctgttgtatgcccaggacaggggttggcagtggcagatgccgaagatgtggatgaccacacgggcgaacgaaggcccatgtcgttcaggaggccccgagcattggacacccaggccctgagacgtactcagttcggtctgcatctgttgatggtgaatattgcaggactgatagccactgaccgcctgtagtgatgtgtgaggacaatgaaggcaatggtgattcacaggcaggccagccccatatgggtgttagttgtaaattcatggttacataacataataaatttacctacgaattcattatttataaacaaatggagactctgacagctgagctg

SEQ ID NO: 193730 - DNA, 621 bp, Homo sapiens
ggtgataatgccaggccctgcccccggcagaggcggaagcggagtcggcctgagaggtctctcgtcgctgcaggcgcctcagcccagccgcgtgccttggcccatggccgcctactcttaccgccccggccctggggccggccctgggcctgctgcaggcgcggcgctgccggaccagagcttcctgtggaacgttttccagagggtcgataaagacaggagtggagtgatatcagacaccgagcttcagcaagctctctccaacggcacgtggactccctttaatccagtgactgtcaggtcgatcatatgtaagtatcggcagacggaccaacttgggctgctttgtatccgacccgcttgggtacccgcttgtgtttcctttgtctgtgggtccgtatcactttgctcccttctggaattccacttagatgagcgtcggccctttcatccctctccctccgtctctgtaccttttcacatctctccgtgtatgtttgctctattcttgattctgtttatttttaatgtacggtgtaacctgtcctttcagtttctaattctaaagatgacatatatttaaaatttctaaattattagttactttcacatcttatctgg

SEQ ID NO: 193731 - DNA, 825 bp, Homo sapiens
ccttggctgcgccccgccccgcccgttcctggcttcctcgatggcttcctcctcaggacgccggtctcccgccacggcgccctgagccaggctccagagcaggcggcttctctgggggaggccgggacccgcctgacaccgaggggaggcccaggcgtgacccggccccggtggctcctcggccgaggacgatgatcccgccgggggagtgcacgtacgcgggccggaagcggaggaggcccctgcagaaacagaggcccgccgtgggggcagagaagtccaacccctccaagcgacaccgggaccgcctcaacgccgagttggaccacctggccagcctgctgccgttcccgcctgacatcatctccaagctggacaagctttctgtcctgcgcctcagtgtcagttacctccgggtgaagagcttcttccaagtgaaacgtcagaggagagagatacatggaaggaattgccaaaagaaaaggaaccagaacttgaaggacaggggttggcagtggcagatgccgaagatgtggatgaccacacgggcgaacgaaggcccatgtcgttcaggaggccccgagcattggacacccaggccctgagacgtactcagttcggtctgcatctgttgatggtgaatattgcaggactgatagccactgaccgcctgtagtgatgtgtgaggacaatgaaggcaatggtgattcacaggcaggccagccccatatgggtgttagttgtaaattcatggttacataacataataaatttacctacgaattcattatttataaacaaatggagactctgacagctgagctg

SEQ ID NO: 193732 - DNA, 267 bp, Homo sapiens
atggccgcctactcttaccgccccggccctggggccggccctgggcctgctgcaggcgcggcgctgccggaccagagcttcctgtggaacgttttccagaggtgcggcctggcaccgcccgggcacctcccgcctccgccgcggcggccccgacccctgtcccgactcccccgaccaaccccgttccctgccggttctactgcggcctcctccgtcccctgtcgggtcccccgcggccccctcccgtcccctgccgccgcccccgac

SEQ ID NO: 193733 - DNA, 342 bp, Homo sapiens
tgttcctgcaggtcttgatgtgcgaggacgctgtgtcttccctgccacattttcttcttctttcttgagacagacccttgctccatcacccaggccagagtgtggtggtgcgaacacggctcactgcagcctcgaccctcaggctcaagcgatcctcacgcctcggacccccaaagtgctgggatcacaggcgagagtcaccatgctggcctgaatcttcagggtattttacggttgaagtgtcacttacttaaccatccctgtttcaggagtgtaggtggtcaccctgtctctgccgctgacctggcctggaccctcggctgtgagagggaggggtgggct

SEQ ID NO: 193734 - DNA, 668 bp, Homo sapiens
tgcagtgcgtggtcaagggcacagaggagtgggcagcggtggccgtggggaccggatgagccagcctggtggggcttgaatatggcagcgccaggcagtgatgccacgtgggccttgctgggggcggcatccgaggctcagcacacctgtagcttttgaaggccatgccctcctgctgggtctcttgtcttcacccctcaggaggccttccccagcctcacttttaacatcacagcctctgcccctctgccctgacaccaccccctctgctgctcgttctctcctagtgcttaactcgtgtgttgctgggttctgtccccctccttctctgttgtatgcccaggacaggggttggcagtggcagatgccgaagatgtggatgaccacacgggcgaacgaaggcccatgtcgttcaggaggccccgagcattggacacccaggccctgagacgtactcagttcggtctgcatctgttgatggtgaatattgcaggactgatagccactgaccgcctgtagtgatgtgtgaggacaatgaaggcaatggtgattcacaggcaggccagccccatatgggtgttagttgtaaattcatggttacataacataataaatttacctacgaattcattatttataaacaaatggagactctgacagctgagctg

SEQ ID NO: 193735 - DNA, 1140 bp, Homo sapiens
gaccacgcgtccgcggacgcgtgggtcgacccacgcgtccggcggagtcggcctgagaggtctctcgtcgctgcaggcgcctcagcccagccgcgtgccttggcccatggccgcctactcttaccgccccggccctggggccggccctgggcctgctgcaggcgcggcgctgccggaccagagcttcctgtggaacgttttccagagggtcgataaagacaggagtggagtgatatcagacaccgagcttcagcaagctctctccaacggcacgtggactccctttaatccagtgactgtcaggtcgatcatatccatgtttgaccgtgagaacaaggccggcgtgaacttcagcgagttcacgggtgtgtggaagtacatcacggactggcagaacgtcttccgcacgtacgaccgggacaactccgggatgatcgataagaacgagctgaagcaggccctctcaggtttcggctaccggctctctgaccagttccacgacatcctcattcgaaagtttgacaggcagggacgggggcagatcgccttcgacgacttcatccagggctgcatcgtcctgcagaggttgacggatatattcagacgttacgacacggatcaggacggctggattcaggtgtcgtacgaacagtacctgtccatggtcttcagtatcgtatgaccctggcctctcgtgaagagcagcacaacatggaaagagccaaaatgtcacagttcctatctgtgagggaatggagcacaggtgcagttagatgctgttcttcctttagattttgtcacgtggggacccagctgtacatatgtggataagctgattaatggttttgcaactgtaatagtagctgtatcgttctaatgcagacattggatttggtgactgtctcattgtgccatgaggtaaatgtaatgtttcaggcattctgcttgcaaaaaaatctatcatgtgcttttctagatgtctctggttctatagtgcaaatgcttttattagccaataggaattttaaaataacatggaacttacacaaaaggcttttcatgtgccttacttttttaaaaaggagtttattgtattcattggaatatgtgacgtaagcaataaagggaatgttagacgtg

SEQ ID NO: 193736 - DNA, 1052 bp, Homo sapiens
ggtgataatgccaggccctgcccccggcagaggcggaagcggagtcggcctgagaggtctctcgtcgctgcaggcgcggcgctgccggaccagagcttcctgtggaacgttttccagagggtcgataaagacaggagtggagtgatatcagacaccgagcttcagcaagctctctccaacggcacgtggactccctttaatccagtgactgtcaggtcgatcatatccatgtttgaccgtgagaacaaggccggcgtgaacttcagcgagttcacgggtgtgtggaagtacatcacggactggcagaacgtcttccgcacgtacgaccgggacaactccgggatgatcgataagaacgagctgaagcaggccctctcaggtttcggctaccggctctctgaccagttccacgacatcctcattcgaaagtttgacaggcagggacgggggcagatcgccttcgacgacttcatccagggctgcatcgtcctgcagaggttgacggatatattcagacgttacgacacggatcaggacggctggattcaggtgtcgtacgaacagtacctgtccatggtcttcagtatcgtatgaccctggcctctcgtgaagagcagcacaacatggaaagagccaaaatgtcacagttcctatctgtgagggaatggagcacaggtgcagttagatgctgttcttcctttagattttgtcacgtggggacccagctgtacatatgtggataagctgattaatggttttgcaactgtaatagtagctgtatcgttctaatgcagacattggatttggtgactgtctcattgtgccatgaggtaaatgtaatgtttcaggcattctgcttgcaaaaaaatctatcatgtgcttttctagatgtctctggttctatagtgcaaatgcttttattagccaataggaattttaaaataacatggaacttacacaaaaggcttttcatgtgccttacttttttaaaaaggagtttattgtattcattggaatatgtgacgtaagcaataaagggaatgttagacgtg

SEQ ID NO: 193737 - DNA, 1153 bp, Homo sapiens
agcggacagtcgaaacctgagtagtggctgaaaggtctctcgctctttggaagctcctcaggccacatcgcagtgcctatgtggccgtggtgcgattactctgtaccgccccggtcctgtaggtgccgggcctggtgcctgtgcctgaattgcgcggccgcattccgggaccagatcattccgtgtggaatcagttattccatagggtcaatctaaagacaggagtgtgagtgatatcatgacactcgagcattcagctaatgctcttctccaagcggctacgtggacttcccttttaatccagttgactgtcaggtctgatcatatccatgtttgaccgtgagaacaaggccggcgtgaacttcagcgagttcacgggtgtgtggaagtacatcacggactggcagaacgtcttccgcacgtacgaccgggacaactccgggatgatcgataagaacgagctgaagcaggccctctcaggtttcggctaccggctctctgaccagttccacgacatcctcattcgaaagtttgacaggcagggacgggggcagatcgccttcgacgacttcatccagggctgcatcgtcctgcagaggttgacggatatattcagacgttacgacacggatcaggacggctggattcaggtgtcgtacgaacagtacctgtccatggtcttcagtatcgtatgaccctggcctctcgtgaagagcagcacaacatggaaagagccaaaatgtcacagttcctatctgtgagggaatggagcacaggtgcagttagatgctgttcttcctttagattttgtcacgtggggacccagctgtacatatgtggataagctgattaatggttttgcaactgtaatagtagctgtatcgttctaatgcagacattggatttggtgactgtctcattgtgccatgaggtaaatgtaatgtttcaggcattctgcttgcaaaaaaatctatcatgtgcttttctagatgtctctggttctatagtgcaaatgcttttattagccaataggaattttaaaataacatggaacttacacaaaaggcttttcatgtgccttacttttttaaaaaggagtttattgtattcattggaatatgtgacgtaagcaataaagggaatgttagacgtg

SEQ ID NO: 193738 - DNA, 936 bp, Homo sapiens
gaccacgcgtccgcggacgcgtgggtcgacccacgcgtccggcggagtcggcctgagaggtctctcgtcgctgcaggcgcctcagcccagccgcgtgccttggcccatggccgcctactcttaccgccccggccctggggccggccctgggcctgctgcaggcgcggcgctgccggaccagagcttcctgtggaacgttttccagagggtcgataaagacaggagtggagtgatatcagacaccgagcttcagcaagctctctccaacggctaccggctctctgaccagttccacgacatcctcattcgaaagtttgacaggcagggacgggggcagatcgccttcgacgacttcatccagggctgcatcgtcctgcagaggttgacggatatattcagacgttacgacacggatcaggacggctggattcaggtgtcgtacgaacagtacctgtccatggtcttcagtatcgtatgaccctggcctctcgtgaagagcagcacaacatggaaagagccaaaatgtcacagttcctatctgtgagggaatggagcacaggtgcagttagatgctgttcttcctttagattttgtcacgtggggacccagctgtacatatgtggataagctgattaatggttttgcaactgtaatagtagctgtatcgttctaatgcagacattggatttggtgactgtctcattgtgccatgaggtaaatgtaatgtttcaggcattctgcttgcaaaaaaatctatcatgtgcttttctagatgtctctggttctatagtgcaaatgcttttattagccaataggaattttaaaataacatggaacttacacaaaaggcttttcatgtgccttacttttttaaaaaggagtttattgtattcattggaatatgtgacgtaagcaataaagggaatgttagacgtg

SEQ ID NO: 193739 - DNA, 5566 bp, Homo sapiens
gccacccacccacacaggcgcacatacgctggcaccgctgaacagccaaaatatacacgatggttcttcttatggttcaggaggtggaaagttgaaaccatagcaagaaacgtggcctatccaccgcagcgactaaaagataaagagggaaaaggacaaacattggccagaaggtgcagcggctggagcgttcgcgccttaactggaagaggagccgccccgcctgggaggccgctctggcgcccggctggtgccgggcaggaggcccttgcggacccagcggcctcctcgtcggcaacgcccaccccgcggttcagccacggagcggatgccgtgtgcaggcacggaacgggcgaggctgttgcgctgcaggtgcccccacggtcgcgatgcggggcagggggatgccgacggatgtaatgcaccagaacatttatgactacatccacgtggacgaccgccaggacttctgccggcagctccactgggccatggaccctccccaggagatgatgctatcctggggaggctgctcagggcccaggagtggggcacaggcacgcccaccgagtactcggccttcctgacccgctgcttcatctgccgtgtgcgctgcctgctggacagcacctcgggcttcctgacgatgcagtttcaaggaaaactaaaattcctgtttggacagaagaagaaggcgccgtcaggagccatgctcccgccgcggctgtcgctgttctgcattgcggcacccgttctcctcccctccgcagcggagatgaaaatgaggagcgcgctcctgagggcaaaacccagagcagacaccgcagccaccgcggatgcaaaagtaaaagccaccaccagtctgtgcgaatcggaactgcatggaaaacccaattactcagcaggaaggagcagcagagagagcggcgttttggtgctcagggaacagactgacgctggccgatgggcacaggttcccgccagggccccatgcctgtgcctccggggtggccctgaccttgtccttgaccccaaggggggctcaggggacagggaggaggagcagcacaggatgctgagcagggcctctggagtgacagggcggagggagactccaggacccacaaagcccctgccctggacagcgggaaagcacagtgaggatggtgccaggccgaggctgcagcccagcaagaatgacccgccctccctgcgccccatgccccgcggctcctgcctgccctgcccgtgtgtccagggcactttcaggaactcgcccatctctcacccgccgagcccgtcccccagtgcctactccagccggaccagcagacccatgcgggatgtcggtgaggaccaggtgcaccctcccctctgccactttccccagaggagcctgcagcaccagctccctcagcctggagctcagcgttttgccacgaggggctatcccatggaggacatgaagctgcaaggtgtaccgatgcctccgggggacctgtgtggtccgacgctgctgctagatgtgtccatcaagatggagaaggactctgggtgtgagggtgctgcagacggctgtgtgcccagccaggtgtggctgggggccagtgacaggagccacccagccaccttccctaccaggatgcacctgaaaacagagccagactctcggcaacaggtgtacatctcgcacctggggcacggcgtgcggggggctcagccccatgggagggccactgctgggcgcagcagggagctgacccctttccaccctgcacactgtgcctgcctggagcccacagacggccttccccagtcggagcctccccaccagctctgtgcacggggccgaggtgaacagtcctgcacctgcagagctgctgaggccgcccctgtggtcaagcgggagcccttggactcaccccagtgggctactcacagccagggaatggtgcccgggatgttgcccaaaagtgccttggccacgctggtcccgccccaagcttcggggtgcacattcctgccatagcgcagtgaccaccatccaagctcagatctgtctgtctacgctcagatgcgtcggtggctgggctgccctgctcctggtcaggccggagcccgtcctaagacacactctttgcagagctgtgcatgcgcagtctgctagtgtgtgtgtgcagcatacgcaggagcctatcctgaattttgtaaaatatcccaacagttcttaaatgaaaactggccttaagtctattcaagcatgacagcatttctctttgaggaattaaaatctttaggaaagtgatcatggctggacagcttcatgccccagaggcagcgagcacccgtcccatggctgccaagtccacagtcggggatgaagcagtcgggtgatgctcccaagtccgcagtcggggatgaagcggtcgggtgatgctcccaagtccgcagtcggggatgaagcggtcgggtgacacacctagctcagccctcccaggccacctgcagctcccagcctgtgctgtgcaggcagggtcagcccatcgccacagtgcactgtagaggccagcacacggcaaattagaaatacaacacgcggagaaaggggtccgtgagcccactcatagaggaatctagaatgttccaggcagcagaggctggcagcgtgggtcccacactgccccacaccgtgcggcaggtgctccatggcgccatgacagagtctgaggccagacctggactggaattgacagcataacccctgttccttctggacatctcccgagttctcagtgggtctctgcggacggttcttcctaatctgcctcttggtacatcacgtaatacagagttcacagactccgggtttggaagtacagagaaacacacaacgtagagagaagacacaggaaactgcgctgcctgtgggggtttctctctggctggctgtacagttcactcaaatgagggttcccattgccatcctaggagaataattagggacaagacagacaagtattaatagcattaaaacagttgtaaaggcgatattttctgagagtaggaaatttggatacaaaagcataagtcagaaagtgaaggtcaccaatccaccaacccgagaacctacagctgatggtgcatttcaggcttcttccacggtctggcctggaaccccacccggctggtgcaggcatcagatcagggtgtagaagtcaccccaagcaagaggaagccaggcagtgaggccctggggtgtggctgcagctgggcccacctgtgcgggggtgggaaggccccatcctcagggagagggcatcggcgccctgacgtcagctccactgggagtggcaggagctgtgggagcccatgggtgagggacccaccaccccgctgcactgtgcattgtgcctcccgtgtggacgccctctctgttgttggcccgcgggtgagggacccaccaccccgctgcactgtgcattgtgcctcccgtgtggacgccctctctgttgttggcccgcgggtgagggacccaccacccctagggacccaccaccccgccgcactgtgcattctgcctcctgtgtggacgccctctctgttgtcagtggctttgaggtgtcagtgcttacttagatgctggtttaatgctggacccatttgttaaacgcaccttcactttgtcaaaacccaggtttggttggcaggactgggtcttctgcccaatgccaggtgcctgcgcctctcagtggcctggttcttggacagtttgcccccatgtggcagggatagggataaggatctcctctcagtactggaggagaacagccaaccatctgagcccagagtcacagatccatcgtggccccctatgacccccaagccctaccgagggggcactcactctctgcttagccagggggcgtctttcaaaaggtgacctccatgctgtgctgtcgtgggtgtgagacgtgctcatggccttccactgccatctctcccttatctgatgcctaaagtcacgatggggacagagctacccaggggccagccatggggtgaccagccacctgagggtcagtcacctgtggagagcaggcacctgtgaagaccaggcacctgaggactggcgcctacttcccactttggccctacactggcacagagcccctctttattcatttctcatgctgagcatggcacacttctggcctctgggcatttatggatttaagaccaggatggtatttcagaagcttcccacttccttcctattctaaccgagtgcccagctcctttgctgatcatggaaagacccttaataattaggcctgcaggccaggcgcagtggctcatgcctataatcccagcactttaggaggtcaaggtaggaggatcgcttaagcccaggagttcaagaccagcctgggcaacacaggaagaatgtgtctctacaaaaaataattaaaaatcagatctgctgtatccctgaaaaagtctcaatcaacatgcatgttccactcttggagttccctgttctgagggccagccacgtcctgtgtcctggagcttagccctcagcagctcccttcagcctgggcgccgcctgggtcccaaacgtggcagctgctcttccagtctcggggccgaggagggcagggagctcagtgactgagagtcttgtgtatcacatgtcttgagtgtcctggagccaacggtgtcactgggaaaaacaccaggccccaaagatcgaatcagagacgtggctgcgtgtttgcgattgtagccaggcccttcagtgtcatcaaaggagcactggggcctccttaagcacagacggcagcccctgcccaggaggcttcttcaccacgtcctgccctgcagcctcccagacctttagatgcgcccctgcccaaggccctcctggtgacaggtgccagattgagtggtgggttgctgccaggcaggccacgctgtgttgacgctgcactcagcacgtgggtgttggctctgccggttttgtggtgtggggaccctacaggaggctgcggccctgagagcctgggatcagcgaggtgtccgacatcccttcctcaacggcaacaaaaactccccaagtcagcactttggttattttatagccacaaccctcttggaaaacagtggggaagactatggaacatagaaagtgtggatgtatcacttctctctaaaatgtcattgttagcactaattacaggttcatgtttttctgtttatgtagcttttccctatatagctgaaaaagtattaaagtcaaatataaggtgggaatgggatggaagggaggagatcaatacaacttatatttttgcagtttctactggaagaaaaaagttttcaatacctagaccaacttgttgaatttttaaaacttatgcactataaatgcaactttctctactgctttctcagtgcctttaggaagctttcaaatttttttgtactgtggtttgtattaaatttgcaatattgatgtaaaatacatgacatgctagtacatgtttaacaaaaatttaaaaaaaaa

SEQ ID NO: 193740 - DNA, 955 bp, Homo sapiens
ggtgataatgccaggccctgcccccggcagaggcggaagcggagtcggcctgagaggtctctcgtcgctgcaggcgcctcagcccagccgcgtgccttggcccatggccgcctactcttaccgccccggccctggggccggccctgggcctgctgcaggcgcggcgctgccggaccagagcttcctgtggaacgttttccagagggtcgataaagacaggagtggagtgatatcagacaccgagcttcagcaagctctctccaacggcacgtggactccctttaatccagtgactgtcaggtcgatcatatgccgaggacgatgatcccgccgggggagtgcacgtacgcgggccggaagcggaggaggcccctgcagaaacagaggcccgccgtgggggcagagaagtccaacccctccaagcgacaccgggaccgcctcaacgccgagttggaccacctggccagcctgctgccgttcccgcctgacatcatctccaagctggacaagctttctgtcctgcgcctcagtgtcagttacctccgggtgaagagcttcttccaagtgaaacgtcagaggagagagatacatggaaggaattgccaaaagaaaaggaaccagaacttgaaggacaggggttggcagtggcagatgccgaagatgtggatgaccacacgggcgaacgaaggcccatgtcgttcaggaggccccgagcattggacacccaggccctgagacgtactcagttcggtctgcatctgttgatggtgaatattgcaggactgatagccactgaccgcctgtagtgatgtgtgaggacaatgaaggcaatggtgattcacaggcaggccagccccatatgggtgttagttgtaaattcatggttacataacataataaatttacctacgaattcattatttataaacaaatggagactctgacagctgagctg

SEQ ID NO: 193741 - DNA, 505 bp, Homo sapiens
cacaataccctgcagccttgacctcatgggctcaagcagtcctcccacctcagcctcctgggtagctgggactacaggcttgcactaccacacccagcttattttttgtagagacagagtttcgtcatgttgcccaggctggtctcaggagtcactcctgagctcaagtgatccgcctgccttggcctcccacagtgctgggattacaggagtgagccaccatgtctggtcctctgacccttttagcaggaaatccagcccagcccctgaacggcatgttagacagttcaacaaagccttctagaagaccaaagaagactcataggaataagcctcttgctgattaatggaaacatgaccatttgtggagaaagtgcaatctgcattgaacacctttaggggaacctgtcatttaagacttcaagcattaccatgaaaacttcctctgaaacaccttacagacatctctgtaaaacagatttaaaaagaaacacatttctgctta

SEQ ID NO: 193742 - DNA, 603 bp, Homo sapiens
acatcacagacataaatatcggtgcaggcggccagccactcctcaagcccggccccgcccctcctgctcccagcggaagcttttggtgcaggacttcccgggcctcaatctcctcatctataggctgggaacaaaccctggagtctgtgctctgggaggagcacacacgggcaaccctggctcaggacagattcccagcccctaagtcatcactagggcttaacgatccatttcaaattacatctgcacggtgctttactttcatacgttattttatttggagcctctaacgagcctcagctaacagatggtattatttccacatggcaaacaaagagacaggagctgcaaccatccaaagacacctccttgctatgaatgcctggccaggcctccaggcaggaccagcaactccagaccccgtcagggccaacacgggccactgctgtccacacactcctagaaaatatccatctgtctgaagcgagtgacacagattttaccctcttgaggataaaataatcccatctgccaaaatgacccacaaataaaggctcctccttgtctgaacgctgcctcagcgtctgagggataagcccacaa

SEQ ID NO: 193743 - DNA, 751 bp, Homo sapiens
tacagacctcgatggaactgacagactgatctaggtagacagatgtagacatccctaggtgattacaactccaacctggatagatgccatgtagtcttccaattagagatgctatacagccaatgaaacttaaccatgtctttaataggtgtgccaccttttgttaaaatcagttatcttacaagtatcatgagaaaaaacattagtatcaacagattgaaacatttattgggaagaaagtgaggccacagtcaggaaaaatagcataagccacaacctcttagtcaagaatcttagaaacagctgtgtttcgtgtgtttcagaactctgaattgttctgattttaggaaagtgacgtgtgcatattccacttggggcctggggcaacaccctcatcaaactgatattcctgcagcaaaatacaagcaggacgaaaaggatcatgggtcgtctcgtgccaaatcaggttagactttccgccaaatgaagtacacaaaactttccatgtttaggactatgaatttgggccaggcactgtgactcatgcctgtaatcccagcactttgagaggctgagacaggtggatcacttgagcccgggagttcaagaccaacctgggcaacatagtgagacctcatttctacaaaaaattagctgagtgtggtggtgtgcacctgtctggagtcccagctactcaggaggctgaggtgggaggatccattgagcctaggaggtcaaggctgcagtgagc

SEQ ID NO: 193744 - DNA, 364 bp, Homo sapiens
aaaggagacctcagagaactccccagcccctattgccatgtgaaggcacagagaagacagctgtctatagaccaggaagcaggccttcgtcagatactgaatctgatggtgccttgatcttggactgtccagcctccaaaactgtgagaaataaatacttgttgcttaagccatctagtatttggcagtttgttatagcagcctgaaggaactaagaggtaagttaattaagtgaaaatgaggctgttagggtgggccataatccaatccaactggtagccttaaaagaagaagacatttagagacacagagagacaccagatacgtgcacacatggacgaccatgtagggactcagcaagatg

SEQ ID NO: 193745 - DNA, 237 bp, Homo sapiens
tgtccattcatccctctcttacctccccctgaacctctggtagccagtgattgcattatagtctctatagttctgtccttcccagaatgtcaaagagctggaatcacatattacatagccttttcagactaacttacttcactcatgaatatgtatttaaggttcctccatgccttttcatagcttgataacatttctttttatctctgaataatattctattgtctagatgtgcca

SEQ ID NO: 193746 - DNA, 330 bp, Homo sapiens
aactgtctttggttttatgatgataaataaaaaacattaaaattctccaatcaaacaaggtatgcaaggatttttcatgttggcttttttgttgaaatagtgagaggaaattaagttactggaatataaagataagcatgccactaatggagaaagagtattttcacagaaccagtatctttccccatcccatatccatttgatggtaatcaaaacataccattggccattttgttttcttaaaagtacaatatgcgtgtgtacacacaccacttactctacatgtaatataggaatggggggggggggaatgaaagaatagagaatact

SEQ ID NO: 193747 - DNA, 393 bp, Homo sapiens
tggaaagaacctgggcttaggagttggagagtacttgggtttgaaggctgtggatccttgggtaaatcacttaatctctctgaatcagctttctcatctgttgaagagacatcacagtggtggcatctgaaagatgtcatgaggtataatgtgtcttggacacctaaaatcaggacccaggactaactatagacctgataatcagtatttataattattacattattaggacccaggtcctatttctgtgcaatgttgaaagatagtgataagaacaatttagatcagaacttacaagtttgcatgatcttcattataaatgaaatagtgaaacaatgctgagcggatttacagaggcgtaactcattcattaaccagcttagacaggcattt

SEQ ID NO: 193748 - DNA, 315 bp, Homo sapiens
cattttgcgcgacgcttcatcaacatctcagtggggtgcatttctttctgctgccaaactttgtcagctaatgtggtcaacactgttaacactttactggttgtatgagttgttatgtcattatcctttgtttgagtttgtggactgctgaagtgtgcagctgagtcagtggacttcctgaatgcagggaacctagtcgtgcttgggtttgcacccctagatcgtccttttgtgacagtggaggagcaaaccctggctgtagcaggtgtgctctgtgtgtttgatggaagcgtcgcgcatggggtcctctagaga

SEQ ID NO: 193749 - DNA, 120 bp, Homo sapiens
cagcctaccaatagatagaaatacctgaaactggttatcagcagcttcctgaaaagatctcaggagttgggtgaatgggcttaagaaagtgaactaaggggcaaaatggtgaagtcgaaa

SEQ ID NO: 193750 - DNA, 515 bp, Homo sapiens
taaacagaaaagaacacatcactttgtcttttacccctaaaagtacattgaatgacaatagggtgatgtgctgtttccttatggtagatgcccaggagcatcttacctgcttttggggcagctggcacagcacgtgcgaggggtttgggttttccgagtcacgggtggtttctgtatcctggggatgcatacagaaatcctcttcctgaaggtcagtgggttcgtataaagtggtgatacagttaagggaggggcatggggaagagggtcacctgaggaggagtctgactagtctccctcatctttcttccctgcccttattgatctctttgtcttttgctgtggtagaatgagtgagaactgatgagttagggtgatctgggttcaaattctggacccatgattaacttgagtccagaagagatggagaaacaaatattcactttctgtgtatgtaaaacagagttctcacctactttgcagtactgttgtgtggattaaatagcatttgccaa

SEQ ID NO: 193751 - DNA, 280 bp, Homo sapiens
atccttacagtttctcccagtctctcactttcctcttgccttcatgtctttccctacccagcctagagtccttgatccattatgttaccaccttttatcttttcatgcacccacctggcaaaaatgatagccctgactcaatagaaatttcttccttcttgtactaaccttcaggctgtggaatgctgatggagaaaatcacatcagagcagacgggtgctgctgtaaatttctaaattttaatctcagggccgtcatctctgtctagaaactaattagg

SEQ ID NO: 193752 - DNA, 187 bp, Homo sapiens
ccaccctcagccagggtgggtgaaacggttactcaaacaaaaggtgactccaccttctacagatacttctttctttaactctatagcctgaggactaagaaagtcctgcgcagagaatctgcttcttaccttaccttcttcctctctgaagctcccaggtgcctaggagagagttaatgtccaggat

SEQ ID NO: 193753 - DNA, 634 bp, Homo sapiens
ccaggcagatggcactgtgatgtctatgagatcagtgtgcggcataaatccgacagctcaaattctggaattgtataagcttttaaaaagattgccggcatatcttttatttttattgtgctagaaacacaaacgaaaacagcaatgatttgtccttcaataaacaaaagcagtaaaagaataggggagaaaaaaatcactacccactttacattccctgagcctacttctcgctgtgacttagagcaggttgtaaaaaacccatttagagggggctgcatgttcctgctgcccctcgctccctgccaggggctgtggtgtcagccagacccgggttcacgtgtgggtctgctgcttgctggctgtgtggcctcaaatcagtcccttaacctctctgaaccacagtcaccttcctatataagaagactatagttaataaaggtggaaatgcttaagttactgcctggcaggtagaaggcactcaggaaattcaacagttatgatcactgtggtaagtgttattgtcagctgcaaaatgaggatgataactcccccctgattctcaaggtcatggtgatattcaagggagatgacagatagaaaagagctttgtaaactgtagtgcactgtgtac

SEQ ID NO: 193754 - DNA, 619 bp, Homo sapiens
cgaagagatctttgagcatcaccccccattacggggctgctactcccaggatcaggcagcctctgcccaccttttctcacttcaccctttctccttgcagaataagaaagaatcggctccagctatttgtttcttactgtggatttatccatgtgtcacctctcccaggcagaattacattctgaaggcatctctaattgagattgctccatggggaaggactcttagggctcaggaagcaggtggtaaagccctggagtgaggcaggaaccccaaagccctatgacaccccatataggtacccccaaacctgcctatacttcaggccaggcccccagtatagagatgaaaaaatagtcccactttgggtcacagattctggaaaactgtgagattctggggaaatccattttgagtaataccttttagaagaagaaacacctggaagtagcttatcatagaagtgggttccgttagacaaagatggcaattcaggaggaagcataaatttaacaactctcaagtatgcacagctgacatctcgtaaagcggggctggtgactaagccagaagttactgtctgcatccttggtaccttacaactaaccatgaggacccg

SEQ ID NO: 193755 - DNA, 212 bp, Homo sapiens
aaattaccaagcaagagttaggtagacattaaatacaaacaaaaaactgtgcttagggaacacaatttcattactttacaagatcattgaaagtcatgtttattatgtcatgtctattggcatgtctggatccatgtggtcacatgcctcagagtccagaggcctgtagaggagaatgtccatgattccccccctttccatagaatggtttg

SEQ ID NO: 193756 - DNA, 362 bp, Homo sapiens
tgatgagcacaaaacaacatcttttttgctcccacataagagccagaatatgtgatatctgtttttctgtgcttgacatatttcacttaacataatgtccttcgggctcattcctgttgctgcaaatgacaggattccattcttttctatggctgaatagtactccatcatgtctgtatctatgttttctttatccattaatgcttcatgcgtgaaagtagagtggtgttacttgtatgtcttttatggagttaaatatccactgatggatatttaggttgattcagtatcttagctattgtgaatagtgctgcaatacgcattgggggtgtgcgtatccctttgatttcctttcttttgta

SEQ ID NO: 193757 - DNA, 881 bp, Homo sapiens
ccaaactctgattgttgctgggtttattagattgtctctaggtaattggagactttaataagagctgtggtaggtgttggaagcatctactggaacaatttccagatcaaagtgaactttgctgtgctgctggggatgcagctgcaagccttcatcatcatgtgtttttctgtgggtgcagacctggactctcctgaggaaaccccagcccggccccagacactccttggcctcctcctggggcctgtttaagctgctcagttttcatgagccaggttggtcctacttctggcacagccagctggtaaagcatgtggacctgcccgtcattggtgctagatcgacactcctgggcttggagaggataactttgttttcttttgtttttttgagatggagtctcgctctgtcacccagtcttgagggcaggggtgcgatcttggctcactggaacctccacctcctaggttcaagtgattctcgtgcctcagcctctggagtagctgggattacaggcatgagccaccatgcccggctaatttttgtgtttttaagtagagagagtttcaccatgttggccaggctagtctccaattcctgacttcaggtgatccgcccgcctcggcctcccaaagtgctgggattacaggcaggagccactgcccctgaccagagaggataactttactctttgatacacgatagtgagcaaaacacagttgtgagaaataagcttaacaggttgcttaaaaagatagtcatttaatgcattcttggggcaagggtcctttagataattgacggaagctgtgcgttctgtacttgtataatgggacaggattagagggagttgtctatacaaggcacagcaagtcctttgg

SEQ ID NO: 193758 - DNA, 545 bp, Homo sapiens
ctaatcatctcccagatggttcacctcttaacaccactgccctgggaattaagtttcaacataagaatttgggggacatatgaattcaacttatgaattgcagtttttgccattactttcaatgggaaaaaccacagttacttttgcaccaacctaataattaacttgcctaagatgattatagctagggagaggaagagctgtagttcatattggtatcaaaacccttgatgcataagcaggtaggttttttggtttggatcgtctaagcaatattgtttcccctttatttcacatgtgtttatagtcagtgactctgaaatctaggggagcctaggagagcatgagtatctattctctcattgtggaagctctgtcatcttcaatcattggaaacttttggtgtcccatatccatcagacagaaagctttttacttgcatttgtttcagatctctaggatggtcctgtatgtctgcctagaaaaaaataaaaccactcttagaccaagtcatacctgtgttctcttttccacaggaattctgg

SEQ ID NO: 193759 - DNA, 536 bp, Homo sapiens
gaggctgaggtgggaggatctcttgggcccaggaggctgaggctgcagtgagctgtgatcgcaccactgtactccagcctgggcgtaagagtgagaccctgtctcaaaaaataataataatgataaataaaattggcatgacttcttggtggattaaaccttttgttattatgtggtataaacaaaactgtcatgccttcttggtggattaaaccttttgttattatgtggttaccttctaatacctaataaaatgtttctcataaatttatctgatactaataaaattatatcagctttcttttggttagtatttgcctgatatatctctttccttaatgttttcttaatgttcagcttttgtatgtccttatatctcttataaatagtatatgtctagattttattgtttaatccagtctgtcaatctttgtcttagtctatttacattactggttttattgatatgcttggaccattgtgccatcctaaattatttgtcccactttttctgcttctttataatctcttcttaa

SEQ ID NO: 193760 - DNA, 221 bp, Homo sapiens
aaataggggagtgtgtgctgattggttcatgagtggtcttagaaaaaggaccattcaattggttaaaaggcatcgaggaagttctcactctggtcatgggctctctgtggaaccagcagcttgtttttcaggtttcaggctgtctttggcttgaagactggatttctctggggacacgtccttgtctgcctaggaatttgtctgtctcctgtcactatcca

SEQ ID NO: 193761 - DNA, 681 bp, Homo sapiens
gagaagtgtctgttcatatccttctcccactttttgatggggttgtttgtttgtttttcttgtaaatttgttaaagttctctgtagattctagatattagccctttgtcaaaaggataaattgcaaaaattttaaaacagaaaactggggctatattcttcaggccatgggagggtttttgaccattccatggatcctatctgaggtatggcagtgagcagtaaacttttggctttactagcattttctttcggggtctgtaagtcccggtccaccaaaactgcttcctcgtgctccttccagcagtcataatctgtcaccatggcaatactcgcataacaaattccagcctctttagtgagaaccacctctggaactgtggtcatgttgataacatccaccccccaggtgcagaacatgaagctttctgctcaagagataaaacgaggtccctcagttgtgaccattgtcccctttgaatgtcaccagagtcctagcttcttagcagtctctataagaacgtctctcgtttgggggcttggcccccattggaatatggcacactcctctagcacaacaatgacttccatcatagagggactgaggtctcatactggtcctgtcaatgaactgatcaataatgacaatatcgccaggttgaatctcctccctcaaggagcc

SEQ ID NO: 193762 - DNA, 240 bp, Homo sapiens
gctgtcctaaaggtggtggatatgacaggggcttttgacaaatttgacattttcagtaattcatgaatcacttctaaaaacatactcagtgatttgggtggtatctgtaaattaatctatcatccttgtcttggcatttgagttctgccttgtctaagtgggtgtgtttctggagtgggagaagggaggtccgttgtgacattgcatggaaataatttcttttacctttaacaagctgga

SEQ ID NO: 193763 - DNA, 289 bp, Homo sapiens
tggggagaggtaagcgagggagcgagtgggggattaggtcagagaggtaatctagatctttttacttcaaattctttgttctctctagtgcaccacactctcagattctttggttaatcagtttgtaaagagatcaaacatcctgaaattcactgttctttagcgtgatctgtcaattcctcctgccacatttgcctggggtgcttgttaaatacggattattgatcactagacccactaataagaatttctagggtgggacccatgaatgtgcatttaaaaaaaatgt

SEQ ID NO: 193764 - DNA, 271 bp, Homo sapiens
agtaaaccactttccaaatcctttttgggaaaaagtgtattacatgaactcaactattaaagctgccagaggacagaacgatatcttttagcttatttactggaagcactattgtggctgaattgtgttcttcagtaagatacgttgaagccagctgggcatggtggctcacatctgtaatctcagcactttgggaggcggaggcaggtggatcgcctgaggtcaggagttcgagaccagagtcagtgtttttaatgacaccccttaagcg

SEQ ID NO: 193765 - DNA, 557 bp, Homo sapiens
tacctcatgccctgacatggctggacctcaagacactaaggtctggccaggatgccagggagccataacaagtccctgccacccccaccagaggagcacagcatggcccagctggccccctcatctgggctcacatcctgaaaagctctctcagacattctggggtctccagctatagccagactcggtaaatggcctggaactgccatcttgggccagctagagttgcccaggccctagacaaaccttccctctggaccccatctgcaatgctacatgcacccccaccaactgggacttcacacacaggccagtgtaccccatttctgcaagccactggacacataagcactattctcaaggggtttgcaaacaaggaggctctgatacaacagacgtggatctgactcccacaagtgtcattttccctgggagcatgagagagcaggcaagaggccctatggtcggcccattcccaatccagacagtccctggaccatcacttctctggactgaacttcagctctgaaaagcagagcccaggccaacaggccaga

SEQ ID NO: 193766 - DNA, 169 bp, Homo sapiens
gtaaattacaatgtcttactgcatttttttctttttaacattactataaacaattagaagatccttgctgtccaaaatagtgtattatttgcttgtatactttgcagcacaaagcagtctcttatcagtgtgctcaataaagtgggtagatacatacatgacctcagaa

SEQ ID NO: 193767 - DNA, 359 bp, Homo sapiens
tggtgttctggagaacaggatcggtgcccttagacatttgcccttcttcctgcctcctccatccgttcacttgaaactgtagagacttaaacagtttgataccaaattctggtattgaaactaaaatccttcccaggagacaaaactttaacttcacttcctatgaaaaattaccctttgtgaaatataatttgaactctggccagtgctttgattgaactctggccagctccttgcattattgttggttgccataatgtctaaagatatttattgtctgcaccttcacagttcactgaccttcagtattcttcctgaagttagccttgtttgtaatgttactcagaacaccgtcgaat

SEQ ID NO: 193768 - DNA, 334 bp, Homo sapiens
ccacccccagtcgtcagttgttgcatcgtcttctattgttggccttcaggctttccagatgctccacttctgcttggttggttcattcgttttgaacgacacgctgtgatttccagccgttcacaggaggcagccaacaggctggtgctcgctcccactggtcttcccccttgctccatgtctgtgtgtgcacgcataaatgtatatgtgtgcatgcctgtaaacatgtgtgcttgtgtctgtgcatgtacctgtggacctgcgtctccttcccccactgtcagagctcgggccagcgagagcccgcgtcctgtagcctgtcatagaagtgggt

SEQ ID NO: 193769 - DNA, 167 bp, Homo sapiens
tagatcacaagctgtattgaggaacatttgatgatagctctactactaaacatttgcagtattaatggcatttacatttggtagtaagcatggtcaagacaggtcagaaaaagcttctcaggccaggcagaaggggtggcaagatccaagcacaaggcagtgcctac

SEQ ID NO: 193770 - DNA, 546 bp, Homo sapiens
cacacgacacattcacaacacaccgacactcacccatggacgtactcatgacacattcatagacacgacacactagcagacacatggacacacacttagcactcaccaacacggtacactcacacatggacacactcgccaacacacctgtgacacgttcacaacacaccgacacactcacatgacatagacatgcgatacacccacgggcattcatggacacacttgtgggcacactcatacacagacactgacacactcaaacacaacaatagactcatgacacgcttatgacacacacacatccctgacacactgagatactaactcactggcacactcatactcctaacacccgcatccctggcacagttactaacacctgcacacacccgtgtagacgcctacactcacacacatgagatcctgcaggggcggctgctgtgacctgcctccctgctttccaggcaaggcaggccccacacagatacaccttggttggcccggtccccctgagttcctggcactagttgtcgtcagccctgc

SEQ ID NO: 193771 - DNA, 2519 bp, Homo sapiens
gaaaatgtgtatgtgtgtatatgtgtgcgagtgtgcgtgtgtgcgcgcgctgtacctctccctgcgtggtgaagccatcagattgtgcgctcactgatccctgttgttgagtctgataagggtgagctcagaagccatcagatcgtggcctcactggtcccagttgtggagtccgatgagggtgagctcagatgctctgtggtcactccctgtgccgtgcttcggggacgctgagatgctgcaccagccaggcagggcggggtgggccccacttccatcgagctcctgcggatgatgagcaccacccaggagccacctggggggcagggcaggggctgaatcccactgggggtgactgtctctcacatgacaggagtccagggcatgcatggaggctcctccgtgtcatctagcgccagctccttctgtcactcctctgtggcctggagcggcctgctgtctcccggtcacgagccagcccgtgggcatcagcaccgcaagagcagggtccgtccatcttttgaggcacccccacccccgccacacagtgccttctgtttcctctcattgggcagaatcgtgtcatgtggccgcccagttgcaagggagcccgggaagggtgcgtgggccctgtccagcagacctggctgcttgtgataatgccatcagtggccctgttgtcactttggccttgcttacgttgccgattaggttaggaaatggtcttgattctgggatatgtgagcctgaagttaccaatgtaaagcagcacctaatacatgttttggccaaatgggcatttgttaaaaaaaacaacaaggtttggtcagagctcaatgtcaccatctttggacaaatttatgtgatataagaatacatcagagattttattgaaaaatatattgcaatttcatcattacatactttaatggcaaaatatgctattaacagtgcaaggccaatatgctccctgttgcagctgcccgtgaggtggccttccccagggacgctgacatgtctgccacctccagcatggccgtgcagaagcaagacgtccatgggcagctccaatggtgacgttgcctgcacgccacctagctgagcaggaacagttgtattggaggcgtgtgggtgacgagagagaggttaacggctggtgtttgtgtgaaactggagacaaatgaggactgggcattgtgtctacgtgggcgtgtgcaacaactgcgtgcatgacagctgctgtggatcacatgggctcatgagtgtgcctggtgtccacagatgtgcacagtggtcataagtgtgcagtgttggtgtgtgtgcacagtggctgtgggtgtgcgtagtagccataggtgtgcacagcggccatgggtgtgcaaagtagtgggtgtgcacggtgctgggcgtgcacagtggccgtgggtgtgcactgtggtaggcgtgcacagtgcctagatgtgcacgctgttggtgtgcatggtgatgggcatgcacagtgggtgtgcacagtggccgagggtgtgcatggtggtggtgtgcagtgtctgggtgtgcactgtggtaggtgtgaacagtgggtgtgcatggtggtggccgtgcacagtgggtgtgcatatcggtgtctgtgggtgtgcacagtgtcttgggtgagcatagtggtgggcacgctgcatagggtgggtgtgcgcagtggtggtgggtgtgcacggtggtgggcgtgcacggtggtgggcatgcacagtgggtgtgcatagtgactgtgggcgtgcacagtgtgggtgtacactgtggtaggtgtgcacagtggatgtgcacagtggccgtgggtgtgcacagtgtctgtgggtgtgcacggtggtgggtttgcacagtgactttgggcatgcactgtcttgttctgctgcagtgctggtggcgtagtgtccacaggctggctgagcactggtggcagctgcggtgagtgttgcttcttgcctgatgggacttctttggtgttgctgctcctcccttggttggggttttctagagccctgagcgccctcacactgaggtcagcgctgttatctgtgagaagaagctgtgtcaggctctggtgacacacacttcaccctgccaagccccccagtaactgctgtggaccaggcagcaagaagatttgccctgagcggcgcaaggggcaggacccatggctggggctccacactcagggtgtctggctccttcattaggtgatggcttcgccgattcactctcacttgctctccttttcctgtttcttgggcctctcctcgcctggccacctgaccaaaagattgctttatgtgatgtgattcatgtaacaagtgcttctgccttaaacccagagtctgtgccttggctcacgcctgtgatcctaacatttcaagaggcccaggctagaggatggcttgagcccaggaattcgaggctgcagtgagctatgatcacgccactgcactccagcctgggtgacagagcaagaccctgtctctaaattt

SEQ ID NO: 193772 - DNA, 616 bp, Homo sapiens
gagcatcactgagtgagcccataatgtgagtctgcagtgagctgtgatccacaccagtgcactccagcctggatgatacagcgagactgtgtcccagaaacaaaacaaacaaaacaaattgggtgtagggtcaacttggataaacaacctcctaggggaaaatgcctatgcataatatatttttttattgggttatacaaacatttaaaattatatacacatacgcacacgttcacatacatagatacacacacgtatcttcctatatccatatatattcatttagaaatatagatacacagttaacccttgaacaacatgggtttgaactgtgcaggttcacttatacatggattttcttccacttctgccactcctgagacatcaagaccgacccctcccctttctggttctctcaagcctagtcaatgtgaagacaaggatgaagacctttatgatgatccacttccacttaattaatagcaaatatatgtttcttatgattttcctaatgaaactttttcccgtagctttcttcatggtaagaatacagtatatggtacacatttacaaaatatgtgttaatcaacaattctgggtatcagcaaggcttgca

SEQ ID NO: 193773 - DNA, 530 bp, Homo sapiens
tcatggatttttttcatcagccttttctagttaattaagtataagtataagagacctatctgctatttactgagtgccctggagaaattgcaaaaagtgtctctggaaaatgctgactattgcctctggggcatcctgatatggctgcagtgggaggccggcagaagtaacaaccctcccatcgtgcctcagtgtatttgtgtgtgtatgcgcgtgcatgcaaatgcatacacacgtacatgtatataattattaaacagaattttcttgaggaaaaacattttattaatatgacctacactgcattgtagttttctatcaatttcactggattaaaagattgagggaataagattggcagactaccccctagtggctaacttgaagaaagttgtgcacaaattgtaaagaactactgcattaaggtaacagtaattgtttatttccattatatttattaaatatacttattaaatctatgtcccaggcactggatcaggtgcttggaataaaaatccagtaaacagaaa

SEQ ID NO: 193774 - DNA, 463 bp, Homo sapiens
gtgagatgctgtctcaaaaaaagaaaattaaaaaaacttttttttctatctctaggccagagtttgcaaactcaagtgtcttcatggaaaaggcagataattcaagggagtaacgtgggctgggtgaggactgtggcaaactaaagctaaaaggaaatgtctgcagggcttttgtccacatagagccactgacccctgataccaaaactgtgagtctagtgctgcctgatcatcggttttaggcagtaatctccatgaagacagggcccgctctgctttgttgaccactgtctgccccacacatgactcaatgttgaatgaatgaataaatgaatgaatgaatgaacaaacaaacagggcagaggtatggaggaagaggagggaggaaagaaatgtaagagtcagcctctgcactcaactcaagcaggacccctctaggtgggaagatgaaacgagcatatta

SEQ ID NO: 193775 - DNA, 3176 bp, Homo sapiens
  misc_feature (65)..(65): n is a, c, g, or t
  misc_feature (2976)..(2976): n is a, c, g, or t
  misc_feature (3057)..(3057): n is a, c, g, or t
  misc_feature (3070)..(3070): n is a, c, g, or t
acatattcccaggtctgagctccagaaatacctcagaaggcactgagctcatacttctgactgancttcaggctctatgcaagcaggaagtgagggctactgcagagttgttaactgcccgactgagtgttgaaagcattctctaatgcatagaacctcaaaacaaaaactgggagatgactggttctgggcctttaaggaaatctctgtctggccattaactgaccactaagctaactgaggagagacttagtggccacacatggtagataatacagattttgcataattaattcagaaaagttaataataaactacaacaaactctgggggaatggaggtgtatctggtttctggagttgccacattatactatttaaaatgttcatttttcaacaaaaaattgtgagatgtgagaaagcacaagaaagtatgacctacacatggggaagaaagcaatcgatagagactgtcattgaggaagacaagatgctggatgtaccagacaaatactttaaatttatggtcttaaatatcttccaagaacaaaggaaaacttttctaaataatttaaagtataagagtgatgttttaccacatagagaatatcagtaaaggacagaaattatagagaaccaagtagaaattctggagttgaaaagtacaataactgaatttaaactctcactagaggatttcaacagaagatttgagcaggtagtgtaaagtgtaagtaaaaaaggaaataggtaaattgaaagtatccagcttgaggaaaaaagaatgaagagaactgaccagtgactcagagacctgtgtgacatcatcaaacatacaaacaaatgcaaatgcataactgaagccccagaaagggaggagggagataaaggggcagaaaattatttgatgaaataatagctgacacttcccaaagataaagaaaaatgtttatctacacatccaataagctcaaccaattccaagtagggaacatgcaaagagatagccacactgacacacatcattatcaaaccgtcaaagccaaggacaaagagagaatcttgaaggcatcaagagagaagcaactcatctcatacaggagatccttagttaggttaacacctgactttttaccagaaaacatggaggccagtaggcagttgggtgacatattaaacacattggaaaaaaaaatactatcaaccaagaagtttatatctgaaaaaataaaggtgaaattaagacattctcaggtaaatcaaaaccagagtctatcactaggaaatctgtcctacaagaaatactaatgagagtaccttagactgaaatgaaagaacacaagacagtaactcaaaaccacatgaagaaacaaagagcactggtaaaggcagtgacatggggacctagaaaagacattctaggaagattctgggaagatggtggagcaataagcaccagaaatatgtttccctacccagacaacaattgcactggcagaatctgtctgatgtaacagttttggagctctggagtctattggattgcagcttccaggagtaggtttggaggcaaaatgcagttaattttggcacaacagcagtcacccatcctccccaccagccccagcgcagacagttatgcacatgttcctgtagcagtttacagacagctttcaggagcgaggctggcaagaaaaaaggatgttgtccttcagatatttgggattggtgttctgattgctgattgctgttctgatcacaagagtgcaaagaagcaggtgcctattgtttcaccttcccccattgttgcaagctctcctgcactggatgaagtgacttcatttttctccttttccctttttggaagccagacattaaagactaggacattcaaaagcagctgcatgtatggagaaagttagaaagtgatatggcacatacaggctcagaaaagacctgagaagaccttatgtttgtacctaacgctgacccttggcacagagaaagcctacaacaacaacaaaatgtaacaaaaagcaacaaaccccagggaagggggaaacatgattttcaaaattgtgatattagattcaaatgtccgattttcaagaaaaagaatcacaaggcatacaaagaaacaggaaagtatggcccatttaaagaaaaaaagtcaatagaaactgttcctaaaaagacctgattgattatatatctactagacaaagactttaaaacaactgtcttaaagatgctcaaaggactaaaggaagtgtcaagaaagtcaacaaaaaaatgaatgaccaaaattgaaatattcataaaaagatataaaacctaaaaagaaaccaaaaagaaattctgaaggtgaaaagtataatcatggaaatgaaaattcactagagggattaaaaagcagatttgagcaggcagaagaaagaatcagagaacttgaagacaggacaatggaaattattgtctgaggaacacaaagaaaaaatattgaagaaaaatgaacaaagcctaagaaacctgtgggacaccataaaacagggcaacatatgcattgggggagaagagagactgaaagagtcaggagaacatttgaagaaataatagtttaaaattttccaaatctgatgaaagacatgtatataaacatctaagctcaacaaactccaggtaagatgaactcaaagaacccacaccaagatacatcaaacttttggaagacagataaaaagacagaatcttgaaagcaacaagaggaattactcatcacatacaaggaattgccacaagattatcagcagatatcaaaaactttggaggccagaaagcagtgggctgatatatattctgagtgttcaagaaaaaaaaaactaaggactctatatctagcaaaactgtccttcaaaagtgagagagggctgggtgtggtggctcactcctgtaatcccagctgaggtcaggagttcangaccagcctggccaacatggtgaaaccccatctccactaaaaatacaaaaattagctgggtgtggtggtgcatgcctgtantcccagttactcnggaggctgaggcaggagaatcgcttagaacacgggaggtggaggttgcagtcagcagagatcgcaccactgcactccaacctgggcaacaagagtgaaactccatc

SEQ ID NO: 193776 - DNA, 1917 bp, Homo sapiens
  misc_feature (1717)..(1717): n is a, c, g, or t
  misc_feature (1798)..(1798): n is a, c, g, or t
  misc_feature (1811)..(1811): n is a, c, g, or t
gtgtgatgttccccttcctgtgtccatctgtcctacaagaaatactaatgagagtaccttagactgaaatgaaagaacacaagacagtaactcaaaaccacatgaagaaacaaagagcactggtaaaggcagtgacatggggacctagaaaagacattctaggaagattctgggaagatggtggagcaataagcaccagaaatatgtttccctacccagacaacaattgcactggcagaatctgtctgatgtaacagttttggagctctggagtctattggattgcagcttccaggagtaggtttggaggcaaaatgcagttaattttggcacaacagcagtcacccatcctccccaccagccccagcgcagacagttatgcacatgttcctgtagcagtttacagacagctttcaggagcgaggctggcaagaaaaaaggatgttgtccttcagatatttgggattggtgttctgattgctgattgctgttctgatcacaagagtgcaaagaagcaggtgcctattgtttcaccttcccccattgttgcaagctctcctgcactggatgaagtgacttcatttttctccttttccctttttggaagccagacattaaagactaggacattcaaaagcagctgcatgtatggagaaagttagaaagtgatatggcacatacaggctcagaaaagacctgagaagaccttatgtttgtacctaacgctgacccttggcacagagaaagcctacaacaacaacaaaatgtaacaaaaagcaacaaaccccagggaagggggaaacatgattttcaaaattgtgatattagattcaaatgtccgattttcaagaaaaagaatcacaaggcatacaaagaaacaggaaagtatggcccatttaaagaaaaaaagtcaatagaaactgttcctaaaaagacctgattgattatatatctactagacaaagactttaaaacaactgtcttaaagatgctcaaaggactaaaggaagtgtcaagaaagtcaacaaaaaaatgaatgaccaaaattgaaatattcataaaaagatataaaacctaaaaagaaaccaaaaagaaattctgaaggtgaaaagtataatcatggaaatgaaaattcactagagggattaaaaagcagatttgagcaggcagaagaaagaatcagagaacttgaagacaggacaatggaaattattgtctgaggaacacaaagaaaaaatattgaagaaaaatgaacaaagcctaagaaacctgtgggacaccataaaacagggcaacatatgcattgggggagaagagagactgaaagagtcaggagaacatttgaagaaataatagtttaaaattttccaaatctgatgaaagacatgtatataaacatctaagctcaacaaactccaggtaagatgaactcaaagaacccacaccaagatacatcaaacttttggaagacagataaaaagacagaatcttgaaagcaacaagaggaattactcatcacatacaaggaattgccacaagattatcagcagatatcaaaaactttggaggccagaaagcagtgggctgatatatattctgagtgttcaagaaaaaaaaaactaaggactctatatctagcaaaactgtccttcaaaagtgagagagggctgggtgtggtggctcactcctgtaatcccagctgaggtcaggagttcangaccagcctggccaacatggtgaaaccccatctccactaaaaatacaaaaattagctgggtgtggtggtgcatgcctgtantcccagttactcnggaggctgaggcaggagaatcgcttagaacacgggaggtggaggttgcagtcagcagagatcgcaccactgcactccaacctgggcaacaagagtgaaactccatc

SEQ ID NO: 193777 - DNA, 319 bp, Homo sapiens
tttcaaccatggtatgtgtagcttcctatttccaaaagagaaacaatgctccagggctcatgatcactgacaataactctggataagcgatgctgtaatttttaatcgaggttctggaaaattaattgtgcctgttttgcagatgttggtaagattgttggcttaataatgaaatctaaaggagtccattatcaacaatggaattataatcatctactggtagatgcaatacattatctttttttttctagttaacaaagcatctaatattcctggaaaacttgaataactctgggactcaatatacatagttggattg

SEQ ID NO: 193778 - DNA, 341 bp, Homo sapiens
ctcttatttcaatgaattcagtttcaaaatatgtgaatatccaaggttccttagccactaagaaaagaagcaaatacagtttctgagtatgtggcaattagcagaacctctaaattattcaaaagtagtaatggggagggatgtttctataaaccaaaaaataaaaaatggtgactcatggaccaaatctggcttgccaatgtgctttgaaagctgagcatttaaaaatatattttgaaatcccttttgcaggacatgttctcctgatttctataatcctgatacttccagtcctcatgacttttaacctaatcactttacacaagtatttgagttgcctg

SEQ ID NO: 193779 - DNA, 375 bp, Homo sapiens
ttttgcctggcacattttaagggccacattgagggtcactattacctaattgctatcattatcactactactatcacaataactaaaggagaaagggaaataattttagtgttactgtttaatactcagaaggctctatgctcttagtgactgaggtcatttaccaagcaaggatataagctatcttcaatgaaataaaatcggtaaacagtaaaacagcatataaataaaaaataatgtaaataagagccataaggaaagcatcaactctgcctttttaactcatttaatttgtgcctgacagcagactcacattctcatacctgaaaattaatggaatcataaatcatagagtattcttttctgtgtatcttg

SEQ ID NO: 193780 - DNA, 395 bp, Homo sapiens
ggagggtggtattgttatttacattttatatggaaatacatttaattggcagggatgcttattttcaggggatcagtaggagagtcagaatcaggtcactgactttgttgtttacttcttagaggctactaaaagtatcaaataggtaccctatgttcacagattattaaaggtctgtaaattctattttctacccccttacaacaactatataaattatagaaatgtgtctctatctacagttatattaggcatcacagtcaacagatgcatgaaagaaatgccgtgttattgaagacctggaaactagcccagtattttaatattaaataaaaattcaacagagatggagaagacatgtgttatacaaggacgggtaggtatgatgaaggacg

SEQ ID NO: 193781 - DNA, 304 bp, Homo sapiens
aatgaaaggtataaagagtgcatgcaaaatgttaataaatcattaaaaggttaggaaagtttccagcaaggaagaggtctctgagccaaaaggttgaggataacaaggtacctcattcagccatattctgtcatcatctccacatatcattgttttgaaattttaatatggaaagcaggtcattcttttaaaaaactgaactgcatctaaaatcaattagatctcatgatctacatgttcacctcatcttagggcacagtatagtaaatgatcttaacttgtttaaaatattttttcttggctg

SEQ ID NO: 193782 - DNA, 267 bp, Homo sapiens
gaaaggggagaacaggaatgtcccaggagccaaggctcatctataagggacttccacatttaggatgtagaagaaggaagcagaagcagggaatgaccagaaatggccccagagatgagacgaaagttaggagagcggggagcaagcctttaggtttcacaagggaaggagggaaagtaggtgttaggtgctgccaagatcaaggaaaataagcagaagaccaggccatttcagttgcagtgagccaagatcacgccactgcactcc

SEQ ID NO: 193783 - DNA, 298 bp, Homo sapiens
aggcagcacttggacttcgggcctctattacacgcgtattacagccttaggagcacttgatctgtgtcacatgtggctgactccttaggggacagaagggtcaccgcagggcctgaggctgcctctggcatcgctcagctcagtgtcttccagggcagttcccaagttctgcaggccccaggtgcctggaacaaaaaccacacccccctttcatgacgggcacattccacagctgttggcggcaattctgattcacaatatttttatgacagggctttttcttccctacgttattttg

SEQ ID NO: 193784 - DNA, 308 bp, Homo sapiens
gcgcatgctaccgtcaggatgctcagctggtgggaggaagcagttgtgctgctgccttgacactgggaagggcgggactgccttcagtggcaggcagcctaggcctctccagtggcaaggcagcagcacaactgccttgtcactgggtgtactacttgcacctcagtcccagtggtgcttgtgcctcagtctcctgtgcagtagcccatgtttgctcatgtctaagccacataggcagctgccatgcttctcttgagcttcagccctggcactgttgggttccaggacagtacataatctgttgtaga

SEQ ID NO: 193785 - DNA, 441 bp, Homo sapiens
catgggaggcttcagggtagggagggactggaaggtttacagactaagtccttatcatgaggagaaaagagagatgccattctcccacctagaagtcaatgatcagattttaatggtatgccaaaggctgtgaatggtcataaaaaggggaggaaataggccgggcgcagtggctcacgcctgtaatcccagcactttgggaggccaaggcgggtggatcacgaggtcaagagattgagaccatcctggccaacatggtgaaaccccgtctctaccaaaaaataatgcaaaaattagctgggtgttgtggcccgtgcctgtagtcccagctactcgggaggctgaggcaggagaatctcttgaacctgggaggtggaggttgcagtgagccgagatcgcgccactgcactccagcctggcgacagagcgagactccatttc

SEQ ID NO: 193786 - DNA, 569 bp, Homo sapiens
tcacaggatccccaaagatcttggagcatcaccaacaatcacaatagatcatttagatcacctaggcaagcaatgcagtatggccagaggctgccatagcacatattaaaagtacacacacacacgacacacacacacatggtgcaaggaaggggagagagaaatgttactagaaataggaacagagatagctggaaatgagacaatgatgtagacaggaatggaattctaagtcaaaagggctgcttttaaggtgggcatgggaggcagggaaacctgagaacgaatcaagtctgagtagactcttaaatttttcttaacacgcaccaaattcctactgcagaagctgatatgagggctttttccttttctactgaacgttctaattctgctcccacaaacctggttccatttgcctaggaaacctgaaaccagtgtttttaaagtgcattatgtagaagagtaacttagggaccttgtaaatatgcagcttctgattctgtaagcaaagggtggcctgaagattctgcatttgtaactagctcccaggtgatgctcaaagatcttgg

SEQ ID NO: 193787 - DNA, 463 bp, Homo sapiens
gtaacctaaggcaaacttccccttcagccatttcaaataaaagggaagatgccaaagagtgcatggagagtcaaggctggagagcccattattatctcaggtaaaggaaagcagaggccatgagtgggcagagtggccacactgtacacagagagcacagcagacatggaaggagagggcatgggaactacagggggagacagaagcgggagagtgaccaactgactctagctatcccccgctgttaccattaacccagaaccaccctatggtttcagttccaaggaactgtctgggctgccattcaggtgcctaggttcgaacaagattctttttcttttctcttttcttttcccttggcatgtgaagtgagaaggattttttttggtttttgttttgtgaggcagggtcttgcaatgttgcccaggctggagtgcagtggtgcaattgcagcccactgcag

SEQ ID NO: 193788 - DNA, 311 bp, Homo sapiens
ccctcttgcatgttacataatgacttcattgttgacacttctggtttggcacaggcaagtgatatagctatttattttttaaaaacagatttttaagggctgggtgccgtggctcacacctgtaatcccagccgtgagaaatattttaggctcaaaaatatataactagtgacagttttaattttcttcaaatgggcttgcaaaataattatactgatgtaggttttgtctaaatatagcatagtcatttcaagataggagcaatgggtgcttcacctatctaccaatacaatcttaagttcacatctcca

SEQ ID NO: 193789 - DNA, 636 bp, Homo sapiens
gttgcaacagcacccaggctcagccacagctttgctctgcctgtgagcagggagaggccaggcagcaggagcatgcacttccaagcctgcagggcagggggcttcctgggcccccaagagtgcagggatgcccaggtctgcagctgcagttaggtggctgcaactgtgactgggagggtagggcttccacctggtcagcttggaagtgggtggggctcctgcctgttcctggctcctgctggctccttagagcctgcagccttctgccatgcctcccctgctgcttctggcatctttgcagcagctgcttcagacaggccgctgctgccatcagtagggcctttattgtattgagctatgttccttctatacctaatttgatgagaatttttattatgaaagggtgttgaatattgtcaaatgctttttctgcatctgatgatcatatttttattcttcattctgttaatgtagtatgtcacatttattgatctatgtatgttaaattattcttacatctcaaagataaatctcactccatcatggtggatgatcctattaaggcattgtttaattgagtttgctagtattttgctgaggaagtttgcatgtatgtttatcaaggatagtggcctg

SEQ ID NO: 193790 - DNA, 401 bp, Homo sapiens
tgtctgggttatgggggtggatctctcatgaatggtttggtgctgctttcttaggagtgagttctctctctggagagaatgtgatgcacctacaagcttatattaagtgcccctttacaactgaggaattggaggttcagggaaattaaccttattgaacaaagactgagtactcagtacacacaattccctagggtatagtaaagtagagacaaagcttggaagtttgtaatacagtaaacagaaggagaactgcaacttgcaactcggggaaagtgggcaaggtagaaaccagaaagaactatggggtctgggaatacagagaggcctctttcttattggaggaaattagagaagcctcttgtggaaggtggaatggcagaacctgctcattgtcctcc

SEQ ID NO: 193791 - DNA, 302 bp, Homo sapiens
gaactgccccccagacacagtagtcttaacacatttggagagaaatacaaaggcaaaactcctaggccgaggccagctatactccggctacaccaccctccctgccatcagtggtctgccaaggaaatgagtagtggtacagagaatgtgcagcatgatcaacatccagcattctgtctcaagtgcttatggagttaactgggaggtgcccaggtcaatatagaggaagtcaaggagaatctacatagccatattatttttgagcagttagaagtccccgataaaattgcctgagtgagcca

SEQ ID NO: 193792 - DNA, 221 bp, Homo sapiens
tccactccatattcaatgcgtctagtcaaggtccgtgtgtgtagtttaatctcccagtgtctttctgcagattcttccagaactgcttgatgggggagagggaagatcatgcctggcaaaaagtgatttacactaacatatacacaaagaagataatcatcttgttttatgtgccggttgcagtggctcacacttgtaatcctagcactttaggaggctga

SEQ ID NO: 193793 - DNA, 475 bp, Homo sapiens
atagcacccaaatcctaaatttctaaatagcattccccactaagagatcaagacttcttagacaaagagctgaggcaatgaaattacaaaaccaacaaacgaaaaccaaaactaggaacattatgttatgccagaaaataaggaacttttagtaaaaaaaagtgatacattcagatctaatttaatgattttaactgctacataaaattatattgcagagtaaatctcaatttattttccattctgctactgaaaagcatttgaatttcttttaataatgacacaattaacatccatacacctgtttccttttgtacatttgtgagaatttacccggggcataaaagggcttttttttcttccccagtttatcttatattttatgaccgatgtttttaaactcattcattctgctgagtgaactaaaaagggtcatagtttgagtcctttcttgttttactattccatttctacc

SEQ ID NO: 193794 - DNA, 464 bp, Homo sapiens
ggtgaacagtggtgttttcaaacagtttcacttgtacacagttaaatgaataaatgaataaaggcaagtgtctatttttcgtggcaatatgtcttctcttctgaggtgctcaattcatttttattctgtatggaccacactcaggctccaagggaatgcatcaaacatgtctcagacaaagcaattaagcaagtatttgctgggcaactactatatgctctgcatcatgccgggtgctataggtatataacaaaagtaatgcctttcgccatcggatgacccttgcccacaagccgttatcgtgctcttgggcatcccggcctgcagagtcatgagccaatacccagtctgtggtattctgttatagcagcagaaaatggactatgacaaaggggtaaggcctctgagaaagcatcatttctacctattagatctgggtagaaagtgccactgtgggctcaagt

SEQ ID NO: 193795 - DNA, 527 bp, Homo sapiens
ctaccgtccacccattcattcattcattcattcatccatctatcatttaactgttatttactgagcatctgctacgtacctggcaggcaccattctaggcactaggtgttgaattaaacagtctctgctctcaaggatcctatattctcgttggaggagccaggccataaactagtatgtaacacagtttcaggaaatgacaagtattataaagaaaataaagcttagtgaggggatggagagtgatgggaaggcaggctactttagcagggtggcatgaaatgcttctcagatgaggtgacatttcagcagaggtctgcaaaagctgaaggcattcatagaatttgtgaaagctgacgtagaatggggcttccaggtgcttctgcagaggccagcacctctgctccctgctttcttctctcctgcacggagtcatccattcaataagtcatgtggggcccctgctcagggctaggccctgttagaggcaggggtgtggagggaagagagctttgttctgaggggca

SEQ ID NO: 193796 - DNA, 306 bp, Homo sapiens
ctttcacttagcataatgcttacggggttcatccatgttatagatgcgttgccagacaacatactgttgtgtggatataccatgttgtatttacctctttactagttggtagataattgggttgtttccacttattggctattgtgaatcatgccactatctgcatattagttaagaacatcggaaagtccaggttctctcattgaccatgagcagaaatccagctagtcttttgacttgtctaagccaccgcgcccagcctggatgttttatatcactggaatcatacagtatttgttcttttgt

SEQ ID NO: 193797 - DNA, 363 bp, Homo sapiens
cagggaagagggctgcagggaagagggaggagaggtccaaaatatcccgtgggccaggccatgcagagcctggtcagaatgaggcttggattcttttctgcatgcacagggaaacattagaagttcaggcaggcaagtggtagggtctggtttttatatggctgccataggaaaatccaggcaagagtggaggcagggatacctactaggtggctgttgaaaaagttggtcacatgcagtggctcatgcctctaatcccagcacgttgggaagctgagatgggtagaattgcttgaacccaggagttcgagaccagctaggcaacatagtgagacctcatctctagtaaattaaaaaaaaaaa

SEQ ID NO: 193798 - DNA, 356 bp, Homo sapiens
caactatgcctcgtcttgaacagaatagacaccttctgttctttcagtcaggccatatgcacctttcatatgtctagtcattcttctctggcagtgcttcagtttgtccacatctccctgaagcaaataacatgttgcctgtgaggtctgaccagcccagagtacagtaggactaccactaccttccgtgttctggctctctttcttatcacatctgaaagctgatttttaaatcaatttcatactccactgacttgtactgaataatattttactaggtcaccataggccttgaactccaaataaaaaggtagatatcagaagagggaagtagaaaaaagttaagagctacttga

SEQ ID NO: 193799 - DNA, 649 bp, Homo sapiens
acacatgactgaaagcattataaaacataccttgtcaaatacattagattcattataggtcaagggaattttgaaaagtaggctagattgctgcctaagaatcccactctaaagtactgctttgtttaatcattctagataatggaagcttgtaagcctccagaaagttaaaacaaaaaacttctttctgattaagagcctcttaactctatccttatcctctgctatctcaatgtagctattaattgttccctctttgtttctagactccaattttcatttctcaaattttggttctcagtgctgttagtattagtagccttttgtttcttcagaatgtatgtatttttcctcttaaatgtttcctttcccttttaaggttagtcctggaatacatgtttttcttggtcttgtagacttcatctcttctgatttccataataatttgcaccttgatgaatccagaattctcccactgtcttcaaagaatcttgaatagaataatctgctttttgaactctgctatctagtaatctctttagatatctataccacaagtttgaaacatcaaggtcaattttgataatttcctgtcttatgtcttaatacccattcagagttgactgccaactaacaagctcagccttta

SEQ ID NO: 193800 - DNA, 221 bp, Homo sapiens
gcaattaacaaaacaactttgactaaatatagttagcactaaatatagttggttaattggtatttaatatgcttattaaatgtcaattaagtatctttagcaatgaattggtacctaattaacttactatagctatcctgttacttgacatttgaacagctaaatattctttacaagtttaatgttttaataagaaacaaattatctatgtattgctcatg

SEQ ID NO: 193801 - DNA, 579 bp, Homo sapiens
gattttccaaataaggaagtgaacaaccaaatctgagtgacttgattcctaggacgaatctactcctccttaaagacagaggctctgggaagactcttttagtaagccctccagatgtgagcttctgtgacagccaacgcactcattgtatggtgaacataattatccctcatgagtaatccgctaagcctttctgttgagcctctggagaggaagaaatttgcttcattcactttaaaaaaatattttaaaaactgacataattcatataatataaaattcaccatttcaaagtgtattgctcactggattttagtgtattcactatgttgtgcaaccatcgctattatcgaaatcaagaaaagctccatcacctcaaaaagaaactctgttactattagcagttaatcacaattcttccctcttcccagcccttggctaccactgatctaccttctgtctctatggatttgctaattctggagatttcatagaaatgaaatcactcaaaatgtggcctttgtgtctggcttctttgactcatgagaatattttcaaagttcatccaggttgaagcat

SEQ ID NO: 193802 - DNA, 292 bp, Homo sapiens
ctttggaggcacatcctcccttgcagttacgtgtcatgtgacagagtactcattggtggaatttctgaggtctagacacttctaggtctaactcataaaagcctcccgcaagtgattctccattctctgccacttttgttggctggctgttgatgcgcagcgtaacttgaagtcatgtgttgaagatggaagcgtttttgtcggacatgtcactgaacagttgcatggagcaaaggcctactccctccccacagaaacgtttgtattggactaatgtatgggtagtcacaga

SEQ ID NO: 193803 - DNA, 173 bp, Homo sapiens
ggcctctagacacccactcgacagtggcatagatgctagatgcccactcgccagtggtgtagctttggggccttgagggctctcttttcatctgtgccatacacgatgtgtagatatcatcacagggtgcgcctcagctgcagcaggtttggctcaaggatgctggcggtcgg

SEQ ID NO: 193804 - DNA, 538 bp, Homo sapiens
ccctggtgtgactgaggaggtggcaaatgtggctggactgaactagtgggaaaaggagatgaggtctgaaagctaaccggggctactggaaggttttcagcagataaggcataaaatttaacaagtttataggatcattctggctgctattttaagaacagactgaatgaaggtggagagggaaaagggaaagtaaggaaatcatttgggaagcgactgcaacaaaacagctggaagaattagatcagaatagcagtagtagagatggtgagaagtggtcagattcttaatatattttgaaggtaaagctagtttctaagttcaaaataactggaaaaaacatcaggactagaatctataaactgtggcctgcatatactttaactgtagtcttgtaatcagtttagtaaaaaagggtgacttgtactaacaatatactatttgcaaattttttgaagctaaatatagcggggttttttggccacaaaagaaataatccaggctccatctaatgcaaatgcctagagagtttatattt

SEQ ID NO: 193805 - DNA, 396 bp, Homo sapiens
tatttattgacaaggatgcaagtcacagaacaactacagtttcatcttgttagtacaacaaacaggacaataacatagatttaaattcaaatgtaaatatatgtgggtacgcacacaaaaaatctaaaaggaaacatggagcaaaaagcctggaattttcaggttttactttaaaatttctctaatgacaaaaatctttaaaacaagcacgaataacttttttgacttttagaaaccatttttaaaaattaaatactgggaggtcaaaaaggaaaaaaaaatcagtcacgtaacaaacgtaacttcaaccacgcttaacaatgtaatggaactaatttttaaagcaaatgtggcaaatggctaaaaaaatactgaccagttcttaacagtttttaa

SEQ ID NO: 193806 - DNA, 443 bp, Homo sapiens
tatctgggattacattacaggcatgtgccaccacgcccagctaatttttttctatttttagtagagacagggttccaccgtgttggccaggctggtctcaaactcctgacctcaggtgatccaccggcctcggcctcccagagtgctgcaatgacaggcgtgagccactgtgcccggcccctggtttatttcttaattccacaacttgtgctgtgtggaaactattttctaatgttttccactgacacttactatgactaatggtgtctacttacctggggaagaaaatggcaacacataaaaatttcactcagtgacgctgcccttctaaaagacacaaacaggcacagaatatctgcctggtcgataaggtatgctcagcatcattactcatcagggaaatgcaaatgaaaatcacaataagataactactacatgcctgt

SEQ ID NO: 193807 - DNA, 376 bp, Homo sapiens
ttgttagaagataagctaagtggacgtgattgtacgatacttgaataaactaagttacacagaaaacatttctattgtgtttctatctacagtatttagcacagtgcctctaacattatagatactctctaaataggtgttgatcaaatagatgtgttttacttatgaaatttgataaagatagcctgaaagtgtaggaatgttcttctcagttatagtttaagtagtcaggataacagccatttaggtaccagccatttaggtaccagccatttaggtaacagccatttaggtaacagccatttaggtaacagccatttaggtaacagccatttaagtaacagccgtttaggtaacagccatataggtaacagcc

SEQ ID NO: 193808 - DNA, 708 bp, Homo sapiens
  misc_feature (459)..(459): n is a, c, g, or t
tgtggtaccatcgttagtcatcatgtgatcgttccatgtagatcctgtcgtctttcctgcaacgtcggacacttctggatgtttcacagccaggcagtttatgatattaacagactagactccacagacttctgcaagatgccaagaggggaacttgggctttttcttttttccaattgccttttacagagtgatggaaagttaactacgaactcctgcggggaaaagaagagacgatctaggcctaaaaatcgtgtctactctccaagagagcgtcgccctgctttccagtgttatttcatctgtttttataattggatgtgaaacttcttgagaaagggtcctatgactctttaaccaattattgttcaaaggagtccccaaagtgttaagcagtttcaaggacagacatccctcctaccaacgcagtggacttcactggaagatgctatttcaccnaaatctgcaaatgtaaactgaagggcatcggttgtgtatccatgtgagacgatcgtagggtatcatgtgatggtaccatgtggtgcctgtcttctttcctgctaggaacggaccttcctggatgtctcacagccaggcagtttatgatattaacagactagactccacagacttctgcaagatgccaagaggggaacttgggcctattcttttttccaattgccctttacagagtgatggaaagtaact

SEQ ID NO: 193809 - DNA, 393 bp, Homo sapiens
aatgaggaagataaataaaccagagagaacaattactcttcaatatcaaagctagtatttttagcatcactattctttggatcagacaatattttctacaagctttcatcgtaagttaatcatctgaattaacactgcattaggaaactttttaactctcccacctgtgtgctttaccctataaaatgaaccaaccacacttctgtttcctcctacacctaatggagaacatagcaggctcagtaaatcttagacaattttctttgacactcaagaacttttgcattaacatattttaaaagtcaagactggatccaaagtaaaatcaaacttgctgcttagccaaataggctttttcctgatataagctaacagtgaatggctttattccta

SEQ ID NO: 193810 - DNA, 190 bp, Homo sapiens
gaaaccatgaaggcaataaggaatgagacaaactgagtgccaatgtgactcccaggtttgactactgagtctggcaatgactcgtctggatccccatagagcttttgttccctcaactgtagaatgggtataacaagaaaaaccatatagagcatggtaacgaaacattaccaagagctttacttacatg

SEQ ID NO: 193811 - DNA, 332 bp, Homo sapiens
ttcaccatgttggccaggctgatcttgaactcttgacctcaagtgatccgcccacttcagcctcccaaaggggtgggattacaggtgtgagaataaatatgtcattgcttcactgaaagcaaaacaatttccattgttagccacagaattatcagaattgtcgtttcagagcaactgtgcatggaaccaggaaagtaaatgattctttagggttttaatgaaaagggttctgcttggggtgagtagagtaacatgtttgcccacatgaaggcatgaagttggctgctgcttaaagactgttgcatggccttaacttgaccagccactgtctt

SEQ ID NO: 193812 - DNA, 369 bp, Homo sapiens
  misc_feature (34)..(34): n is a, c, g, or t
  misc_feature (37)..(37): n is a, c, g, or t
tatgcttgtggtcgtctctacacggatccccacnacngtcgcatattttttaaatgaaggttggccaattaatattgcccaatgagacatgtgagccttacggtttggctgcttgtcaacccaacacaattatttcctgatctttagccaacacggcatgtctcttcatcagtaagtgaataagcagaatggacctgtgtgtgtgtgcacatgcccacgcttgtgtacgtagcatgtgtgcagcataggtgtaaagcctgcaggcacaccttgcattcttgactaaaattccttctccctcataagaagagagattacatgattgtcttagtcattttcttttcgtgaaatatatgcgatggatagagt

SEQ ID NO: 193813 - DNA, 712 bp, Homo sapiens
agaggcaagaagcagacaagaatcatgtacagcaaaagaaggggttgttcccgagtatagtgtgcactgggggctgaggtgggaggagagagtgtgggccagaaccagcttgggaggggcactgtttgccctacctggtcggagggaccataccctttggtctctggggcaccaccaaaggtttgtaaggatggaggtgatgtctcctggttggcatctttggctctctctctgcagcaggatggaggagggcaggataaggaccctgggaggagcaaagcaccccactgggggtgtcctattggagcctcctgggagagccaggagaggtgtgggcagcctcaactctgtggcagtggggcctaagggtcaggggatgatccatgagtggtcagcaaaaagagagagacagagagagaggtggggggactacctgtagagcagttaacatgcatcagcaccacaagcaggaggaccgctgggcagagaaacatgtatgcacattcatgcacgtgtacatgtgaataactcctctcacacatgctggaggaaaccctcgctgtcatccacactcccaggaatggccacattagacatcttccccctagttcctgagaagcaaacccgggagagcccagccctcagccttgctgcatgcgtgagcatggagttttgcactctggccagttttgcctctagttctttgtttctg

SEQ ID NO: 193814 - DNA, 413 bp, Homo sapiens
ctaggagtcccatttctgcaaaagaaacttttatcagagacttatagcttgaaagaaatataaaatgactaaagctcctcagaagctgtatgaggtcaacagttggaatcctcactgtagggcggcctgaactgtttagggtagtattactttgaacaggggtaaggctttcacacatggagaagttgattcactggaggccatctgttagtgggagatgatgaatactgctggctatgtcagttattaaaattagggcagcattcctagctttttgtgtcctaagttatattaaatggatgacttaaaaaaactgctttgagaaatggcagatttgacactacttagactttaagcaaagttccctcttcccattttacacttcctttactgataatgtttaaactgagctg

SEQ ID NO: 193815 - DNA, 447 bp, Homo sapiens
gctctagagtatctccctcctaccccacggggaaatgtaaacatgataactcatatgaaaagtactaatgttaagaactgttcagcatatttctccctaaaattgaacttgtctaatacattgtgatggtcattttagggacagtgaagatttaagagagagcctttggcctcaagtactttatagaattataaggaaggttagaacagtactgtaaaaactagacaatgaaaactgctttatatgctggtttttttttttttcttaaaagttctatccatggggatgcaaagaagagaagggttaattccaataaagaaagtctggaagagtttaaaggagccatttgcccaagatgttgaaagatgagcaagaatttgttggctggtagagatggagtgagagaaagggaattctcagtgtatggctagagcgtggggatctgtg

SEQ ID NO: 193816 - DNA, 522 bp, Homo sapiens
ttgacttgcaagttaggcataagttagagattatacatttgccatgttcagtattttaaagaaatttgcaagtttagattctaccttgcattagtttagtattttttagaaaatacttgctatttacttaagccaaatatttgcttctgatttgtttcttgatttagcaaattagttgtggtttgttctggatttgggtttgtctttggattctattttaaatccctgagtcttatcgttaagttgaaaatagttgtatttaagtgtattatatcatagacacggatcccaaactgctttaacagctatattaaatgatatgaaatggtaatgaaaacttgatttaacaccaaattataataatatcttacacatctgttgacctgttgctttcttctggggatataaaaataacacttatggaaggagaaatatggatatagtagttttgtctctagaaatgcagaggtgcctgaaagtgagaggctgagagagggagagagaaatgaatgagactgaatt

SEQ ID NO: 193817 - DNA, 634 bp, Homo sapiens
gaaagaaagaggaagaaaaattagttgatggttaactaattcttccttaggctattcattttccatcattattacaccctgaggaggctttaactaaatttcctgatacattagatgatcaatatcagtattataagattgatttctataaggggctgggcgtgatgattcatgcctataatcccagcactttgggaggcgagggtgggcagatcacctgaggtcaggagttcgagaccagcctggccaacatggctaaaccctgtctctactgtagtcccagctacttgggaggctgaggcaggaaaatcgcttgaacctgggaggtggaggttgcagtgagctgagatcatgagactacactccggccagggcagctgagcgagactctgtctcaaaacaaaacaaaaaaagatttatttacataaggtaaatgaatcttagcaacagtgtcacttgttatgccatagtgtgttatgtcacaacgtgatgctgttttattacagaacaaatcagtaagaattgcagaggaatttgctatgccgcctcagcagaattgacccttacctggatgctggatattatcatggataggtatagttacagtgggcccttactcagttatttctgagtt

SEQ ID NO: 193818 - DNA, 429 bp, Homo sapiens
ctcctcataacctgcaactgtttgttggtgaattttgtcttccttgctaaattcaaggatcatttgttcaacagccttctaaccaccataatgctgaatacacagaaggtacacatttcttattctaagcctcaatattttcaattcttacatcaatacgaggcccgagtttttaaaaataactcttccaaatgattgtttctcatgcattgggaggcaaagatgttagaatttttttagagaaaatgccagtgtaaataaactgtgtaaaaatatttcacacaagcctatcaatattacataaatgcatgctcctgagcacaattgcctagtctaataataacgtttcctcctacttagcaagatgtaaaggtaacagccatataggatgggagaaaagctatctagctatgtgaatgaagcatctct

SEQ ID NO: 193819 - DNA, 494 bp, Homo sapiens
gactatggctaatattaattgcattagtccatccttgtgtagtgttgctataaagaaatacctgaggctgggtggtttataaagaaaagatgtttattttggcttatagttctgtaggctgtacaggaaacatagtgccagcatctgtttctgccgaggtcctcagcaagcttacagtcatggccgaaggaaaaggggtagccaatgtaccacatagtgagagtaggagcaggaggtggggtgggagggaggtgccgcactattttgaggaaccagatctcacatgaattcagagtgagaacttactcattaccacagggacaccatgccatctatgagcagtgacctaaacacctcccactaggccccacctccaacattgacgatcacatttcatattgggataaaatttatgggggacaagtttccaaaccatataattaatgtattgtatacttaaacattgctgaaagtaaattttaaatgttctcatc

SEQ ID NO: 193820 - DNA, 416 bp, Homo sapiens
actgtacctggcccatcttaggtttaacttttaagtttgtatttctctgagcttatataccaagtgtcggtggagagtgttgacctggaagtcctgtgattggcaggggacaaccaacttagcattacaaactgattgtggaccaatctgagagtggctaattgatgtgcaagcaattcaaagttgattgcacatgtatatgtctatgtttcagatatatatatatgtgtgtgtgtgtgtgtgtgtatatatggaatattgataatgtttgtgaaggagtcgaatattctgaaggaaagtttttttatagaattaaattttgatgctgccactgtaaaatttctatgttacccactgattgctgtcattttccagatgacttttacttttaacagatgtttatctgattactcttg

SEQ ID NO: 193821 - DNA, 438 bp, Homo sapiens
atcacatcgatgtaccatacaaagctgagtaaacaaataaccccaaaggtcttcaaataataattgtgaggtcccaattggggttcccttcttggttgtcaaaatagaaggggaaaactcagaagagccaaacccccaagaaccttcttgagatgacagctgacatatttaggtttattcctggcatcagtgaaattctaatagcttaatcttctacagtacttgtgggaactgtgaattctatgatatgcttaactgccttaggaaagacttgcttgatgttttttctaaggcctttgtttttcttaagagctagaagcctgaccatgaaaagttaagcctttttctcttccctacctattgttattacattttatgaatcttcagcaactgaagatttttatccagtgaataatttgagggtgaaaatggtgagtt

SEQ ID NO: 193822 - DNA, 228 bp, Homo sapiens
tcctcatccagttttaccaggtattaacatcttacctcccccactgcatcattctctttatatttgtatacaattcctgtttgccaagccacccaaaaattgtgtgcagacgccatgacacttcatccctaaatattccttcatggtctgtcaagaacgaggctattgtcttaatatccagaacaccattgtcaccccttaaaagaactcaacatgaagttcaacata

SEQ ID NO: 193823 - DNA, 589 bp, Homo sapiens
agcctgctttacccacagtcttccccatcccagcttcaggcaacctcattttcgtagtagccactctgggagccacgcaagtgcttttcccatgggggaagcacgatatgatgaacacttcaggagaaatactcgacatgggaaatgcaatatgcctgggcttgtggaggaaagtagcagtatagaaagaaaatctctacaacagtagagaggccaaaaaataagctatttttacaacagcagggaggggataggggacaggataaaaaccatctagaatatgacatgtacaaactcaaaacaatcgcgaggtcagaaaatggacaactttagaaagaatcccatctttctcgatagggctacaggctggacgatggaacaatgaatcaataggaacaagagaaggcataggtgggggggctccaaataattattctgaacctgctgcatctatgaccttgaggggtcctttggacacactccaaagaaatgctaagcaggtggctggacagttctatgtgggaaaaccaacacagagctggtagttagaagcacaggagggtgacatcagataggtacagagtcgtga

SEQ ID NO: 193824 - DNA, 841 bp, Homo sapiens
ggagaaaaggaggtgcccctagatcccaagtcccctggggccgcagcaaagggaggaggaccttgcatcactccagggtgccacgtggacgaacagaggtaacattgggagtgtggctggcagtgttggacattcagaacatgtctgcccaaaacaaacatggccttcgcttctcccagctcccagaaacaaagtaaacagaaggatcacgtctggacaccagggaccagcccctgttacatccctgtcccccccaggccagagcctgaccactccgtgtcacctgcctctactcctgtagtgactgtcaactttttggatttcagaaagccaaaccagcaagggaagccttttcccggggggtagaggtgtctctcctacacacacccctaccccagggtctgagatgacatcccaaatcaaacccggtattctgcagagatacacaaaggttcaaactacagacagccttgtatcagctgtaaaggggggccagattttgctgcaaaagaaaaaacccagtatcccctcgctcagcccactgtgtcaccaagagggagggtgggcggctggccaaagagggctccattttatagtccaggaaggggtggcctgggccccacagctggtggggcagtggcactggatctgaagcaaagctgggcactggaggctgtgccttgggccggtgtgctggcagcgcctgctggaggagccaaggggcactgattcaacactgactgtatttccggaaccagagttagtattgggggtatggtggcgttgtggttacaatctttcaaaagtcctcatctttcagagatttggactgaaagttcta

SEQ ID NO: 193825 - DNA, 135 bp, Homo sapiens
tagtgaactcatagtaacggtttgtgagaacaatacatagattttcatttctatgtagatgagttggtatgagaatatatggaatgtttttagggtctgtttgaatctttgatttgtagactattaaatatacca

SEQ ID NO: 193826 - DNA, 713 bp, Homo sapiens
agcaggtgcaaaccttgattgtccccgacaaactgggatggatacttagcctaaattcataaccaacttctgctgaaggcctgtggtgctaggccatgtgctttatatgcattattttataattctcacaacagagcctcatgagaatgttaacttttatagaggaaaccaaaaacccaaagaggttaagtataatttgtcctcagttaaatagctttaagtggtggagccctcattttatcccaggcctgtctgacgttatacttctgggtttgattgctgtctaattagataggaaatgcaatgaaaatgaaaggttgtagtaaaaagtctgtaggttatgttgcatcagaaacttttgttaatacttaaaggttatccagcaatccccccttttcgtctgttacgttcctgtttcagctattatgcatgtttacacatatttattgttctatttcacaggccctgtaattggatgggctcattgatagatgttaaatggatagctccttgtatatcatttgataaacttaatttaaaatcagaaatgattttaagaaatagcttaataattaaatgatctggaaatactaggctggttggatatctttgaggttagtgaacatgtagtgagccttaatatagtagtaggtcaaatgaggcatctgcatttatggaattatattatatgtacattaatttttccatggcca

SEQ ID NO: 193827 - DNA, 475 bp, Homo sapiens
ctttgtaaagtatgttgaaagaagggacctctatataagtttttaataagttaatagtatcatacctgtaatcccagcactttggaaggctgaggcaggaggattgcttgaggccaggagatcaaaagaccagcctgggtgacatagtgagatccccatctctacaaaaaaaaattgtttaattacctgggcatggtggtgtgcacctgtaagtcccagctacttgggaggccaaggcaggaggattgcttgaggccaggagatcaagaccagcctgagcaacatagtgagaccctgtctctacaaaaaatttaaaaattagctgggtatggtggcttatgcttgtaattccagctacttgggaggctgtgacaggaggatctcaggaatttgaggcagcagtgagctatgattgttgcacaggctggagtgcagtagcacagagtaagaccctgtctctaaatacataaataaa

SEQ ID NO: 193828 - DNA, 130 bp, Homo sapiens
acaggcaatgggaatgagatctacattagtgacatcagttgtacactattcagtagaaaaaggatatcagaaaacagcaatgcagctggtataatgacttaggattaatttgtttgttccttgcaagata

SEQ ID NO: 193829 - DNA, 651 bp, Homo sapiens
ctaaattcgacggcttctccagggcaggtaatgtccccttccaggcctcagcattgtcatctataaaatgaaggggttagactggatcagtgtttatcaagcctgtggtcttcatattaggaccactctgggattacaggcatgagccactgtgcccggccaggaaactttttaacagactcccaggtggtctgcacaatcattaactggacaagccttcttagagcctgggaggccctagaagaagcaaccctcaagtaggttaggtcacaaaggacgagtggtcccagagtttgtgtagattgctgagacgggacaccagaagaggccctgacctctcttggaaggtagcatgcttctgcttccagaaaccctggaaaataaaaggccgtgtttatgcagctgtggagtactagtctgtggcagggagctggagtcccaaggtgggccagatggatgtgcagcctctcggtctctctggatgcagtaaatactcataatttcatatgactcaacccagggagaagagaaatgtggcattgaacgggtgcctttagaaacagaggtcaccgcagtacctgtaaaaggagaacctgtccagcctgggtggtgtccctggagtgaaggggatttgtggggctagaggatagg

SEQ ID NO: 193830 - DNA, 633 bp, Homo sapiens
ctgtgaagtgcatgaaataagttgtccagatgaggaaatagctcagcgaggttgtatagcctgcctggagtcacacagccagtttaacacaaggccaaacttgaagtaggctcacattcccaaccttgtccattactgcagaggtaccccatatattcacaagcctgtccaaatctgaggcatttcattacttaggtccatttagtagcagtaataaggcatatacacaaagcacaaaagtctgctgcttaacagaataagcattcactcagcccccttctgcaaacctatagaaggactaaatgcaagaaacacatgctcagccctaatcccttctcatttcctcctggcacctgtttctgcccccacaggcaccaaacactctaacagctggctgaaaccgagagagaaccaacagataatacactaccacttcagaccaagctctcaccaaaatggtggctgggaaataatggagacagaaccaccaagattttaagagatcaataaactgggtgtcagaagatctcccacattctcctgtcccagtaaaccaggtctccaggtagacaagagtcacacaacctatccttttcactcctcctcctcacctcccccgactaatgtgctgaa

SEQ ID NO: 193831 - DNA, 328 bp, Homo sapiens
tggccggcccggcttctggacttctggtcctcaatatccaattcaggagcatcagtgtccccacaggcaccaaacactctaacagctggctgaaaccgagagagaaccaacagataatacactaccacttcagaccaagctctcaccaaaatggtggctgggaaataatggagacagaaccaccaagattttaagagatcaataaactgggtgtcagaagatctcccacattctcctgtcccagtaaaccaggtctccaggtagacaagagtcacacaacctatccttttcactcctcctcctcacctcccccgactaatgtgctgaa

SEQ ID NO: 193832 - DNA, 947 bp, Homo sapiens
atttcagttgcttcatccttacacgttatgttgaatctctgagaggttttttctggacctaatgttctttaaccctatgattgcatatatatttaaaaaattaagtgtgttcacccaaattacaggcagtgtgtacaatactgatctctgcctgcactggtttttcttaaaacatttgcgttttccaggcacgttctcaattttgaatacattagtctcaaaatattttttagatatctgaagaggaaacttctattttattcattaaacttgtgagttcaggtgcatttgttacattctgtttcatggaagagagaattaaaataatatcaccaaacacatttttgagaatgattttttttcctttaatatctttattttcatggtatgattcctgaatgtcaaagccaattcttcagcagctaagcttttattttgctttgtcttggaaattgtgtactaaaactgtgtttgttaagtagtacaatacaatgttattcacatttataatcttctaaatactaaaataagtttcaggagctgcttatattaagtgctaattgagaaccagtgtacattaaaataatttaccataaaaaataagacatgagaagaaggcaggtgtcagggaataaagatgccaaacagtttggtcttttctggcaaacagttttatttatgtctagcgtacagtttttaagtgggtaagtgatgagaaggagctggaaataggtaagcagggctcatatcataaagtgacttctttgctgtgcctaaggacattcttctgaccgtaataggaactagtgaaggattttaaacggaacggcaggattatgtttcaaccttggatgtgtagtgtgtaggggataaatcagtgatgttatcgcccaacacttaattcgttctggattccacactcatagggtcctacatcattcctggtg

SEQ ID NO: 193833 - DNA, 381 bp, Homo sapiens
aggagctggaaataggtaagcagggctcatatcataaagtgacttctttgctgtgcctaaggacattcttctgaccgtaataggaactagtgaaggattttaaacggaacggcaggattatgtttcaaccttggatgtgtagtgtgtgaaggatgagatgaggatttgggagggaagggccttagctctggacaggggagaaagttgagctggtagtagtgtaataggtgtgaatgacaccagtaattcttggagtattgcaaactagttcatgtttctgaattctgcaaaaaatgcaattggagattcataagagagtggtattgaaaagagctaagcatccgggtctcctttctggcttgctactgctcctctttttct

SEQ ID NO: 193834 - DNA, 642 bp, Homo sapiens
  misc_feature (627)..(627): n is a, c, g, or t
tcggccatgtggaactggagtaaattaaacctattctctttagaaattacccagtctcaagtatgtctttattagcagcataagaacagactaatatgttgggcatatcttttccattagagttctgcccagaacaaagtacaaattgacatttataccaaccatgacagagatagtaacttcctcaggatttagttactagatgagctacatacccagagtaaagaaaaacaaaacaaaacacacacacacacacacacacacacacacgaaaaacaaagaaaaaaatgcttgagctttttctaacttccccttgcagtctgttgtgtgagcagcctgtttatttctctaatattatgtcagtttattctctttaatggactgtaaaaaaatgtaatcacaagagtgccaaatatcttgaaatgccaaaaggcattttagtttcttttctctgtgctctgagtccacgtacaggaatgcttggagtgtcttttctgttatttatagggattctcttaaggcacaccagctgcctgttttgcatggtatttgcaaaaatgcctcttgcgtgaggaaatcttttaccattttttgtttgcaactttggacctcaagaggtttcccttncctccacacgtcata

SEQ ID NO: 193835 - DNA, 1083 bp, Homo sapiens
ggagaaataattaactgaaaccccaatactttacatacctatggagagtttccaggggtttgtaggaaaagtgttacagtgatggtaataaaggattcttactgtactgtcgttctctttgtaagcagattaaactagcagacaaaatccactgtagttacccatggtacccattcctttactttcagtgaatgaaaggtcagaatgtattgtataagcaatcctcttctcttccaatctctgagagcttgggcagggagcttacccttcttgggtctgtttcctcatatgctgaatgaggctagtaatgttttaatcattgaagagtaggcatgccttctatgaagggcttactttccacaaaagtactgcgcaccccccgccgttataacagtgtggcacttgtattatattgcttcgtcagtgtttttgcctttgaggttgcaagagcaaatgcacctcctctggacacagccttctgcatggtaccattttgaaggagcaccacttgagttggatagggcagtactctgccatgcttctgccctgagcagagtcaccacctgtgtgtaacatatcttggatgatgccacagctagattagcatagaggggtttttcagctgggatctgaaagtgctttagggttatggttgactacagtcatttaaggaagtttagactgggattgtgtagttttgggatgatggagtaattgctgtattggggtaaaccagactaaaaagtcccccaataatttttcagataagacctctggagaaaaatgaagcatgacgagacagggactgctgaaggtggtggggtgggcagaggagctcaggaaagaccccaaaagcttttggggtctttgctctttccttcctttgttgaattcacctggcaaagccctagttaaatccaactccccacctgctggtaattctgcatgtccctagtacatttgtttttccattcccaagacaactatttcacatctttttctctttaaatcttcaacatgccgtgagggcccttatctgtttgcttttccaagacacactacaatagccgtaagactttatat

SEQ ID NO: 193836 - DNA, 249 bp, Homo sapiens
aaagtcctattacggtgtcctttttcggtctgcagtgccattttaaaatattttcctattctcttgaacataccaacaaaacttgtcatttatttaaataaagtaaatacagctgtttttttttgttgttgtttgagatggagtctcgctctgtcgcccaggctggactgcagtggcggatctcggctcactgcaagctctgcctcccgggttcatgccattctcctgggaggcagaggtggcagtgag

SEQ ID NO: 193837 - DNA, 1013 bp, Homo sapiens
cactcatgctagtcttggctctgcccatcagttcggatttctcgtgcgcgcgtgtcggtacacttctaagtgacaattgtatctgaataaaaaatatacaagatggttttacagcagaatgaataaagcagaagaaaagaacagtgaactggtatacaggttaaaaaaaaaattaaccaaatgaaagagtgagaaaaaccctgaaaaactgaaaaagactacagagaatgtcgatgatctatgggacaataccaagtcactaatatatgtgtacctggaatccaaaaaggagaagagagagagaatgaagtaaaaaaaaattaaaaaaatattgaccttaagagcctaggaagtaaaaaaaaaaaagaaaaagaaatgacaaagaaatattgacctcaagatttccaagtttgatgaaaatcctaaatccctgaaattaagaagctcaatgaattccaacaggataaatacaatgaaattcacacacagtcaaacaactaaaaatgaaagataaggagaaacatccaacaagtagtcaaaagaaaaacaataacatatacagtcatccttggtatcctcaggagaactggttccaggatgtggaacccatggatatggagggccggctgtactgagaaacaaaaagactgttgacttctctccagaaacaatgcaagctactagacaatagaagataatatctgaaatgctaaaaacaataaaacaaaaaactatcaacctagaatcctgggcctagaaaaaataatccatatgcatcaaagatgaaggtgaactaagatgagagaatttatttccagcagacctgcattactggaactgttaaagaaaattacttggcagaggagatcacaggaagactgtaaaagtgtgagtgatgaaaaacatttggataaattataatgctgtaacaaagccttgtcttaatttctttgaaagacttttgatttttttgaacagaaacaacattataaggtctaatgcatatagtagta

SEQ ID NO: 193838 - DNA, 956 bp, Homo sapiens
cactcatgctagtcttggctctgcccatcagttcggatttctcgtgcgcgcgtgtcggtacacttctaagtgacaattgtatctgaataaaaaatatacaagatggttttacagcagaatgaataaagcagaagaaaagaacagtgaactggtatacaggttaaaaaaaaaattaaccaaatgaaagagtgagaaaaaccctgaaaaactgaaaaagactacagagaatgtcgatgatctatgggacaataccaagtcactaatatatgtgtacctggaatccaaaaaggagaagagagagagaatgaagtaaaaaaaaattaaaaaaatattgaccttaagagcctaggaagtaaaagaaaatcctaaatccctgaaattaagaagctcaatgaattccaacaggataaatacaatgaaattcacacacagtcaaacaactaaaaatgaaagataaggagaaacatccaacaagtagtcaaaagaaaaacaataacatatacagtcatccttggtatcctcaggagaactggttccaggatgtggaacccatggatatggagggccggctgtactgagaaacaaaaagactgttgacttctctccagaaacaatgcaagctactagacaatagaagataatatctgaaatgctaaaaacaataaaacaaaaaactatcaacctagaatcctgggcctagaaaaaataatccatatgcatcaaagatgaaggtgaactaagatgagagaatttatttccagcagacctgcattactggaactgttaaagaaaattacttggcagaggagatcacaggaagactgtaaaagtgtgagtgatgaaaaacatttggataaattataatgctgtaacaaagccttgtcttaatttctttgaaagacttttgatttttttgaacagaaacaacattataaggtctaatgcatatagtagta

SEQ ID NO: 193839 - DNA, 193 bp, Homo sapiens
tcataggtcgcaggcactcagagtgggtgtcttgtgtcgcttctcgcccaacaacagcaaccctatcatcgtctcattggctgcccagaggtggagtttggactctgctccatgtcattgtcacagaagacccaggcagactgaacctccacctttgggaacttcgctggtccccatgaaacagaaaggagaa

SEQ ID NO: 193840 - DNA, 239 bp, Homo sapiens
ctgtggaaaatctaaaacatgcatgctcttctttttcctggagtgatgaattatttttaaaccttcatgaatagaaatattgctgtgatttaaactccaaattcttttggccacatagttttaacattttgtaggttctaaattggatgtttctcagcaaggtccattgattacctgcactcaaatcatttggattgcttgttaaaacgacaacccctccacctgcaggcaatctctct

SEQ ID NO: 193841 - DNA, 668 bp, Homo sapiens
agcagtgcattcacctggccgccgggctcacatgccttttgaggcagacctaggcctatccaagcaggactcccattccctggggtacgttttgatgtggaactgcagaaggccttgccagaggctgccacgggagacctcaggattcggggtacccaggagtagccagtgatgcctcaggggtaacagaagaacctggaaggctgtaggaaaaatagaagcctgtttcccctgcttcactgaggttgtaaggcaaccccgagaaggcagaaggggaccagcagggcagtgcacacccaggagacagctcttaccttgatgacggggctgaccagccggacactgccctgcttggaccttttttatgcccaccacagggcaaccactgcctccagcatcccccctggagaagctgctgcaaagccgtccccttctatgggagccacagcttgaagctaaaacaagagcccaaagcatcttcaggtgtaagaagaggtctctttctttcttgttctcggcagcccatccttccccagctccttctggacatgaggtttcttgttaccctcttcaagttcctttggctcgcagcattgcctctcctccagacaatatggcctggccagtgtgacctgctcctgtatgccctccagccctccccagccatg

SEQ ID NO: 193842 - DNA, 562 bp, Homo sapiens
tagctctcatccgtcatctcctctgctttccttgggtttgatttgtcattctctttcttacctcatgattattcattcttggccttccttgttttctaacatatacatataaggctataacttttcctcttaagactgctttaactgcagcccacaggtttggatattttgtatcttcattgttgccaatgaacttaatgctgagttggggttggcaagcttttggtgaggctcagacagcctctgcttcatccttaccccaaggttcttctttctctctctctctctctctctctctctttcctttctttctttcttttctttctttcatagttgaggtcttcctcttgttaaaggtgctctttggggccaggtgcggtagctcacatctgcaatcccagcactttgggaggctgaagcaggaagaatcgcttgaacccggcgggaggcagaggttgcattgagccgagatcatgcaatggcgacagagcaaaactccatctccaaaaaaaaaaaggtcaggtaatgattctgtatttgaagaaaaaaaccttttttggac

SEQ ID NO: 193843 - DNA, 340 bp, Homo sapiens
ttttcagctattttgaacaaaagcatcatggtaagaacagggagtttccttcctgtttctcttctcagggtttgtgtcagttataaggagtgataaagtgtcaacaacaacaaaaagacaccaatgcccccttctctacaagctttacactacagcatatgatgtcaccagttcacacagaaaattctgtaagaaattatttttgaaggcacagaacaaaaacaaccacctaaacaatatcaagacaaaacttccttctctacaagctttacactacagcatatgatgtcaccagttcacacagaaaattctgtaagaaattatttttgaaggcacagat

SEQ ID NO: 193844 - DNA, 469 bp, Homo sapiens
gtgggaagtagagtagatgaagaggcagcaaggggagaaactaatattaaccaagcatctgctatattaatatttattgaatacttactatgtgccaggcactgttgtaagcatttcacatgtaccaactcatttaattctctaaacagtcctatgagatatgtatcattatctcagttttatagatgaggaaattaatgcactgagaagttaagtaccttccctaagatggcacagtgtttgatagagctggaattcaaacctgggtttgggttcttaacattaagctctgtaccaagaacttttagactggttcctacagcagagacctcagtttaaaggcttaaaatttcagatccacccagcaaggcatatgttattcccttttacaaattaggaagttgagtttcagagaggttaggttatttgtcgtaggtcccataggtagtaagagagaaagccaggattt

SEQ ID NO: 193845 - DNA, 454 bp, Homo sapiens
tgtgccagtagaaatgccagctgcagccaaaggacaggctttccatccgagaaaagcactcacactcgcatttcttttctggttctgttcctcccctacataaccagaaaaagctcgttaacacatgatggcaaccaggctccaatatctgccagttcccctgtacagattcctctttagcattctctcggcttccctcctcaacaattaattcagatgagcagttgggagagtgcaggatccagttcaaaaggatctgtccccccgtgaaccccaggacagggtgagaggccacctgcacactttttttttgtcagctcacaccctgttggccctttgcaaatatttgtctttcctcatgcacgtggttattcccagaaagatccagtgaattgtctcctgaagataaaatacataaaagggcgtttcaaagtataaacagtgattttaatga

SEQ ID NO: 193846 - DNA, 555 bp, Homo sapiens
ctgaggcctgcgatagtggccctgagacttctgtcatagatttacaggggccacccttcttcctttgggggtggctgaactgctgggatgaaagcctagagctgccgggaccatcaggtcacaatgtgatggaggtggaggaggaggatgggccataaaccaagatagaaaaatacaaagcccagagctgaggaaatctcatacaggcatctccggctacccaaatctatttgatgtataaattgtgtatactgagctgtgatgatactcagatagctacaggcactacgttatctcatgttacttggttcctgagttttggatagcaagtggcaagagttcagaaagcaagggattcatctgaaaaattgatcccagttaattcagaccccaacggcagacagggaaaacttgggtggtttcagtagcaaaggatacctgcaattatcgatgatactgcatgagcccctagatccagccatacctgaagctagttaaccataacctttccaattgcatatatcaataaactccctattctggctgaaattaatt

SEQ ID NO: 193847 - DNA, 406 bp, Homo sapiens
ggctgcacaaatctctagcgcgagctccatcaatgtgtatttgaccttctttattcctctcccgaagagaacttctccagtgtatcttattccccactgcctttaagacactgacatcggttcaacaattgtatgttgacttcccaggtgtatatgacaatgcttaagactattgctaagcacagccttaatgtttggaataacataatgacagcaagattcaactcctagctctaaagaaaaaaagaaaaaagaagattccactcctgacatactcggactgcagttttgtatccaacaactctgaaattagtaggagaagaaaagatacactctctgcccctcaaatatttttatcctttacaaagcagaaatgcagaacacctttgatggaagcgtcgcgcat

SEQ ID NO: 193848 - DNA, 295 bp, Homo sapiens
taaatgcaaaggtcgtcttctcatttatagacatgttctgtctttctcaataacctaaataaagccagttaatactatcaattttaggatctgtatgttatgttttatataattgccctcctcttctccctctccctttccccaaatactctggatttcctggaaagccttttcgctaattcctttaggaccctgagatctgacttttcatcctgccgtttctgacctgccagaaaccaagcactgtatcagtgccccatccactttatggaaagctgctcaacaaaatccaggg

SEQ ID NO: 193849 - DNA, 318 bp, Homo sapiens
caaggtcaaggtcacagatcagcaagaaagattaccaacagaactgatgtaaccagctggcttttgatcaaagctcctagggtttttagtacacttagacactctgcacttacccacatagtatatactctgttttaaaaatgttccccatctttgaagtcaagatcttcatgcacttcttattataaagtatgttttgttaaatatattgcattggatcaagaataagaggagaaaccagtatgtttgtttttttttaatagcgacggggttttaccttcttgccaggcttgtcttgaactcctgaccttgtgatcc

SEQ ID NO: 193850 - DNA, 508 bp, Homo sapiens
cagcacaagaaagtcaatcacgttgagacagagagagcaggagaggaagtgggccccagtagaagtgggcgagagagcgttgggtgggaacgtggcacgagagagagaaattatgagattgacagagagagagagagagagagagagagagagagaaagagaaagagagagagaaagagaaagagacagagaaaagaaactatgttgtttaaaatgccagcggaaagtcccatgggggtgaaagagtccggcaatggccagggagttagcagcttggcgtagtgtcttcccactgttttgtctgtcttgagaatagcattcaacgcgactgtgttcccgcagcagacgttagccgctgcccacgccttgagtgccggacgaggtcaacataggctttccgtcacagaatatgtttgggcaggaagatcggaacacttggggctgggcatctaccgctcccccacggcacacacgagtcgtcagggaaatgcccgcctctgtgtgtgtt

SEQ ID NO: 193851 - DNA, 152 bp, Homo sapiens
gttgccgtggtgatctagaggaccccggtcaaccgctacagtagctttgaggaactctgaataaaggctggagcacagatagtgagagggtacatggcatagtataaggctagagaaatagctatgccaaagatttgagtctggaaggtgat

SEQ ID NO: 193852 - DNA, 366 bp, Homo sapiens
gtgaacttgtatgaggttatgttaaacagtaaaagaaatgttatgcaacacactgggaagggcaagcagttctggggtttgaaactcttcactgtctgcacaaatcagttctttaaaattaagataaaggtctcccatggttctcgaaaaccagactaattagtaaaaacagataaacaaaatcaaaagcaggacatttcatatacattttatattcaaatatttttgggagaaataactacattgattttaaatctcttgactttttcttaacagatatacttcattacattttaaagtactgggcgtgttttctaaagcagaatcaagctatcatctttctacttaaactgatacataaaaatg

SEQ ID NO: 193853 - DNA, 361 bp, Homo sapiens
tgaggatctccatcaccctaaatttattatgggtaagttgtccaggctcaaactgctcttccagcagcatttttcatactggatacgcagtgcaaaggaaatttctttatctcaaaatctatttgcctacttaagttagcaaggcgctttcattaactttcattccttagtattaatctacaatatactgacatgctagaaggcaaatatcaagatacaaatttaacagaattctataaatgccttctaaccaaatatgttcagttaaactcatgcttgtggattaataccagcatttggcaatttctatttgtgtgaagacattttcaaagatgaaatacataaactttttttataaatc

SEQ ID NO: 193854 - DNA, 264 bp, Homo sapiens
ccaaaggagagagaaacagaagagaaaattaggtaattttccttggaaatttagaagacacaggagtagatgggattgaccctggacagaatttttgttttaattggaggcaaggataagggagggtggtacgataatagtaactgaaataaatggtgggaatatgaagcacaggctgggaagatcactggacaggatcaaactgtaagtttctgaatttaagcgcttcggctcgaacacgcctccccacctggccatcagcct

SEQ ID NO: 193855 - DNA, 514 bp, Homo sapiens
agagaagaaatttattctggctttaagaagtttctactatgttttttgggggagatgccacatagtctacttaagtttaattactgtaattacagagaaaaatctgtggaagtataggataccttgaataaatggaatcttcaaggtttgctggcaaaccaacagtttgatttctcagaagtttcttagagaaatgatgccagttttgttttgctccagattctcattgttgcatctgccaatcttgaaaataggaagcaaagattttccttgctctgtcccttgggaaccacttacattcgttttactgtttctaggaaattttctttaaatatatacattagagcccactattgtgttgtggatccatgcagtgggcttgccttagaagtaagtgcctttatgataagctcttttttgtttgtttgtttgtttttgagacggagtctcgctctgtcgcccaggctggagtgcggtggcgcgatcttggctcactgcaacctctgcctcctgg

SEQ ID NO: 193856 - DNA, 436 bp, Homo sapiens
ctatgcacctcaaagacataataattctcatgtattttctgaaaaaccacagaccccaaaattctcccagaaattgaatcaatgtgtattatagaaatgtttataatatttacaagttcatgcagtttattaataagaatctaagacatagataactctccattaaaactactaatgaatgatcagtccatggtacacaaaagcatgaaagattatcagcaggggctatagtgacaaaaaacagcctttttcctttttcattcatgcaaatattaagcggccagtatttgtggcacttaatactttgatactatgaaaaacagaaataagcacaatcattgccttcacatggcttccaatgtaaaaagtgaatgtgttaccaataaaataatctcacaataacaaacgtaaaactaaaactggtggcaagtgttgt

SEQ ID NO: 193857 - DNA, 208 bp, Homo sapiens
tcagggaaaaatggagcaaagattacttgagtaagtaaattaaagaattctgagactagatggtggatggggtgattcaggtagacacagaagtcattcacctgacagctaaacttgaatggaacaatctattagttaattccataatcattgaaaaatgtagagaagtgataacgagactgataaatggagtatcccatgatgagct

SEQ ID NO: 193858 - DNA, 1060 bp, Homo sapiens
ttagttgcttacagcctgtaatgacaatcaagcaaattattttccttttctgaatctatttcttcacctgcaaaatgggcattatgaagcatacctcaaaagataggtgtgtaaaacactagccctgatctggcaaatggtgggacttaaatatcttttccttatccctttttctggttagaagaggaacacataccagagaaggatactccagggcaatagaaatgacttgccagctcacagagcaaggccatttgagggctactagaacagacaatcaacctgaaaagacaccttaagaagtgcagaaacccaggccacatccaagtcccagcctaaatttctccccaccataaaatgtttggcagtccattttggacaaacattacatcactgtagatttagtagattaggaaatggaaacccactcctcagctccccaggaaaaatagctctgtgccaacttctggtactctaggaggccggagcaggacctagtgcaaggaaagtagtgagtccaactgtcaacacattttaattagtccaaccttaaaagactataaccacagagattaaaaggagcccccagggaaagcctctgcccttcacacagttcagccaattagatatgctcaagtgccctaatttttatcactgaattctttggggaatcaggcctcaccaagctctgacttctggctaagagtacaagcatacgctcagctcaggaggagcagttaggtgtcagctataacagaagcagcataagtatgcctggaggccctaacacccttcctgcgtaggtaaactgagctaacagaactgccctcttgccaggctccacccctcactccagaatgcaatccattccccagtggctatactgaacctaatccatactaaaaagctagttttggtcctcagttcagaggtaaacacatggccagacacagtagctcacacctgtaatcctagcactttgggaggccgaggtgcgaggatcgcttcaggccaagagttcaagaacagcctgggcaaatccatctccacaaaaaaaaaa

SEQ ID NO: 193859 - DNA, 616 bp, Homo sapiens
aaaaaaaaaagagaattccatcacatcacctccagtggggggatatccaggaagacaatttcagctcactataaagaactccctaacagttggagctacccaagaatggaatggaccaccttgggagtgatgaactccttgtcaatatatgtattcaaggaaagattaagtcttcattgggaaattgaactaggatcctggtgacctctcaagttgaaaaaatgggcaagttctattaggaagggaaagacaagatcaaagctgtgcttccagacaattatgtgactgtatgtgtagaagaaatgggtggggagggatcagaggcaggcaggaccagtaggaaaccactgcagtggtccaggagataaaagaatagactggggctgggcacggtgattcatgcctgtaatcccagcactttgggaggccgaggagggtggatcacaaggtcaggagttcaagaccagcctggcaaacatggtgatctgcctgcctcagcctcccaaagtgctgagattacagccgtgagccaccctgcccggcaccctaaagatttttactatgtctttttgtagcaacttagggaggagggcaagatcagtgttgttgccacttt

SEQ ID NO: 193860 - DNA, 366 bp, Homo sapiens
ttactcattttggtatcccttgcagtatatgcctcatactgtatgcccagattcaaatcctggctcctacccttactgtgtaaccttgaggaagttacagaagccctctgggccttactttgctcatctgtaaagtggagataacaataagacctgcgttacaggatttctgtgaatgttaaataaaatagcgcatgtgaagctcttaggatggtgctggacacatagtaaaccctaactaaatatcagctacgttatttggaatcataaacacctacacctggaacacaagtttctggatcaactaggaattgggtccccgtaggatttactggatgagtcagcttgaggaggcctgttgtgaga

SEQ ID NO: 193861 - DNA, 667 bp, Homo sapiens
gaaaagtggatggagagactctagcttagagagaagagaggtcaatgagactttttgttttttgcttgtttaaaaatagaaaatatgtaaataaagagatccagttaaagagtgaaaaaaaaaagatgtcctaaaaggctgatgtaactttattatcagtacatgacttttaaaactattatagctattaaaataaacaatgagaacatcttctaaaaaaatatgcagcattgagtcttttaacagtctgggtcagttatcttgcagaatgtttccaactttgttttgtcaaattcctctcttacagtgtcatttccttgttcttctctatgttttttataaactaaaacttggaactaaagactggattcaatgcaagttgaaatattttagtaagtacacttgacaggtgagaaaatgtacttcacgttgcaacacaccagccagcgcattctaccagtgggtcccactagcagtgatgttgagtttggctactttcttaaggttgtgattactagatctctttgttataaaaaacaatttccctttgactttggcaaataatatttgggataggaggcaatactttaacataggagaattatttggttcccttcaaaaccaattcacctaatacgttttaccaatagtttcatcatctattgat

SEQ ID NO: 193862 - DNA, 289 bp, Homo sapiens
aatgaacagtgtctgtttatccaagatgaatctactctagataagaatgtatcaacctcagaccacattgtgtctgcaaatatttttctccgtttcccgattgtttaatggacaaagcgggtttgggggagctggggagagttgggcagttctcactgagcaccagtccttgttcttgagcctgtagtttttgtctccacggctgcagagactggccagggtctcatctgccatccaccttcagaatggtggaaacagttgaaaagaacattgcagtgaagcttgggct

SEQ ID NO: 193863 - DNA, 229 bp, Homo sapiens
cttcagtgagtttcaaaaatagcttgccttttaagaacaattacaaaggagtcgtgcaaaggcagagtgacttggcttcagcaagcctcaatttcttgatctgtaaaatagggattttaccctacctcaaaggttgtagtgaagaccaaaagcaagaatttatataaaagtactttgtatcatgctttttcagttataaccttttattctcagggaagtcagcaaatgc

SEQ ID NO: 193864 - DNA, 480 bp, Homo sapiens
gttcaatggcaaatgcaagatcaacgttggagcagtttcaggacactggtgatgttgagctacatagcacgttgctaccttgggaaaggcagaaagagtacgtctttgtggctcttatacagcagctgcttatttagtttttccgagacaggatttttaattagctgtctatggttattctcttttttgtttttcctcaatttatagagggctctagatcacctactagtctaacccctcggcctcccaaagtgctgggattataggtgtgagccactgtgcccagcgaccccatctcttaaaaaaaaaaaaaagagagagagagagagaataggggtataattgtttcaagggaaaagcacttgatatattgggcaggtacaagtagggcataataaccagtgtcatcaacttccaaagctcttgaagagtctcagtgggcttcctcctgactaacccttctcatatttgcctaaatga

SEQ ID NO: 193865 - DNA, 483 bp, Homo sapiens
tttctcctctgtgagtctacagaaacctagagttccgtaagatgtcactaagggcttcatgagatattgtaactgaaaaaaattagcatttttgaacttcatacagaacatgatattagcatttagagtgacagacaatggccaagcagccctgttagcaatgtcaacagtggtctctcagccctgaatggctgtgtgcaggaccacgttcctttgataaagttcattctcaatcaggagttggtagatggtgagagtattgcagggaggagaggatggtgggctgatggcattagcttctccctccagaaacatcttccccaacacctctttatatgctaatgactgatttatagcaacaaacaagctctagctctgaaataggaatcttggaatttttcattctactgagagaatatttatacctcatgagctgactccctggctctgctattgttaacacttaaaaatacacattgggta

SEQ ID NO: 193866 - DNA, 179 bp, Homo sapiens
ctgcttccgagagctctcttaagataaaaagcagaattttaacccagccctacgtggtcttagacattttggccattctcatttcccagcctcacctagcccttggtttcatgtcatcttcgctttcttctatattccctcctgagacacagcctttgcacatgctgccccctctgcca

SEQ ID NO: 193867 - DNA, 407 bp, Homo sapiens
ccaccaccagcaaacaaggggcagcgtggaggagtggacacaatgtctgagggagcttaccagcgcctctgggagtcctcccacgcgaccctgcaggagctgctggaccaagagcagcttctgctcgaacctgcgcccgaccgggagcggcagtccttccagtacaggctcgcatcgctctacctgcactacctggggctgctgcgccgcttcgacaccgtctatgaccagatggtgcagccgcagaagcggcggctgctgcgacgcctgctggacggcgtggcgggccgcgtgctggagctcaaggacgagctggtgcgcgccgacctgtgtgagaaccactgcctggaccgcgtgctgcaggatttcaagctcaccccagtacgtgtgcgcagccgcgaagccac

SEQ ID NO: 193868 - DNA, 289 bp, Homo sapiens
taggaagggctggcaggatgaatgaaaatcaggcaaaagctcaaggatgttgtctaaacattttgttcttatgggaccagaacagttgatgtagttttgaaatttgtccccacccaaatctcatggaaatataatccccagtgttgtaggtggggcctggtggggtattggggttatggggcggatccctcatggcttggtgctgtcctctccatagtgagttcttacagatcaggttgttgtaaagtgtggcacctccttcccacactcactctcttgctcactctgt

SEQ ID NO: 193869 - DNA, 339 bp, Homo sapiens
cttgaaggatgctcaggagtcacatgaggtggacttggaccagggaggcctgcccaccacaaagagaaggcagctcataggcaggcagaaccttgctgggattctcgtgactgcagtagagtacatcctgctctcttactctcaatgatcttccacccatacacacatactagtgctatgagagtggcaaggagatgcaaacccaactgcttgtcctctacatgcaaacatcagatgcttgtaatccaaactcaaatttatttgttcctgcaacatcatgttgccacctttgatatcaactctaactactgatgcagtagcttcagacctcatctctct

SEQ ID NO: 193870 - DNA, 433 bp, Homo sapiens
ctgcttccatggctacctctagaatctgttctcacagcagccagaggaattatcttaaaacatcaatcggtcacatccctcccctgctcaaaatattctcatgcagacaaaggccaaagtgctcaccatggcccagaaagcctttcccgatcctgttcccactcccctccacacccgccctctctccccttcactcccacagcttcagccacactgaccttctccctctcgctcgaacacatgtcaagcatgccgcaacctcaggacctctgaatgcacctccctgtgccaggacccctttcctccaaaatccacagggcttgctccactcagatatgacttcctccacgaggcctactgagtaccctctccatcctagtccctctcccgaccatttcctccttatttttcttcacagaaccagtcaggtcct

SEQ ID NO: 193871 - DNA, 340 bp, Homo sapiens
tcctctgttgactgctgaggatgggcctggggccctgagaacaaaggaagggaactagttaatatgaagtgggacagggagttcaatcttcatgatcacttggataatgaagaaaggctaactagcagggataatgacagctggactttctcaagggctctttctccagcttagtcattgcctgaagtgtaactgcccgatgggttctttctgcccgctacacagacaaagtcaattgactgaaaccatggcattgcagtaaaggaagagtttaattgctgcgaggccagccacgccctaagggagagggagttaccactcaaattaatctcccggaaag

SEQ ID NO: 193872 - DNA, 279 bp, Homo sapiens
taatgggtgcttttctccaagtcaagattatgactttggttataaatccctctggtttgagaaagtagtgatttcctaatacttggaagatagtttttataataattagttgtatatttataatgtaaaacaaagagctcaactgcttatgactaatctgagcaggcagtgttgtgtactgctgctatgacaactaataatttcggtctgacattgacaggtaacttgttagaccataggagcttgcatactcacaattgttctatatttgcctaaatg

SEQ ID NO: 193873 - DNA, 923 bp, Homo sapiens
gtgggtggatcacccgaggtcaggagttcgagaccagcccggccaacatggcaaaaccctgtctctccgaaaaaaatacataaatcagccaggtgtggtggtgtgcacccgtaatcccagctactcgggaggctgagggggaagggaggggaggggaggggagagaaggggaagggaagggaaggagaagggaaagggaagggaagaaaattagagattaattcaggagattcaacatccgcctaatagaaattctagaaagaggaagtagagaatagagaggccaggtgcagtggctcacacctataatctcagcactttgggaggctgaagtaggaggattgcttgaggccaggagtttgaggctgcagtgagctatgattgagccactgtactccagcctggaaaacaaagcaagacctcgtctctaaaagtaataatatgccgggacagtggctccccacactttgggaggctaaggtgggcggatcacttgaggtcaggctttcgagaccagcctggccaacatgatgaaacccaatctccactaaaaataaaaaaattagccaggtgtggtgctgcacacctgtaaccccagctacctgggaggagacaggagaatcgcttgaacccgggagatggaggttgcatgaggtgagatcgcctcattgcactccagcctgggtgatagaatgagactctgtctcaaaataataataataataataaagttaaatataaataaataaaagcaaatgaatataatgagttttattcatttgttttgctgttgttattgttttggagacagagttttgttcttgtcgcccaggctggagtacaatgatgcgatctggtctcactgcaaccttcgcttcctgggttcaagcgattctcctgccttagtctcctgagtagctggg

SEQ ID NO: 193874 - DNA, 199 bp, Homo sapiens
agagtctatattttatagaggccctccatatatatataagagcttttctgacagtatatccattaaatttcaaagataggtaaaggaacaattttgcttttattttttattattgttattattttttaaggctagtcaagtgaagctgtgggagtggagaaggaactgctttaatttttatgtgttggtgttacaggct

SEQ ID NO: 193875 - DNA, 365 bp, Homo sapiens
ttcatagaaaatgacagtgacctattttgtccctgtctaccataatgccttatggttttctgaagaagagttggatttgttagagattatagtgccttttgaggacatgtacctagaaagtgtgttctagaatggacagcattctgatctaatacaatgagcacactgactttggagtctgattaacccaagaatgagtcaaaagttactaagcttttaaaatccgtttccacatctgtaaagcatggattataaataatgacttcctcaaagggttggtatcataactaaattatacggtttctaccatataatatgcactcaggaggtgtttcttccttctgcctccacatgttttctactgt

SEQ ID NO: 193876 - DNA, 422 bp, Homo sapiens
tgtcgccatattgcactatttgtagttcctgaacaagtgctgttctcttgcacctgtgtgactctgcacattctgctctcctgctttagaaagcaggtcttcctttttccacttgactaataccctctgagaagaagcctatatacatatatttctgtctcccactgtagacttaagttctacatgccagggactacatttaaaaacccacaatatagtgctggcacagagtagatgtcagtaaacgtcaggacacttgtttagccatctactagatgtgcttattcttttgttcttgcttggtttcttcagtggggctcctcaatgactcttccatgtcaccgaagccttatagtgttccagccagaccttgaggcaatgatctgcatctggggtggtcggggggctagagaactaggccc

SEQ ID NO: 193877 - DNA, 197 bp, Homo sapiens
gtcgaagcggtgtcctgtgtggtcaggacacttgtttagccatctactagatgtgcttattcttttgttcttgcttggtttcttcagtggggctcctcaatgactcttccatgtcaccgaagccttatagtgttccagccagaccttgaggcaatgatctgcatctggggtggtcggggggctagagaactaggccc

SEQ ID NO: 193878 - DNA, 616 bp, Homo sapiens
acttttaggaatccaacaatcatatacaactatgtttttgattctgctttgagagagaagagcaggaaatcatgaaacattacatatatttctgttgctacttgtcccagaagtcaaaacacaaattcttgaggcttataagacccttctattgttaggaagtttactcataaagttttatagttgccataaagagtagcatatgccgccgggcacagtggctcacacctgtaattgcagcactttgggagtctgaggtgggtggatcacctgaggtcaggagttcaagaccagcctgaccaacacggtgaaatcccgtctgtactacaaatacaaaaaattagccgtaaaccataatggaagcatcaggtaaaccatagtggaagcatcaggtaaaccatagtggaagcatcaggtaaaccatagtggaagcatcaggtaaaccatagtggaagcatcaggtaaatcatagtggaagcatcaggcaaatcatagtggaagcatcaggtaaaccatagtggaagcatcgcatggactttttttggacaaaggatgaaatttaaaatttcatgtacatttatcattcggttagaaaataatttcttttaaaatggat

SEQ ID NO: 193879 - DNA, 480 bp, Homo sapiens
agcatctggtgaaccatactgggagcatcaagtaaatcatagtgggagcctcagggaaaccacagtgaagctcaggtaaaccataggggagcatcaggtaaaccatagtggaagcatcaggtagaccatggtgaagcatcaggtaaaccatggtgaagcatcagataaatcatggtggaagcatcaggtaaaccatagtggaagcatcaggtaaaccataatggaagcatcaggtaaaccatagtggaagcatcaggtaaaccatagtggaagcatcaggtaaaccatagtggaagcatcaggtaaaccatagtggaagcatcaggtaaatcatagtggaagcatcaggcaaatcatagtggaagcatcaggtaaaccatagtggaagcatcgcatggactttttttggacaaaggatgaaatttaaaatttcatgtacatttatcattcggttagaaaataatttcttttaaaatggat

SEQ ID NO: 193880 - DNA, 464 bp, Homo sapiens
ggaggcaccaactgcgagacccccagggccacatgcttagaccagtgttcaggccacggaaccttcctcccggacaccgggctttgcagctgtgacccaagctggactggacacgactgttctatcgagatctgtgctgccgactgtggtggccatggcgtgtgcgtagggggcacctgccgctgcgaggatggctggatgggggcagcctgcgaccagcgggcctgccacccgcgctgtgccgagcatgggacctgccgcgacggcaagtgcgagtgcagccctggctggaatggcgaacactgcaccatcgagggttgccctgggttgtgcaatggcaacggcagatgtaccttagacctgaatggttggcactgcgtctgccagctgggctggagaggagctggctgtgacacttccatggagactgcctgcggtgacagcaaagacaatgatggaggtag

SEQ ID NO: 193881 - DNA, 573 bp, Homo sapiens
gcaaaagcaagtatagttttcattttccttattgtccgagtcgtccctattttagtttacatatccctagatccttcaaccttgggaaggcaatagggaatgctggagagagagagtttgtggactgcattcgtttccggggttgccataaaaccacaaacttagtggtttcaagaaacagaaatgtattctctcacagttctggaggctaggagtctggaatcaaggtgttcacagggtggcgctccctcaggagactctgggggagaatctgttctttgtctcttccagcctttggtggcattccttgacttgtggctacatcactccagtttctgcctccatggtctcattgtctcctctccgtgtaatctctatctgcttcacccttaaaaggacacttgtcactggatttagaacccacctagatatttcaggatgatctcaagatccttagttacatctctaaggacgctttcttcaagtgaggtagtattcacaggtgccaatggtaagcatgtgaacatatctttttgggagccacagtccaacccactataggagctctgggct

SEQ ID NO: 193882 - DNA, 649 bp, Homo sapiens
gaatcatcctgataggaaaacctggcagagacacaacaaataaagaaaatttcaggccaatagcccttataaacattgatgtgaaaatcctcaataaaagactggcaaaatgaatccagcagcacatacaaaagcttatccaccatgtgcaatactttttttaaaggcatgcttcaataaagaaacacttctatttagtcaggagactatctctttgagtctaacatagattacagccttgacatgaataagattcttcttttatgtagtcaataaatgtttacttacagcctattttatgctgggtagtattatgggaactggagagagaaggtctgtctttatggagcttgcagtatagtgacagagatagaacataaatgcacaaacagttgcacactaaagtgatggatgtactaagcgctatgaagaaatataatagccaagtgtggtggtgctcacctgtggtcccagctacttgggaggctgagacaggcggtctgtttgagccccagagtttgaggctgcagtgatccatgattgtgccactgcaccccagccttggtgacagagtgagaccctgtctaaataaaacaaagatgatgcagctaagactaacagacagcaccgactaaaaaaacaagaggag

SEQ ID NO: 193883 - DNA, 581 bp, Homo sapiens
ctctatcatctgttcctcccctaatagcccatcggcacaaacatcctccctcagagttccttccccccgaaatcctgcttcctgctgtccctgctcctccagaacttggacctcctggggatgcaagagcccttgactttcctgcagctcctcagatggcagctcttccccctgcctgatagtcccactttcagcgccttcattctggttggtctctgcaggatgctcttcgcagggagaataatatctggtctgaccagagttatctgaagaggtttcctcttcttcttctgcctgtccagatcccaatgtcaaagaagtaagtcctggccaaaattccacctcctcttcttcgcctcccaggtcactggaaaatggggccatgtctagatgctcactctgaatggggcaggcccagagctctgggggagctagagtccttgcttgtcggcctgctaggctctggggtactgcctcccagtgttccggagtgtcacaggcctcagccacaaggctttcctgattgggctccacatctgcagaaccttccttgggaaaagagggcatcgtctcaatcgcat

SEQ ID NO: 193884 - DNA, 399 bp, Homo sapiens
ctagtcatgacatatctagctccatctcgagacctcatgtcttactgctgacactacatcctcgctggtactttttcttccttggcttcaggggcattgctgtgtaggctcagatccatgccagatggggtgtgtagggggaaaagctgcataagggaggaatgtcacttggcaacactcaacaagggggaatgggcctgcagtattctcccagagatgaatgagcagcccattctaggaaatatccctttgaaggaatatcttctctatggtacatccaaacttttctctggaaaacatgcctcttcattctgatgactttctatttattctcttcatcttaccatggttttacaaaagaggaattttaacatactcattcagcagagttaaggacct

SEQ ID NO: 193885 - DNA, 492 bp, Homo sapiens
tgctgaataattgtcaggcagccatgagaccacagtaagctcccatactatctagaggtcaatttatcatccaagatggcctgctttgcagattgctgcatgcataccctctgcagcaccaggtagcaggcagcaggagaggtagccccacaataacacagcatgtgtccctagagcatcttcttattgaaatgggagatttaaaaccttttaaagaaaactaatggtcctgtttgctgtctaaggataaagacgagtacattttaatggtgaaataaagaaacttcaaataaatttttcacttgaagctggccttctgagtccctctctcaaacctgcccccatctcacagtttcccactcccctgctgctcaggatacttcagtgggaaagtttaaacaaaacacactaagacagtgttttccaaacagtgggtcatgacccattagtggactgtgaaaataaatttagtagatcacaaccaacattaaa

SEQ ID NO: 193886 - DNA, 570 bp, Homo sapiens
acctcctaccccacggaggcttgaaaggtctttttttagcttcctgccccaggcttggcctataagcacctagaggtgagtggtgaactttgaggccaggagattctagtctgcattcaaacaatttgctacagcagcaaatactgtcactaaattgaaaaagtgccatactgttctcctaactcaagggacagatcaagctggagcgctgagtcagaattcagaattcaaaaaggtcagagctcaaaattaaacagggcaaagagaaagcagggaactggggtgaggggtagacaggaagagaagacagtcatcggagatcccagaaaaacttgctatagcaaaaccattttaggggaactccattgtacccatcttgttaatgtaatcaccacagagccagttctctggaagtctgtgctctctgggtggagtcatccttctaagacagccaagtccagtgggagaccactaacttgggaattaggaaatccaagttctcctttcaatactgttaccaactatatgtgacctcgaacaagctgcctaacccctctggctatgaatacg

SEQ ID NO: 193887 - DNA, 444 bp, Homo sapiens
ttcattgcctcaaaaagaaaccctgtaccctttagctatcgcctccccaccccaacctcttcatccccatctctcagccttaagaaatcaaaatctactttctgcctcttagatttccctattctggatatttcatgtgaatggaatttataatctgtggtctttcgtttatggcttctttcacttagcatgttttcagggtttacccatgttgtagcacgtgtcagtactttattccttgttatggccaaatactatttcaccgtatagatattccacaatttgtttctgcttacaccagctgatggacatttgggatgtttccaacttttggattttatgaataatgcctctatgcatatccatatacaaggtttttttttcttttttcgtgtcagatgggtaatgtgccaatgtcataacaaggttcgagggtggctcacc

SEQ ID NO: 193888 - DNA, 522 bp, Homo sapiens
tttttaatcagcacttaaatgtcattcactaccttctggccttcatggtttctgctgagaagccagatgttaatctgattgagattccttgtatgcaatgaatcgtatgtctcttggtgctttcaagagtctgtcttcgtctttgtctcccaacagttgtatgattatagtgtgtcttggtgtggaacctctttacatttatttttcttagagtcagttcagcttcttggatgtgtagattcacattgttcttcaaatttggaaagttttcagccattatattttcaaatattctttctgccccttttccttttctcctgaaactcccattatgtgcatattggtatatttgaaggtgtctcacatgtttcttagactctgttcatttctattcaccctttttttctgctcctgaaagtgtatttttttccttttctttttctttttttgtagagatagggttttgctatattgtccatgctggttttgaactcttggcttcaagtgattctctcaccccaa

SEQ ID NO: 193889 - DNA, 623 bp, Homo sapiens
ccacctccagcatcggtcattacaattcaacatgatatttgagcagggtcaaatatccgaactatatcaccaaagttttccaaagcagtttgaggccctagaaaatgctctctgcagtaatgctgcactacgttgacattctggtgtcaaaccccctgtcttcttagacatctttgctctgtgttatcttccagccccacgcaccccccaacctttttgttttgttttgttttagagacagagtctctctctcttgcccaggctggcgtatcgtggtgccatctctgctcacggcaacctatgcctcccgggttcaagcaagactcctgcttcaggctctggagtaactgggattacaggcatgcgccaccatgcccagctaatttttgtatttttagtagagacagggtttcaccgtgttggccaggctggtctcgaactcctgacctcaagtgatcttcctgtctcggcctcccaaagtgctgggattacaggcgtgaggcaccacaccaggcctttccaagtcctttcaaggcttcattcatactttctttgcttgtacccctacccacagttaccccaggcataaggggggggccgagccgaatcgtatcaggctagtg

SEQ ID NO: 193890 - DNA, 400 bp, Homo sapiens
tattgctagcgtaggccgcagggcattgagaaacgtataccgctgcactgctggcccagctaaccaagggtctccttcacttctttgtcattaatagcctgagtaactaactccactttagttccctcaactgtgaaatggcaagtgatgctagattatctctaatgatctttgctaaaattttatgatccagatatccttatctgattctttctcagaatcactttaacagtttaataaaaacggcctgacatcaagagtttttttttttttaaagaaaagatactcaagcattgattataaatttcaacttgacccttaagtttttgcaaatctttcctactcttcctttaggatccagcccaccatcccatccagaaccacagtgccctttggaaga

SEQ ID NO: 193891 - DNA, 410 bp, Homo sapiens
gctctgttcttaacaccatgtcctcctgcattgtcccacctgttatcctcccaccaacataaatgctcagtgatctcctaaacagagcataaacccagatcttaaatccctagacactgaagctactaccctcctctttttccatcaaaagctaatttcttccacactctttacctccacttcttatactcagctcactgtaccctgatttctgaccaaaccaactctaccaaaacagctctcttaataatcaccaatggctttcctaattactaaacctacacaccccaattcttaatgttatttcatttctctgacaaactgtagaccttttacttttgttttcaacggtatgtgtgatctagaatccgtctgtatgatttctctttctctgcttctcactggctcat

SEQ ID NO: 193892 - DNA, 386 bp, Homo sapiens
ggaccgctctagagtatccccgtatcttagaaggatctcagggtgagaggttggggtgggtatttatagagtttctaggtatgaactcaaatggtttacatcttaggtctttcaatacgaggtctgattgtggttgggtataaatttatcatagaagattttaggattgggagaaagtgaggcaacggtcctgatgtaggtgttgattagtaaacagttggtaagtgaaattttttcctgagtaacttattgttctgaaaatgagactgtttgtctaaataagcagtttattattcaaatacattggtgttcctgaagcaaacagtgaagttatttgttctttgcaatcttatcttcgtggggtaggaggtcgggaaccgagctcg

SEQ ID NO: 193893 - DNA, 301 bp, Homo sapiens
agacacacagactgaatgataaaaggtggagaaaaggtattctatggaaatggtaacccaaagggagcagggatggctgtgtttatatcagacaaaatagacttaagtaataaactgccacaagaaacaaagatggacattatataatcataaaagcgttaaattgccagggagataaaacaattacaaagcatatacatctgtcatcagagtacctaaatatataaaggaaatattgacataactgaagagagaaacagcaatacaataatattagaatacttcaatacccctcctttca

SEQ ID NO: 193894 - DNA, 619 bp, Homo sapiens
agtaggtgggcaactctgtcattttgatggagcccttgttgggggaggcctgtgaagggggatcccagggcctgagcctctctgcaggacacaaaggaagctgacactggatctgtcccgtcacctgaactcaccagtaatttattgatgctggatgctggcacccagcagcctgctgggtcagtctcagggagcaggtgtagggccctcgggcctaccccagcctcacccaggcagggaggggaggggagcctgggtctgcccagcccaggaaaattgataggtcagcccttacaagtcagtccccttctgtgtgccaggcagtgcaggcagaaaaaaaaacaagtgtggttcctgcctggcctgagctcatagagggttgaagtggacatatttcaaataaccaaaatggtgagagctgcatgagggcctactatgtgccaagaacttcgtacctataaccacatttaagcctcatacagggcttaaatgtgctgaggtcgcacagctagtggtggggcaagaggagggtttgcacccagatttgcctggctctaaagccagggcacattactgccatcccgccccactcaggctggctgggccaatgggcattaaa

SEQ ID NO: 193895 - DNA, 736 bp, Homo sapiens
acaccgtattgtgcaaactataggagatgatgacctaacaatacagaatgtagagagggcttttgacaacagaaaatcataagagagtatcatttaatggagagtgaaaaaaaatgatcctggattctttttccccctttatttgttgtatcactttgtaaaacctctctatgccttgctctcttcatcagaaaaatgagacctatggttttatttttacaaagtgctttaggatttaggagaacccagaatgtattatatgatgaaagccaccatggtgcatgtcacatgactatggcagaaaaggaaccaaaagcaaaacatgaatcagcaatgaacactcattttgtttgtttaaaaccccaggatgtgcaaatatatgtcagagctgaagttgaccctcttcctttacaatcacatattactctatcagattctggttttgaaacctgagtttggtagaaagaatatggatgcaggaaggagtaaaggacaggagtaagagggtttctctcaagcaaaccccaagtcactaggggtgtcaccaacagcttcactaacaatcccctaaaggaccagagacagagggcattattagccttgcttcttcgccttcctcaagcattcctttattcccccaaaggattatacattgacagggcaaatcaacaaagcagaagctgtctcctccaactgtccaaagttatatgggtttttagaaccataggagagtcag

SEQ ID NO: 193896 - DNA, 1178 bp, Homo sapiens
tagatttactttgcctaatcccctcttagtgcatgtggggaaactgaggtacacaaaaggaattccccaccaagttaggggcagaacctagcccccttgtctcccagatggatatcttcttttttttttgagacggagtcttgctctgttgcccaggctggagtgcagtggtaccatcttggctcactgcaacctctgcttcccaggttcaagcgattctcctgcctcagcctcctgagtgtctgcgattacaggtgcacacaaccacgcctggctaatttttgtatttttagtagagacggggtttcaccgtgttggtcagggtgacctcaaactcctgacctcatgatccacccagctcagcctcccaacgtgctgggattacaggcatgagccaccgtgcctggctggacatcttgttattaaagcttcttctctctttgtaggggagggggagatgcctctggtggagaagaccagtgtggcagtgactgtgtctgttagtgaacctggtggctggttgagggtctgtcgtggtgactgaggacacatacaaagtgcttttctcagtggtcaccttggtgttggtgaataagggtcagaagatggctcctgtcctagggcactgccagtcggtttggaagctgaaatgcctgcttagcagtttgaggaaacacagaccttggaggatcttctggttgcctcttcaagaattcattctattccccttctgctccccaaatttgcttttcttggggtgggtcttggttggcctaagccaagaaagtatggcatctactccttccatagcaatagctcaggaataggcagtgacccagacctgaaccaatcagtgcatggaattacccctggccaaagtggttgattgaggctgggtgcaagcagagttgtgagaaggctcccatttggtggttggagagatcgcacttgctccagaggtcataatgtgcagatctgaggcttggaactgctgcagacattttgctaccacaagtgaagccaccctgacgacacagttgacaatttggagcagggcagagctgagagaacagcagggaaacagccagagtcttgctcaagcctccctgaagtatctatacccctggactctagttatgggggctaataaatgttatatactgtttaaggtagtttga

SEQ ID NO: 193897 - DNA, 276 bp, Homo sapiens
tgaatattgctaagatggcagtactccccaaattgatctacagattcaatgcaattcctatcaaaattccatctccctctttgtagaaatggacaactggtcctaaaattcatatggaaacttaagggaccccaaataacgaacaaatgttggaaaagaagaacaaagttcatggattcacacttcgacttcaagatttactacataatcaagacagtgtggtacagtctgtcataggacagacatatagaccagtggaataaaattgagtccaga

SEQ ID NO: 193898 - DNA, 453 bp, Homo sapiens
tgcatcgctcatgctgggagctgtagaccagagctgttcctattcggccatcttggctgccctccgacaaaatcagttctttacactactttacttctttaatcttatgcttacctaaccaccatacttatgagacttaagaaacgctttggggccaggcttggtggctcacgcgcccagcacttcgggaggccaaggtgggtggatcacttgagggcaggagtttgaaaccagcctggccaacatggcaaaaccctgtctctgctaaaaatacaaaaattagtaaaaatacaaaaattagggcatggtggtgaatacctgtaatcccagctactcaggaggctgaggcaggagaataacttgaacctgggaggtggaggttgcagtgagttaagatcacaccactgcactccagcctgggcgacagagtgagactctgtctcaaaaaaaaaa

SEQ ID NO: 193899 - DNA, 286 bp, Homo sapiens
ttggatgcccaatgatgggagaggcaccccttggagaaatcaagaaagacgctgcattttagctcagccctatggatcagaaggataaagagaggtgaaagagtgtcccaggcaagggcaaaggcaggagctgaggaaggatggatggagcatgttctgaaaaaggaaagtgtcccggtaggctagaagaaagtgaaaattagacgagggagtttgaagtgtattcagcaggcaccagtgagcaacagaaggttttgtgtttcagcaatgatgggagataagtaga

SEQ ID NO: 193900 - DNA, 426 bp, Homo sapiens
ctggacgtatgagggggttacatctagataaacttactttgaattgaaaatactttaagtcaaaaatgcactttcaacttaacattattttcaacttaggatgggcgtgttgggatgtagccccatcataagtcgcagaccatctgtatataaaatgttagtgataatacctacctagtgggaaagttacgattaataatatatataaaatgtctgacagtgtgtttaacatattgtagatatttttaaatctttactttataaatatatatccttcggtctttttttatttgcttaaatcaagttgcttataaagatttgttgaaaaagaggcagagagaggagtagtgggaacaacactgtaccaggtagcataagactagatttcagtcttaactcttccactaacttcataattcctgtggg

SEQ ID NO: 193901 - DNA, 485 bp, Homo sapiens
cgagctcggtaccctcgtcttttgataggacccagatccagcattgaagagagaaacacaagctattcttcctatgcagtttcattcctttgacaggagtgttgtggtgcctgtaaagaaaccacctccaggtagtttagctgtaaccactgtgggagccactactgctggaagtgggctgccaacaggcagtacctctaatatatttgctgctactggagctacaccaaaaagtatgattaatacaacaggtgccgtggattcagggtcctcctcctcttcctcctcttctagttttgtgaatggtgctactagcaaaaaccttccagctgtacaaactgttgctccaatgccagaagattcagctgaaaatatgagcatcactgcaaaacttgaaagagcgttagaaaaagttgctcctcttcttcgtgaaatttttgtagactttgccccattcctatcaaaagacgagggtaccgagctcg

SEQ ID NO: 193902 - DNA, 398 bp, Homo sapiens
gccccgccagaaacatacgattattgtcaaaggggtccccttcccaatttcctttttatgaggggtacaggggtagggtggttcatggcaccattatttatctggacctcagtttttaggatcaaatttaacctttccctctcccctcattttctctctccctctcttgtgtaagtcagccatctaggcttgtgaattcttctagttagcttgagctcacagttgtcttgaagcaattccttgggcatccaggtacagttctctttcagcacaggtctctccaaacaggtctatttgtctccctccccacgtttctcagtgggcccttcagaaagaaagctgcagctctactggggaggcaagagcttgtcattgaggaggcttgggccagaggcagg

SEQ ID NO: 193903 - DNA, 140 bp, Homo sapiens
agctcaatttgactgctttttataacaggccaattttgtaacaggggaagatagtagggaatatatttgaattttgtttgactttcccatttggcccccaaccagaccactcctctgtcctcacatagggcagctgtgga

SEQ ID NO: 193904 - DNA, 347 bp, Homo sapiens
tccataaccatactgccaactacttgctagaaatcttcagacctatgactcggtgcacctctactcaagtacaaaacagttcatcatcttcagtaccaatcacccgcccaacacagacacacacagagacatgcacacacaacctctgcctcctcctgtcttctctattaacggagttcagcacacttcaaatatttccaatgtctaaagcaccatgttaggcatatgaagacaagacagtatacaaagatgaacaagtccccttgacttccctgtcaagatgagttatgctcctctcttctcctcccacctctccatagcatactgtatttagctctatcactaaa

SEQ ID NO: 193905 - DNA, 323 bp, Homo sapiens
gtctctgagttttaatacacattttgaaagaagtgccaaaatcctaggggtttcaataaaagagaaggtaaaacttggctgttcaccacaagaaaacagattctaagcataaggtgactgctcaaattcaaggcgaaactttaaccattaatttgtcgttgtttttgtttttaataagatgcgctgtttcctttttgtcttcattctttaaatgctttatggtcaatttgatttgtaaattcatttgctctaaagaagcaagaacaataaaagctctctgtgcagtttgccagtcctcactgctacgtggcgagttccccttg

SEQ ID NO: 193906 - DNA, 495 bp, Homo sapiens
ccattcaacaaagctgcacatggaacccccaaggagtgtggtcccctgaccagggcctgggctgtgcaggcgggtgattcacacagccctgtctgccccacgatccctgctgtttccattccttccttcttcagtgcaaaggtaaaaggagtagcagtgtatttacagccaagcatttaggggaaaggaacagcctgcactcaggccaccttcagctcattcctgggtttgctttggaacatatttttccgtgtcttttctgtgtgtttctcacacccgggcagggtttgctggtctggcctggtctgttttgttcaggtctggtctggtctagttttggtctggtctggtctggtctagttttggtctggcctggtctggtctggtttggttttggtttggtctggtttggtctggtctggtctggctttggtctgatttggtttggttttggtttggtctgatttggtctggtctggttttggtctggtctca

SEQ ID NO: 193907 - DNA, 386 bp, Homo sapiens
cagccaggaactccccgcccagtgaccctctcccgcctagggggccatttgaagttggaggcgggtcgggacctgccttgacctaaaggaccagcctcaggcttggtcccaggtagtgacccagctctgagagtccctggacggctcccgagactcagtgaatatatttgggatgccccccgcgctggatcatgggcttcccaacaccgctggccttgaatgattcgggcctaattcgttatggttaagatttcagataatctaagacgggttgaggcctccagaagcggaggcttcctgttgggcgctgccagtgacttggggatgaagctatggaagaatatctgagtgtttctcttttgcttctataaaagtaattaatgacc

SEQ ID NO: 193908 - DNA, 198 bp, Homo sapiens
acttagcgcggggacagatgtgtctgagtgacctgtttcaatcatggaaactgaggcacagagcacttgggacacactgctctggggacctctcagccccaggtcccgccaacacatccaagccagtacttgtccctcctgagcctgtcctggcttgtgatgctctagccagaagtctggggacccccaccacagccc

SEQ ID NO: 193909 - DNA, 450 bp, Homo sapiens
gccgcgctgtgaggtgggcaggcgaggagcgggaagaccatctctgcaagtgcagcatagcctcggcctaggacagcgggagtgcgtggccaaagctgtgagcagaggcacaggtggtggcagacagtagaggcgccccatggggaacatactgacctgtcgtgtgcaccctagcgtcagcctcgagtttgaccagcagcaggggtcggtgtgtccctctgaatctgagatctatgaggcaggagctgaggacaggatggcaggagcgcccatggctgctgctgtacagcctgctgaggtgactgttgaagttggtgaggacctccacatgcaccacgttcgtgaccgggagatgcctgaagctttggagtttaacctttctgccaatccagaggcaagcacaatattccagaggaactctcaaacagatggtgagacaacagtgtctgt

SEQ ID NO: 193910 - DNA, 420 bp, Homo sapiens
gccgcgctgtgaggtgggcaggcgaggagcgggaagaccatctctgcaagtgcagcatagcctcggcctaggacagcgggagtgcgtggccaaagctgtgagcagaggcacaggtggtggcagacagtagaggcgccccatggggaacatactgacctgtcgtgtgcaccctagcgtcagcctcgagtttgaccagcagcaggggtcggtgtgtccctctgaatctgagatctatgaggcaggagctgaggacaggatggcaggagcgcccatggctgctgctgtacagcctgctgaggtgactgttgaagttggtgaggacctccacatgcaccacgttcgtgaccgggagatgcctgaaggtaaggaggtgataggtgccatctaccctcggtttgcctttggctgctgctgtcccca

SEQ ID NO: 193911 - DNA, 652 bp, Homo sapiens
gggctttggtggacgatcaagattttgtgaagtccggattgactgaggaaaaggcagtcctagaaaaatacagatgactacaactaacaggaagaaataaaaaagctgaatggttctataaccacttaagaaattggaccagtcattaaccatcacctcataaagaaaatactgggcctagagagtacaacacaagctacagataaatgttcctacaacagagcaccgtagtaagctggcattgaatgtgtacttattgaatgagtgaatgaacagagaaagtatatgaaatgttcaagtaaagatgagcaggtgcccaggctgaatgataaggtgttggagtagggggacaaaaagccatgagagaaagaggcaagagagccagatgaaaatcctacacaaacgccagcctacggagcttagctcttcaggcagtacggagtcctgaaacacaggaggaggaagaacaagaggagctctgggtttttgaaagcccatcctggacactctggatgataagctggagagtggaaacgtttagacattaagcaaagcaaccgctaggaaggttcctacaacaccacggctgtcggatgatgcaaaagggctaagcttggacaggaacagcaaattagagaggtagagaaggatt

SEQ ID NO: 193912 - DNA, 446 bp, Homo sapiens
cattcactcacctacattggttccattcttcctgtccattgttctgaagaataaaaacaatctctctctacctaatatatatttaaaaaaatactaagagtaaagaattaatgagtgcctgcaatgtatctgacactcttaagtattttacagccaggcacagtagctaacttacgcagtcccaacacctgggaggctgaggtgagtgaatcgcatgagcccaggagttcaaaaccagcctgggcaaagtggtgaatccctgtctctaagggtgaaaaataaacaaataaaaacagctgagcatggtggtatgtgcctgtggtcccaactactccagaggctgagatgtaagaacccattgaactcagaaggtcaagtcactgttggagtgagtcctgttcgagtcacttcactctagcctgggtgacagactgagaccctgtctt

SEQ ID NO: 193913 - DNA, 202 bp, Homo sapiens
tcttgatcacaataacaaaacccatatttttagatttctagatccaaacacacctctcaagtaatttaggacttacaatcaattctctccctcaaaaattgtaatatcctatttgaatatatacaaatagcagcaagcagttttgtaatacctagtcaaaatcacagctcatttctacaataatgttgatagattgtatttg

SEQ ID NO: 193914 - DNA, 329 bp, Homo sapiens
cctcccaaagtgccagaattacaggtgtgagcgactgtggctggcttattcttttttattttttcttcgactgaagaaattggctgcctaaaattcccttgtatcagcatattgtaatttatttggccaggctcctagtgatggatacttaggttgtttgcaatcttttgcggtagtgtatgtactgttcttatacatgggagaggataaattgctgggcaagagtgttttgatgaactacttatcatttggtaattatttttctaatgaaatgagctcatcaggtgacagtattcaatgtcacattggttaaaatgttccaagttttg

SEQ ID NO: 193915 - DNA, 449 bp, Homo sapiens
cgatggagcaaaggccgggtgcccagtgagtcacctgagagaggcctcttggggccaagtccttactgaggctgggcggggaggccctgctggagggaggaaggaggggtccatgggacagggaggttggggctaccctgggcctgcttggagttttatcctttccttgaacttaggactttctggagacttgaagatggtccctcataagctgactgcatcctgcttagagctcaggggcgcacccccaacaggcaccttccacccctcagaaccagcagccacaggcgggccaagggcagagcgcctctccccaggggctccttttcccgagggactgtgtcctgtgtgtgtggagagaggacagctgccagatacaatacataagtactgcatggaacatacttagactaataaattatttgttgtttctctgaaattcaaactta

SEQ ID NO: 193916 - DNA, 203 bp, Homo sapiens
gtgaacacaaccctgctattttgtcccttccagggctctgatgagccctcgcctgctgatggtgggcgagactcgatcctgagcccagctatctacactttgtatgtccacagctgcctctactgccgtgtggccaaagggaactgccgtgtgtgtagatggcctggcagagcagcccagtcccctccccgcacccaggtcct

SEQ ID NO: 193917 - DNA, 430 bp, Homo sapiens
tctgagaaaaaataactacaaaaattaaataagtagttagtgtcctcataaagatattgtatacacactaaaataaattgctttgctctacatacttgccagtgcaaaaaaaaaaaaaaaaagacaaaaggaattaccaaaaatcttggaaattaaaaattgaatagtcaaaataattgttatgctgggcctgttgatgagtgcctgtagtcccagctactcaggaggctgatgcggaaagattcctgaggtcaggagttggaggctgcagtgagctatgatcacaccacagtactccagtctgggcaacaacatagcgagaccctgtctcttaaaaaaaaaaatggagcaggaaaatgggcacagacgaagagcatattaatggattggagtagagcattttccccagacaaatcataaaatgacaaaa

SEQ ID NO: 193918 - DNA, 203 bp, Homo sapiens
cttctttggaaaggctaatcagaaacttaaaagaatgcaaccattagtctctcacatatctgtgacctggaagtcccctccccactttgagtcttcctgccttttcttcacattgacctgcctttccagactgaaccaatggacttcttacatatattgattgatgtctcatgtctctctaaaatgtataaagctaagctgtg

SEQ ID NO: 193919 - DNA, 432 bp, Homo sapiens
catcccagtttggcatggatccttctaaggacagcatttcaggtggccacccccaaatcgtagaagctagcatccaagcaaaagctattttattatgtgcttaatgacttaatgcattactgaggtgtcagtgatttagtctgttgtgtccttactgctgccataagacatgatttgtttggtgatgtgtggatgggtatttttttctgtgatttctttgtaaggacgttatccactgtaacccttagtatcccagatgtttctcaaacttgaatatgtgtaggaatcactggagggatgtgtatgtatgtatgtgtctttccaaaatggagaccccagccccatccccaaggatgaatgaatgcttttctttcttttttatattaatagactttgtattttagaacagttttagatttatagaaaaattga

SEQ ID NO: 193920 - DNA, 263 bp, Homo sapiens
tgaggaagccaggatgcgtagatctgtggcatgcaatagtatgagaggcggactacagagcgaaacctccaggaagaatctgtggataaccttgaactctacttgatggtgaaatatcttgaggatgcaaatgtactgagtaaaaatctatcaaagactttgttgttggtgatgagatccacttacttcacttgaattcaacaaatattaattgagttgtttcattggggatctacgaatcctgggtcctctagtcagccccg

SEQ ID NO: 193921 - DNA, 639 bp, Homo sapiens
taagaattcctgagtacccaaccctttgatatatagtcttgcagtatcctgccatcactgagaaggctgactaccttgcccctgaacttggagtacaaccatttaacttgctttgataaacagaaaattactacactttgcatagagatttcagatggcttccataatggggattcttcctctttccatttaccatgagaatatcacctggctagtacactgttcccagaaggagagtgagaaactaatgaagtcagattgcccccacctgatccagaccaaattggccaaactctaactactaccaagattcagaatttggtccatttcaaataaacagagccatccaccaaacccagcttaaaaaaaatgaaatccaacaacatgtgagatataaacatctaatgtagtttggagggtttttctcttgcagaaaaacataactgataaatcaactctgctaaaccaagagtgtgggaaatatgtacaaccttgttgtgtcaggaattcaggagccaaaagcaaaaacagatgggaaattgcaaaggtttgttcttgtgaggtcgataattaaggctagaagaaatccattggaaagttctggggttggaggataacatcatctcaaatttcctcacg

SEQ ID NO: 193922 - DNA, 205 bp, Homo sapiens
tgcgctgcaaatgcacccatcagccagccctgcagctgaacatttagaaagaggactgaattttcatactagagaatttaaaaattgaacaaaaggacaatccactcaaccctctggttctgcacagagctcactcatctgaggataacaaggaaagaacaaaggaaggaaaaaagaaaataggactgatggaacactgagttag

SEQ ID NO: 193923 - DNA, 122 bp, Homo sapiens
gtacacattgaggcccacataccacatgccaaatatttaaaaggcatatttctagctaaccactgtacatacatatattttttctcttattttcttattttagtttttttccttgacaacaa

SEQ ID NO: 193924 - DNA, 388 bp, Homo sapiens
tcaatgtgtgtgtgtgtgtgtatatatatatatatgcatacatacatacacacagaagcccacacaccttttctgtatcctacaggttttgtataatgaagtcattacctttttttaatcagataagttaatttacaagattaggtggctctctgcaaggaatcagaactcacaactcccaccccccacaacatggctgctagttctttaactgaaactttattttccatcaaccactacagttgactcatccagagcgaaagacagctccaccattcctaggtttagttattgtttctttgcggatactattgtttgtttggttttcctttactagcttccaagtgaaaatctggtgcagctagatccgaatggtgaaatccaggtt

SEQ ID NO: 193925 - DNA, 1164 bp, Homo sapiens
gcagagatcatttgtcaactatttgatcccagatttgaatttggggaggaagggaggagctactgacctgatgggaatatcataatccattcaaggaaatggtcattagtacctcagaggtgaagggaatatgtgaagctctggatcactacaaggagccctgacttaccagttggccccaaagtgcccaggctgagggcataggagcatgatgagatgcaaggatgtgggattatcaaggggcacgtctactaactggtgaaggcagtctgcgggggaggacacctaaaggtatgcggaaagtacctaacccagacctctctgcattaggagtggaggtgcaaagtgagcatctccagtgcagcatgggatgggaagatagggaggtgtcgcccactgtctcggtttagccagcaccacggctggctgtgtgcctgctactgtcagagagcaagggtcatctgtcctgcccagctatgcctgccaccctgttgctgactcagtattggcagaattgctgagatgggccaggtcatcacctttgcctggagtgttcatcctttcagtgccattattctggtgctaagtgctgaagaacattttcaggtctagccgagaatgtcctcttgctcttgcctgccaggcctgtccagatctttttggtacttaaattgagctaactccagccagagtggcttggaattcatagtgcggtggctcagagtataggctcgaaagcccttgagccagattgcctgggttcagatctcacctatactacttactaggtagatgaccttgagcaagtcacttaactgctctatgcctcatttaaaattacatacaactacatgtaaaagggagatgatactgctgcctacctacctacatgatagggctgttacggggattgaaggtgatcatacatgtaaagtgcttggcagagcactgcatgagtgtgttgtcgttattaatttgctattccttgtcctattcagaaaggatttcaagaggctggatgccttagatgtggtctaacttgaaaccttcatgtgggtgtgcgtctgtcttgtttattgctgtgccaggcacaaaataggtatttcataaatatttgttaatatgctcagagttgataagctggattaaagtgacttcttaagg

SEQ ID NO: 193926 - DNA, 342 bp, Homo sapiens
acatcttatttgggggttggtatagacgccaccagcactgcagggaaaaccaccccctaggaggggtgagacagagagaatgtgagattttgatcattgattgctctttctgaaaggcactgctgaccatagtaggtgtggtgaatgtttgtgtcactgcattgggtattagaacttttgctctgagcatgggctgccctaccctgaagagctgaatcttggcttctgacagaagctctgcatgactcattctcctcaagcatattttccttattttcctatgaaagtatctatagtttgcaacaagaactgtctttggttcaagtgtcagtgtactagaat

SEQ ID NO: 193927 - DNA, 542 bp, Homo sapiens
atccactttcatgatatctgctgttacagtaatatagacatactgtaaatgtattttaaaatatatagcccgtttaattccccagctataaatgactgagaaatagaaaaaagagggagagaaagagagaatattactttttccccccttgaagcaaatgctttatgaagatctcattggaatccagcaaatgattaatgtgaagattttggaggaaatctggggagctgtattaaagcctagatctcaggttcatttcgatcagccagccgtgaactctgggccgaattcattacagtttaatagtgctgggagaggaagaaaatgcaatttctcattccattagaaaactagaaaatactctcagtttgtccccctattaagatgtggcaggtgacagggccattctgggggacacggtcaatggaattacagcacactatttttgttcatataaaatattgaaaggcaagcctgactgtgcagaagttattttactgatttggtttttatgtaaataaaatattgaaagttaattaatc

SEQ ID NO: 193928 - DNA, 608 bp, Homo sapiens
gggacttccaaagatctttgagcatcaccaccttcaaccaaagatcactcttcaatatttcatacatcactaggcacagccagccagacagcaactattctgaaccacggcttgttacaagtgccaccatcttgcctcatgtccacatcaacaatcttctgaccctacatctggcttctcttcctgcccctgactttgacgaaaaggtatgcctaattcctttctaaatgttataaattaactcaacccctcgacctgtgcctcccccgctggtcccaaggggcccttggcttccccgactcccttgtatcttctccctgccttccaacagagagggcagcagcctctcccaactggctaattctacgccttgcctttgagggttacttcattcactaaaaccggttcctgctgcccctgttcatgccaccctatgatctggcttctctcctcaattggctctgggaacacctttttttataaattcttggtatctggagagatgagtttcaccatgttgcccaggctggtagtcatcaatttttatgggaccacttcatgcttggatttccactgtggggaaggatttctcaaagaggtaggaagtg

SEQ ID NO: 193929 - DNA, 769 bp, Homo sapiens
ggtggttttggtgaaacctggaaggattctgtggtcacttttcctcactgatgtatgtttcctccaaactcaactgtgtcatttgattagcatgcaagggtctgtgctagcaaggccagaacaaaaggaggttaaggggaaggacagcagttgtaggaatagaatatggccttggggagtccaagatctcctgggcctgggtatctgtgtgtgaacatcatctgcacgtatgtgactatgcttggggccctttaactgttgcacaggccaacatgtggcccccaagacccttatctgacaccttatgtgaaaactcagtggattaaagactaaacaagaaataaaggtatacaatttctagaagaaaacgggaaaaatttatgacattggatttagcagtgatttattggatatgacaccaaagacacgggcaacaaaagtaaaactaagacgacatcaggcttagaaacttctgtgcatcgaaggacacaatcaacctttcccttctgtgcagggaaaaggtaacctgtggaatgtgagaaaatatctgcaaatcatatatctgataaggggttaatatctggaatatatagacaaccaccactcaacagtaaaacaagtcacctcatttaaaaatgagcaagggacttcaacagacacttctctgaagaggatatacagtcagcactctatcgatgggttttgcatccctggatgtaaccagccagggattgaaaatatttttattaaaaaaatgtgcccatgctga

SEQ ID NO: 193930 - DNA, 198 bp, Homo sapiens
tgctgggattacaggcatgagccactgtgcctggcctgcaatgttatataataagaaaacacaaacatcaatgtattttaacatatttagatcagctcttaaatctcccaatttaagctttttaataaggaattgtaaattttgttgcagcataagctggagaaattctctactctcatctacccctacccttgttaa

SEQ ID NO: 193931 - DNA, 604 bp, Homo sapiens
ctcgaattcgacggtttctcgatatttacagaaaagactctgaccagagatcgagaccatcctagccaacatcgtgaaaccccatctctactaaaaatacgaaaatgagctgggcttggtggcgcctcctgagtagctggatctaaaagtgtgtgccaccaggcctgatgagtttttaaattttttgtagagatgaggtcttgctgcattgccaggctggtctagaactcctgagatcaagtggttctcccaccttggcctcccaaagtgttgggattacaggcaggagcctctgtgcctggccattctgcacttttctaaatccttttgttatgttatatctgtgataaatagtatatagctagattatatttatttgttttatttctttttacacttaatagactatgtcttttaatcagtaaatggaatccatttacattttttttattccatgtgcatttgctttgtattttttttaatctttcatgctttttattttgcttcttttcccccttttctgcccttattagatcagttttgtttcatgctctttttccataccctcaactctgtaagtatagtaatgaccatgagagacttt

SEQ ID NO: 193932 - DNA, 372 bp, Homo sapiens
ttaacctccagcatatttcatactcttctaaaattacgtacttgtctatcaaccttcccccaagtagactctaaattcctcaagtcagggactgctcataataggtgctcaacctgattcctttgcatgctaaatgttactgataacttctggcacatttccagacctctaagtaccctggccatcccatatgaccctttctctgccatgtactaattgactgggaggctctgctatggctgagatattttattgctcaaaacacacagcagggttggttgcgatcatctcgctacagtttgaaatgatggtctccaccgcagtaagagttaaaggaattgaggacttacactaaaattagctctatcttgc

SEQ ID NO: 193933 - DNA, 441 bp, Homo sapiens
aattttaaaaattaaacattgaaaggatgtgcaagtctaaaagggctcaacagggttagaatcctgattcgaacatatcaattcactctcaagcatcactttggtctaaaggcgaggaggaaggcaggcagtaaagggagaaaaagagggagatcattgaattactcaataaaagaggctacttaccatcccaacccattgtaagacatacacttctgacataagagaactccttagaggtcgaataaagcgtgtaagcacctttgagtaatgcacctgcccccggagagggggcccggaagcccaacgagggcttagcgaacagacctttgctaatctgtttatttccttgaactggagtcgggctgcgatgggctgcgattcccaggacgatacatttaattagaacaaaacagaaaaaaaaaatgttgtaaaagctca

SEQ ID NO: 193934 - DNA, 776 bp, Homo sapiens
catctgcacgtcttcccagcaaaatggaaagcgagcattccccatacaaaaaccaagtgcactagacttccagccactgggctgagctcttcccccaactccgactctccaccgctcccagctgtcctaattgaaactcagagtggaataccaaggtctttttaaaacaaacaaacaatattcaaacttctcatcaaggacgcagttgagaaaacagcaacagtttgttgttgagccacaaattaagcaaaaccttgcttctgacaaaggacagaaaatgtagaggatttctacaatccaaagaacaaaacagcccaatacaaacttgaaacatatttgaacaggcatttcccaaaggaagatatacaaatattcaataagtacatgaatgaatgcccagtgtcattaatattagctaaaaaggacatgatgggggcaactggtacaatgtgaatatgcactatggattacaaaaattatatcaatgtgaaatttcttaatttgataattatactctatataatatcttgtttttacaaaatagatactgaaataggcctatcatactcaaaaggttgtgaagaaatggtgtatgtctaccgtgtatttataccttctctacatgctattctccctctgtctctctctctctctctcagcaagatgataaagcaaatggggcaaaacgcaaataattgctgagtctagttaaggagtatagaggagtttcattctctattcttgcaagttttctttaagtttaaaattatacaaaa

SEQ ID NO: 193935 - DNA, 231 bp, Homo sapiens
gcttaaaagctttgccacattcttcacatttgtagggtttttctccagtatgaattttcttatgtatactaaggattgaagatcggttaaaagctttgccacattcttcacatttgtagggtttcttatcagtatgaattatcttgtgtttagtaagggttgagaatacactaaaggatttgccacattctttacatttgtagggtttgtgtccagtatgaattctcttat

SEQ ID NO: 193936 - DNA, 740 bp, Homo sapiens
gtccattttaaaggtgacccaagccattaacctataagttgagcccaatactaatgtaaccccagccccccacagtgctgtgaaggcacctttctctaccctggaaggcttcacaagcccaacagtacagtatttcacactgaagtaggttaggactgggcaaggaacaagaaagtaggtttttggtgggtttcccagacagcattgaggctactagctcagttcccaaacttgtgttagatagaatcagaaaaacaggtagttgtgaaggaactgcagcgagcaagactggtttatttacatttggatgagggaggtagaataagtcacatgaaaacaaaataaaatgaaacatggaagagggaaagggagacaaggatggtccaggcctgggatggacagactttacagtaaccagtttaggagctgagagagctacttcaggcacctgtaaggcagaaatattgagaaagaaagggaatgagggttttaagaagtgttcctacgggttgtgaattggactgctttgacattctttgagacccaacagtatagattcaaattctcttcaataatttttggatgcgtgtctctgtgaatgtgacctaggtgtctgagctgaaccagatgggattctggggtggttttgttttgctttgttttcaactattttatttttaattctggtaagaaatacataacataaaatgtgccatcttactcatttgtaagtgcacagt

SEQ ID NO: 193937 - DNA, 355 bp, Homo sapiens
aactccacaagcaaaccatggctcaaagtttgtagtaatctttttgaactgtaactattagaatttcccaaaaatctaataaatatgcttttctttgtataaaatgagctatatgaatatttgctgctacttgaattttctttccaaaatttgtttatagacatactccctaaagatgtttgataatcagaaataactgattctgctagacaaatatgcaccaattgattgattttctttattttgaagaaaatttttttcctcttaattatttggtggcttcctttgctggcaaatccaattttatgccccacaaataatgtgaacagtagagacttctacttgtaagtttcgg

SEQ ID NO: 193938 - DNA, 216 bp, Homo sapiens
actaagcaaaaacaacaaatctggaggcatgacattacctgatttcaaactatactataaggccatagtcgccaaaatagcatggtactgatataaaaataggcacatacaccaatggaacagaatagagaacccagaaataaactcaaatacctatagccaactgattttcaacaaagccacctaaaacataaagtgaagaaggtaaaccctatt

SEQ ID NO: 193939 - DNA, 392 bp, Homo sapiens
gcgatgatcaggcaaggtacgtgggaaggggcacagagcttccatgccctcctagggcaccaccctctaggaacctccacatgtttagccatccagaagctcatccgaacccagttactttggggtttgtggaagcttcattacataggcatgatggattaaatcactggtcattggtgatcaatttaacctttagcccctctccccttcctggaggttggggagctgaagttctctgggggcccccagccacaaccatctaagacacgtattactttggagaatccaaggaatttaggagttatagctgggaaatggggagaaaggccaaaaacatttccacaatatcacacccgtccactcagtgctttcatcagtccttacgggaactc

SEQ ID NO: 193940 - DNA, 763 bp, Homo sapiens
atttcaaaaatggtgagcctcactaaggtgatagcagtagcctgtccacaggctgatcaacaaaatcttgtctttgatccatggtttctgcttcttggagtctcccaaggtacattctgccactgctggacctagaatcatagtctcctttcctaccagccttctcaccctgccaaacttatcatatacaattgtttgacatcacagatattatcaatccctaggcctctctagctttctgctcttgcaatttcttttacattgtctttgtcacccagcacagagcccatacataagtcatcactctattttcttagaaatactttcagttcacttcttggttttcctatctcacttaccaagctgtcttagtacagatctaagatgagaattttagtacaaataatttattttggaaacaaccccatgaaacactggtaagggagaaaggatggaaggcagaaaagggaaataagatagaatgtttgcaaagataaccatcaatagttcctcaaagccttgctctagcatgctgctcttcccatcaagaggcagagtttgtttcccccactcttgaatctgcactgaccttgcaccctttttttgaacaatagattgcagcagaagtgatgctatgctagttctaagccaaggctgcaagagtcctggcagcctcttcttttgctttccttagatgcagataccatgtaaagacgctcagaactagattagtgacatgatgagaagcaatggggagagacag

SEQ ID NO: 193941 - DNA, 153 bp, Homo sapiens
cagccttggcttcccatgagaatcacctgggggtattttaaaagcctccgtttgttgaggcagcacctctgagcacttgaatgagaatctgtgggcagggcccaggcggcagcattttgaaagctttttcgaggattgcattgtgcagacggg

SEQ ID NO: 193942 - DNA, 361 bp, Homo sapiens
agtgatctaggaggagggagtaggtggtactctcacaggtagccagtgtcagcagggtcaaggcagacatatgcctggaagtaaccacctctcagcattctaaatggaatcaagtttgtaaggcagataatgacacttagctgatgaactacttctatcagaaaggccacttgggcagccctatagaaacagtccaaacattaattgcagtcagtctcttagtctatctgctcccagggggctatgaggagcagaggctcctgaattcatggcccatactcacaggctttcttggccatcatcattcacattttctgtaaatggtgcccccatgccaaccctgaccactctcttgtgtaag

SEQ ID NO: 193943 - DNA, 270 bp, Homo sapiens
acttagtcttcttgagccgccatttccttatccataaatgagaataataattgtacttgtatcttaagactatgataaaggattagagattgaggtaatacatttaaaatgtttaggacacagtgcccagaaagtgctcagtagccagtggtttcaggtggggttgggatgcgttttaattttaacggtaatcatgtggaatgctgaatctttgtggccagttgaaggcaaatgcataggtgtgctttcacaattagctcaggtgtaaga

SEQ ID NO: 193944 - DNA, 384 bp, Homo sapiens
tataatagaaatcatgttttatctggacagaaataaatgacatttgtatatttgccaagttcagtgtgaagagtgagcctgcaaaccttgtataaatatagccataatcagatgtaatgttgaccattcaatgtgcatttctggctttgcattatttttatccatgtctttgtgaaaattggacaattgagatttctaaagataaaggtgaagggcataattttttagcttattttgatgtatctttaaatcatgcctacttttgttgtgtggagaaaacaatgaaatgcattaaactgacgtgtttggcttttttttagtttacctatttgtgtattttgctacttatttattttgttgttgttactagatttccagcaacat

SEQ ID NO: 193945 - DNA, 510 bp, Homo sapiens
  misc_feature (13)..(14): n is a, c, g, or t
ctcactctagagnntcccccgaccttacagatagacttttactcctaggctacaaacctgtacagcatgtactgtactgaatactgtaggaaattgtaacatcagatatttgcgtatctaaatatatctaaacatagaaaaggtacagtaaaaatgtaaaagacttttaaaagtggtttgcctgtatggggcagttccattacaatcttataagaccatctttgtatatgtggcccattgctgactaaaagtcactgtgtggcacatgactatatacatttatgtgtatatttttgttttcttgtacagttcctgactcgtggcttctaaaacccttgtaattttctaagtgatgagagcgattggtataccttttgttaaaatatttcgccctttgtcttgggcttctgaaacaggtgcaaggtgaaagttgtgtctttggttgtacataacaagcctctttcgactacagtgaacttattttaatgatgtgatttttggaaagtccct

SEQ ID NO: 193946 - DNA, 548 bp, Homo sapiens
tttccatcgcatacaccaaacgttcctggttttggagctggagcccttctactgctgtctggagcccgttctgcaaaggaccctggccctgctccagtgctcgctctctcagccaaggaactgccctctccctctggtgttgggagatgctcacatctggtctctccgaaaccgctggctgagcctggctggtcccttgcccccaccggcccctgccccgactatgcatctcctcccggtcacgtctgacagctacagggacaaagacgggctttcgacattggttgatgctacttggtcctgagggggcagcgctcggaggaggggctgcacgaggacacgtccccatggccacgcccctcaccaggagcccgcaaccgcgttgagagggctgcgcacttgtcagcacaaccgactcgacactctcagaggctcaggtgtccaggggctgcggccgacagggacaggctgggtgggatccgggtgtcggccttcacttctctcagccgtgctggcctccccagcctgcctcccgcccagcgctctct

SEQ ID NO: 193947 - DNA, 212 bp, Homo sapiens
gtgcatcagtaacgtttaaaatacattacccaaattatcaagatatagtgcaaaatgtgtgcaatcattcacgtcttaaatgtgtcgacggtggacttggtggaaaaattatgagacatgataaagtattgtgccagaggcattggcctaagaattttagatggagttaggtatttgggacagttaggtatttgatccacatctctttctgg

SEQ ID NO: 193948 - DNA, 210 bp, Homo sapiens
tgagtataatagttaattaaaggaagtttagtattgctctagaagattacagggctttaaaacatagttaactaattctgagctttagaagtaagtcttttatagaatttggctgggattttcctatttgctagtcctgcagttctagaaatttgtgaggtaaaaaaacagtttcttttcatatttacccattgatattaatggagaatc

SEQ ID NO: 193949 - DNA, 307 bp, Homo sapiens
  misc_feature (25)..(25): n is a, c, g, or t
aaagaaaaagaaaaagaaaaagaanatctgaggacttaaggctgggtctgaagacttaaggctgggtctgaagtggagattagggagcctggaatgggaatttggggattagagtgctatcgttgggtctaggcggaagaggacggaactggggggctctgagattggtttggtcggaggagcggggagagtaataagggctgagtcggaggcgaggattaggggtgactgagggggaccaagagctagatctggtagaggttggggggtttcctttgagaggaagggttggggacatccaggggac

SEQ ID NO: 193950 - DNA, 641 bp, Homo sapiens
ctggctaatttttaaatttttttgtggagacggggactcgctttgctgcccaggctggtcttgagctcctttgctcaagtgatcctcccgcctcagtctcccagtgttgggaatacagccatgagccacggcgcccgccctcttgaacttgttctgggctctagattgacaggaatgatattgctgacagcttgaagtgctgattggcggcttgctgtgtgctcgtttgtggttggctttgcgtggcctgccaccttgcactgtggacaccacacatgggccaggcgtgctctcttcacagacagcctcatcctgtgtccacccaaggacaagcaccagcacgggccaaggccccagccttgtcacagcggtgctgttgcccctggccaggtatgggcacctgggccagtgtctcagggaaactgaggaagttcttagacatacagtttcggagttacattcatgctttttcagttctgaggggtcagttaggagtgacgcatttcataaggacgaacagtggaaagttaagaatcaagttgacatgcaaatctgtggtttattgttcgagtgtgtccaaccatgtttatttagacgcaatcttgtatctaagaagttattccaaaactaacagtaggaat

SEQ ID NO: 193951 - DNA, 617 bp, Homo sapiens
ccaaatctcagcaccaaaacaaaacaaatacctctccctttcataatcctgaaatcattaaacatgaattacaatacttatgacaatccctaccaaaagaactggcaaacaggtcaacctggtcagcttttaaagttctcaagaagtctattacctaagagcaagttcaatttcaaatttagaggaaggtaattctggccttcttcggtccaaggttaacttcttagaaagtaacttctttattatatctaataaatcttttgatatttcttttataactatgttggccaattagcacagctgattttgttggtttaaagacttcaagagacttcaaactactatgagaagtcctatacaaaacttacattatccagactgttaaaaactagtctaggtgacagagtgagaccctatctcaaaacaaagaaacaaacaaaacaaaagcttagaaatactagggataaaaggttaaaacccagcaagcttaaagaatactttatacattctttaaagagaacgtgaatgccaaagaactaagatcagtggtgccaagaggctaatcaacatagaggaagaaaaagagaagttaatcttgagcttaactgacaaaaaaa

SEQ ID NO: 193952 - DNA, 523 bp, Homo sapiens
ctgggactttggggtagggactgaggaagcttctggaactcggggcccctagaaggaagtacccaggcagtgtggagctctgttgtgtggccctaggctgccaaaagatcttcatagtacaaggaggccgcagaagtgctgctgtctccaaaatgtgtccccagcatagtgccaggagccacactgttgggtgttggcttcttctttgcctccatgaaatcttctgggaagtaaacatgagccaggggtgtcttaaaggagaccacagcatcaagccctggtcttgctgaactcagagtgacagccccgaaaggggacagtgccagcctggggctagtctgaaaaaagataccgagacgagcaccccttgagaggcaaggttgggggcctgaacgaggggctatggagggttggcacagtcctagagacctttttcttattcagaaaaaggtctgtgcctgatttcactttgttttgttttgtttgaaaccaagtctcgatctgtcgcccaggctggagtaca

SEQ ID NO: 193953 - DNA, 519 bp, Homo sapiens
catccagttcccctacctggaggcattcactcatcatttgtctgtaagttctcccaaacatattttgtgcatatacaagcaaacacacatatatatgtttttaagtgactagagctcccctttttatgcaaatagaagcatagtatacatatcgttctgcaccttgctattgcactaactatattttggagattgtttagtagcagttcatagagaactttgtcatcttggtaactgctgcatagtttttcattgaatgatacattttcatagtatgttcttggatattttcatttctgttttcataaacaatgttgcaaggaatgatagtaggttagaggatatatagtattgaggattctattcataactgaattgctgctttaaagggaatgtacatttatgattttagtagtatcctcatttgcccccaatagatgttgtaccaatttatattcctaccactagtgtattgagagcgcccgtttccccacaatctcaataaaacaagtgtgttat

SEQ ID NO: 193954 - DNA, 201 bp, Homo sapiens
tagagatgtggcttcaccatgttggccagggtggtcttgaaaactccgacctcaagtgaactgcccacctcagtgtcccaaagtgctgggcccccttttattgtattttattttattcttgttaacattttttaatagaggcggggtctcactatgttgcccaggctggtttcaaactcctggactcaagtgatccaccta

SEQ ID NO: 193955 - DNA, 376 bp, Homo sapiens
ccagggcctgggggagagggaaaggggagttcgtgtttaatgggtagggagtttcagttttgcaatgtaaaaaagctctggagatggatggcggtgatggctgcaagactatgtgaaagtactgaatgctactgaactgtgaacttaaaaatggttaagatgatacatttcatgttatgtgtgttttaccacaataacgagttgaaaaaaccacataattacaatatcagcatttcagcttccagcgaattaatagctttaggaatttcattaagttcacaaaaagagagatgaagtgacattatgtgtctcctgattaaaggacacaacacaatcaaaggtcacgccaagcagatcaaacatggattttatccag

SEQ ID NO: 193956 - DNA, 467 bp, Homo sapiens
gtaggactaggggcgggggcaataacccactgcccccacattgcctggctgcagatgctcatagaccagacaagcaccttagaagctcccaccagcatcctccaggttggaggagccgggggcagagatgggaaatgtatgcccttgcttggggcaagatggcatcagtgtggtcacagtgggagcctgcagggcaccgtctcctggctggcctggatcagaggtggggcggagcagatgcaggtcaggcagcagactgcctgctcagtagataaatctttctgcagacctttgaggaatgactcatcacttatacccaggtggggaatttgtcttccccttgcaggtctaggttaagaaaaacagagagagggtggcacatgattgagagcttttgatgttaagtttccctgtgttaccagcccaagaaaccctccggtgacgggcaggcctgctcggggacagag

SEQ ID NO: 193957 - DNA, 438 bp, Homo sapiens
tgtctcagcctcctgagtagctgggataacaagcatgcctggctaatttttgtattgttagtataaatgaggtttcgctatattggtctggttggtctcgaacaactgacctcaagtgatccacccatctcagcctcccaaagtaatgggattacaggcatgagctaccacacccggccttcgtttttcttttgacacagggttttgctctgtcacccaggctggagtgcagtggtgcagtcatagctcactgcagcctcaaagtcctgagttcaagcaatcctcttgcctcagcctcccaacgtgctagcatctcaggcgtgagccactgcacctggcccgaaaccaagctttctcatcccaagcgccaacctttatcaagtctagcctagtcctctatcgtctcctaagtgtccctcatgagtgatcacttctgag

SEQ ID NO: 193958 - DNA, 332 bp, Homo sapiens
aacttggtggttcgtaggagtgccggtcaagcaaactccctggagtctcttttatttattattattattatttttttttttggtgggggggcaggatctcactctgtcacccaggctggagtgcagtggtgcagtcatagctcactgcagcctcaaagtcctgagttcaagcaatcctcttgcctcagcctcccaacgtgctagcatctcaggcgtgagccactgcacctggcccgaaaccaagctttctcatcccaagcgccaacctttatcaagtctagcctagtcctctatcgtctcctaagtgtccctcatgagtgatcacttctgag

SEQ ID NO: 193959 - DNA, 368 bp, Homo sapiens
atgaatcatggggacctgtctttcctgtgctattcttgtgatagcaaataagtctcatggaatctgatgggtttatagagggtttccgcttttgcttcttcctcatttttctcttgccaccaccatgtaagaagtgcctttcgcctcccgccatgattctgaagcctcgccagccatgtggaactctaagtccaattaaacctctttttgttctcagtttcgggtacgtctttatcagcagcattaaaatgaactaatattagtactcttttctgtgggtatcctgtagaaatcatttaaaaagggaaaaatctgtaacttgtcctgcacagaattcattgctccaactctctgcattgtccaactct

SEQ ID NO: 193960 - DNA, 247 bp, Homo sapiens
tagttcagatgttgccacagggaaaagctgtaacacagaattaaaggtacagatttaaaggcttggatagtctttgtcaaaaggggttcttaaactcaacttggtggtttaaaactagcaattaaaaaataaatgactaggacagagtagaaaatatcagaatgcatcaaatgtcataaggctaattatgagcttgagaaacttttgtttctattatatatatgtacatacccacataagcaagcat

SEQ ID NO: 193961 - DNA, 727 bp, Homo sapiens
caaggatgtattttttatttcttttttttcggggggagagagtttcactcttgttgcctaggcttgagtgcagtggcacgatctcggctcactgcagcctctgcctcccaggttcaagtgattctctgcctgagcatcctgagtagcagggattacaggcttgtgccgccacacctggctaattttccaccacacctggctaatttttgtattttttagtggagacgggggtttcaccatgttggccaggctggtctcgaactcctggcctcaagtgatctgcccgcctcggcttcccaaagtgctaggattacaggcatgagccactgcacccggcccagtctgtgtacagctttgccctaggctttactccctgcctgcagggaggatggagaggagccacagatgaaagctcagcatcctttctcaggtctattctgagaatgtgctctgcactcagcatgtgcatggctactgaaattccatagtacacatgggcaggtctgaatttcagtacccgaatttcccatagaaactctccacaacttctcccatgctgttagcacgcctctagtttgcctcaactgtaatcttttgcctaggcatcagtggggtatgcatttgatttacagtgttttcaaggaataccctctgtgtggccacttttctgccctacgtgagttctgggttaggtgaaacaaaggcagatcagtccttttggcagccc

SEQ ID NO: 193962 - DNA, 190 bp, Homo sapiens
cctcacctgccctttcccccatcacagctgctgacccagaagacaccactcatgtccctctccctcccagtagctgccaagacggcctctacctctgcccacacctgccagaacattccattcgcttccctgcctccattcatcccaagatctgaggcgctttacaatcttgacgtttcataatcagacc

SEQ ID NO: 193963 - DNA, 146 bp, Homo sapiens
tgttcatagcagcatttttcatagtgaaacaggttaaaggttatgtagaaacaatacgaatgtccatcaagtgataaatcaataaacaaaacatgatacatccacaaaagggaccagcttgatataaaaaggaatgaagtactgat

SEQ ID NO: 193964 - DNA, 482 bp, Homo sapiens
gattgttggtgactttgggattgtggtggtgccccgggatgcagccgacacagaccgaatcatgaatcactcctcaatactccgcaaatacaaaaacaacatcatggtggtgaaggatgacatcaaccatcccatgtctgttgtcagctcaaccaagagcaggctggccctgcagcatggggacggccatgttgtggattacctgtcccagccggtcatcgactacatcctcaaaagccagctgtacatcaatgcctccggctagcagcccctcgtcctccggcaacacaatggcccctccatctttgtcagccccctgtttctctcctgcctctctgtttctccatctcctcgtcttgactgttttccctacttgctgacttaaccccccatagtgtgggggacctgcagagaaccatggcattccctattccacagtcatctttggacagactttcctctagtctccgggttgggggtgg

SEQ ID NO: 193965 - DNA, 186 bp, Homo sapiens
aactgttgttgagcccagcactctttacttctatcttgttcaaccagagttattgagggttttctgtcacattcagccttagctcctaagatattgcattatcccagttatcttcctatgtttctttccccttgtgcctctaaacataagctctactctttaaaaaaaaaattattattattattt

SEQ ID NO: 193966 - DNA, 406 bp, Homo sapiens
gcaggtgggcactcatcctatagtgagacccagacccatcctctggcagctggtgactgcggcaactttctgctgccacccacaggaacaagcatctctcctcccatccccagcccttctgccttcacctgtagaaggaggcgctgcaggtgtgtgctccttctcagtttgcaaactgagcaaatgataagacttctaggatacaatgtcatctgggtccaagcagaaccgctggttgaagctttggggaaaagacattccatctctagttgaggctctgctgcaccccttggacctgggttgaaaccttcacagccccctgaacctcggggtgatagcgaggtgacatggtggggctttcatgtagctccatgatattataagccattaaatactaaacttaaca

SEQ ID NO: 193967 - DNA, 240 bp, Homo sapiens
gagtttctaggagagtggaggaggtagatgtttaacaacaaagaactttgctagatatataattacaaattatgacaaatgccatgaaggaaagagtagaggattctgtgaagaacttgagatatggatttcattcatattagagatagagggaggtcttggagggagtatttaagctgagatctaaaagatgtgctggaattggctggtggatgatgaaagggaaataatggtctaggt

SEQ ID NO: 193968 - DNA, 370 bp, Homo sapiens
acttttggataggagatccatgggttgctggtgacctccgtgttcttgggtaaggacccctaaagctacccccttatttatgttaacagaaaggtgaaatggcttttctagggaaggcaaagctaaaacagaggcagttataagcagatgttttagctcctcaacctggtggagttcttcagaagtccagaggagagggtcaggcttttcttgggtgatttttaggtagagaggctttatgacaagggcatatgagtcaatccataagcggcaatatccagctatccctaggaattttctgagttcttgtttagtcttaagcaaaggtatggatacaatcctttcaaccctctcaggccctatccttcgt

SEQ ID NO: 193969 - DNA, 204 bp, Homo sapiens
cattgattaattttggcaagctgttagcagtggagtcccccacatttcttccatgtaaagccctgatcatcttggctgtaaccactcacttactttgaagcgtcagattcagtctctctgctttctaagaccagggatgctatttaatctgggcattagaaaattcagttggccaagtgcggtagctcatttctgtaatcccag

SEQ ID NO: 193970 - DNA, 390 bp, Homo sapiens
acgaggagacaatacatttctattgttttagctgcctagtctgtggtactttgttgcagcagccgtagccaactaatacagtccccgagaagtcacacttaagcaaggcacagccattcactaagtgccagagcagaaatatagccaagaggatgtgaaactgccagagagtgatcagagtagagtgcaagagcgaaggaaagtgagcttccaagggagactggaagtgctggatgctgtgtgggaactggacagttgccggtaaagaatccccttggcagggagagctggaagtaaagaatcgcctcggtaaggagagctgctagtaaagaatcgccttggtagggagaactcctggtctgcctatggtgtgggacttggtagagccat

SEQ ID NO: 193971 - DNA, 357 bp, Homo sapiens
atcagcacatatctgtgagctagaaacacagagaacaaaagaacaaaggccaaaataaagttgataaagattctgtgtttaaaggtgtaaactatgagctgctgtaggaaggaagaccagaattccttttaattagcatatctgtcatccaatgaccattctaaatttaaatgagcttggatcagctgaaagataagatttagaaccaagacaactacaaaacaaaagattaaagaaagtactgtcaactgctacttgggtgggacataagaacagcatctggttttctaaactctggtaacaataatagaatgatgaaatgtatttcaggaagataggaaaagcccagtctccttg

SEQ ID NO: 193972 - DNA, 458 bp, Homo sapiens
atggctctgcccctgggccgtgggcgcctgggatggggaggtgtgagcctgacttgagtcctgccgattcttcccagctgtgtggtggggcagcctccactctgaccgagctgcaggggcgcctgccctcctgctccccagggcctgctcctagaacactgaagtcaggcccagcggtgggggcctgtttgctgagcctacaccctggggagctctgggacaggccgggtgtgctgttctgaggtggctgaggactaagaggagggacccatctccagctcagcatggcaggggacaaaacgggcttttggccccgtcagcagccactttcctgtgttagcttccgggctgggaccccagaagcagggaggttgacctgcattctcctcagggtgtcacatctgccagccacagggacataaacaggaagctctgccacgcagctggctgggtgcttg

SEQ ID NO: 193973 - DNA, 1100 bp, Homo sapiens
gagtttattacagatattttgttcttgacctttgacacttgccatttagcaattgcatggttttacttttgtggttgtagagtttctgtttttctttcattagaatgatgtaagtagaggaatagaaactgttatatttgcaaaaaaagagcaaagatgctttgtgaccttgggaattatatttgaaggttactcacaagagaataccttgtttaggaaagatggttaatttttttcttgcaagcagacttttttacaaaattagttaatggcaaatgtgttctttgctgaatattaatctatagtatcatttaagatgttcttaatttatgtttctggactttgtttaaatgtcaaactctagaaagggtaaactagctcaccccactgctaggtaatagctagtattgtcttcgctgcagggcattttacagtaaaattttgaagtatattgaaaaaagttaccagttcacttactatacaatagcttggaatgtgaatgtctgaaagaagaaaaattcaataaatgactatgtagttatttggtggaattcacaacataataacaagaaaaggttttcagctttgatcataatggaaatgagtcatttaattttaccctcagtcctggtacacagtttcagcacctgctaagaagtcggcttgcatttaaatgacttaggcaattattaaaagcaagtttcaagaaataaatggcatttatataaaaaggagactgggctcaaactgctagtgctttaaatttccataaaagcaaattcaagttcagaacaggattcaggatttagtaacaattcaaaggttttcaatcccttaatctctttgtgataactatattcatcatgtagccatttttaaaaggaagagaataaaaatgttaacattgatgtctaccagcacttgtgactgaaaaattgattatatatggtaaatacttatggctccaaatagctatttgatttataattttggtattgaaatgtaatgaaatacttctattgtatttgcaatcgctggaagagtagtatgaatcatacttcaaataaaaatgcttctttttatcatttttcccaaatgtt

SEQ ID NO: 193974 - DNA, 185 bp, Homo sapiens
atccctgaagccccagaagcagtataatagtgtccttttagttttgccatccatggtgatttaagtatgaacagctcagtggagggtcagtgtgacggccttttgcgcctgcatacctggcacttgtattgtccggcgtccaggaggaatgtgatcacgaacgaattagagatggtaaatgtggg

SEQ ID NO: 193975 - DNA, 208 bp, Homo sapiens
ctcagactgcttctgggctcaacaagtttttatttatttaataagcagtttctgtgtgtcagcactattctcaatgcagatgctgtttaacactcttatgaatttatttctcgaggcagtcctatgaggcattaccattatccccattttgcagatgaggacaattgagacacagagaagttgagtaatttgcttagggtcctttaca

SEQ ID NO: 193976 - DNA, 220 bp, Homo sapiens
gtgcttattcattacagtagcaataggaaactaataaatagtaaccataatctagggtaatcctacattgtaaagctggaagaacgctagacaatatatatcagcactatgggtactgtgtagtatactaaattaaaaaagcaaattcgggcctatggagtaaaaagatagtggcatgtctacaagtataactcagcattccacatagttcagcgtctga

SEQ ID NO: 193977 - DNA, 737 bp, Homo sapiens
cttttgggcccttggagataaagatgaaatggtccaggctatgtatataacgttaatgtaaaatgccacacatgcaacatatttagggggataaagagagaggctgatatttttctttcttcttacatcgataaatcatccctatacattcaagcaagtagcatatgctttcagttcatagaattagctgtgtaagcttcctggagcaatacacagatgtaacagcataggaatatggggaaagtaactacaaagagtgatttctaagggctctctctagctttgctcaggagctggtagctattttggcaagaccagtctttgaagagacacacaaaacattgaatctgtcagggggttgaggtaaagtctaggcagtgtagatgtcgctcccaagttgaggtgaggctgtccttcaccacaggacatagtttccctagggagacagttgctgtgagatcaacatggaaatgaatatgaacatgcagaaactaagtgacaatgtggatagtgagagtatgtgtgtgtgcctgtatttatctttgtgtgtgtatcactgagtctgtaacgctcctttacaaagagtgtgacactcttgctactcgaccttagagaatctcttcgcctccagccccagactttcaatttctttatatataaaacaaggggataaattagactgagtcagcaaactatggtgtgtgaaacaaatctggcccaccacctgtttctttttt

SEQ ID NO: 193978 - DNA, 496 bp, Homo sapiens
aagacattctgtccccttatttccagagaactgtgcacacatgaccacatgtcaacagctgccactctgcactgaaatgttctgtcctatctgaggcaccagaaaccaaagagagcggcagggtggtggttgaaggagcgtgggctctaagtcgggcagagcaaggtatgagcctgatgggttctgcccttcaccgccatgtttttgttttttcttaatttatttttgagatggagtttcactcttgttgcacaggctggagtgcaatggtgcgatctcggctcactgcaaccttcaatcacctcccaggttcaagtgattctcctgcctcagcctcccaagtagctgggattacaggcaccagccaccacacccggctaattttgtgtatttttaatagaggcagggtttcaccatgttggccaggctgatctcgaacccctgacctcaggtgatccacctgcctcggactcccaaagtgctgggactacaggcg

SEQ ID NO: 193979 - DNA, 353 bp, Homo sapiens
taacccaaatttctaccatgtgcatataggataaagagaaggaaggaaggaaggaaggaaggaaggaagtaattaaggaattccctcagtaagtagcagcaaaagcacaaagaaacaagtcatttgctcccatgttctagtttgtgtaaaagcacaaaaaaattgatgtaaaaaaacttacatattccacctagtaaagcaaatatcctactttctcttttcaagaagcagcaggaaaagatcacttatgtaagtgataaccatcaacaatttgtaatatagagtataaattcttcagatggatgttgctgagaggtgtaaccttttgtgggttaaggatggaggaactgagg

SEQ ID NO: 193980 - DNA, 706 bp, Homo sapiens
tctgagaggccgcccgtccaccctgctttgcacggacagttcttgtgtctgcctttcgtaccagggaaagcttacaggtgcccactgccctggaggaagctcccagcacaaatgctaagtgtctcctcaccctgggtgcagctctatggagacagaaactgggagggcctggcgatttggtcacaacgtgtaaaggaccaagaacaaagagtggtttcaagttcctaaacttttggaggaaaaaattagaatagtggctacagcgaacaagtgcaggcccctgaccgcagcagcaggcttggggctctcaatgtgtggcgtgggccagcagatccccagtgaggaggagagagcaaccacaggcagcacagagctggccacaaacgataagggcagaggtatgtgaaagagggagccattcccaacccaacactggggagaaaagaatccctcttatttgaaataactgtaagagataaactgcacaagagcctccagttatcttccgtatttgccataggtcatacagtgtcgcttctgctgaaagaggaccacaaaaaggattctgctgcaactgaaaactcaagatgcaaagggacctgccccaacactctgcgtaacagcctgggcaacatgtcaggactccatctctaaaaaagtaaaacaccttcgctggcctacagcacatgtctgcagtctcagctac

SEQ ID NO: 193981 - DNA, 576 bp, Homo sapiens
gtagagacagggtttctccatgttggtcaggctggtcttgaactcccaacctcagatgatccacctgcctcggcctcccaaagtactgggattacaggcatgagccaccgcacccggcttgtattttttttatagagatgggctctccctatgttgcccaggctgatctcgaactcctggactgaaacgatcctcctgccttggcctcccaaagtgctgggaatacaagtgtgagcagccacatctggcccaacttgcataaaaccttctaagtaggcggccacatttttttcaattactttccattgctaaaatttctctggtcaatttcagacacaatgactgacaggccagcctgctactcatagaaggtctggctacagaacatgagaagaacaggtaggtgccagcaggcttccaagtgaaaggaacaccattttcacttcaattatttatccctgcttgaatgtaacatcatcaaaaatcaccatgatagataaaaagaatgtaacggtagaagtaaatcttgtcattggaagtgataatattgcttttctgagaaactaaacataactg

SEQ ID NO: 193982 - DNA, 393 bp, Homo sapiens
ggggcttacagaatcccaagacagacaagcattaaaagtgcctgcggatccggcaggaagccaatccccagatgttacttttggctgggaagggtgaggaggaagcggtggccttgctctggcttaatctgcagtgacaaccgtggcgagcatgagtcactctgggcctcatctgaaccctatcttggcatcttgcttgtggagaggcagtgctgtataatggttcagagcaggctttggaacagactgcctggacaagctacttaattgctctgttccttagtttcctcatctgcaaagtagggggaaatagcagcacctacctcgctgggttgttgtgaagtttaaataaattaatacatgtgaagtacttagaacattgcctggcacatt

SEQ ID NO: 193983 - DNA, 102 bp, Homo sapiens
atcaataaagaccttgggaagactcaattgggataccttggcaccatcagttctggttgcctatttgactgaatccatttcctgcttctgcatccttacact

SEQ ID NO: 193984 - DNA, 522 bp, Homo sapiens
gtgacaatgatatgtttgcagactaacacattcgtaagaacagcagaataatgagctaatttgtaacgtaccagatggaatgtactgaaagctagtggcctaagctatcataattgtcctttataatccaagaagtcatttctagtaatcttgctacccacaacattgtttttatataaacaggtcacagtagaactaatcctcttcccgtgaaggcaggcctctgttatttcagtgtgcttgcaactggggagctgctgcagtgtgtggttctggtttgcttttttttttttaactcctatgtctgaatggcaccctataatgagggatcattaatcttaactgttctgtagcccatgtcattgttgttattttcttttgaagttgtttcttccgtaatttacacacatttaggtatattcaaatttatacttgaactgtctttctttttcctctatgtttgtgtgttccagctcactgaaataggaactgaatcctcagcactttgagactgcccatccc

SEQ ID NO: 193985 - DNA, 538 bp, Homo sapiens
cagtctgtctagcctggacaagagagcaagactctgtctcagtaaataagtaaataaataaataacatacaaatatatgccaaagatttatttaactcatcagtgagggagctaacaggatgacagagcggcttaaaggagacagtgagagactgaagccagtaaaacaaggagggctggaataagattgctggctgcaaactgcttctacagagcaataaacttgtaaccttcctctggggactgtcttttctaccaatgagaagtcatcagccatttctcagcctcctccaagtgaacatccatccaaccgagcaaagcctgggccctagccagtagcgtgaagtcaaaagacgtcacatgccccagaataagatgactcttaagatgggcttatttgataatgctctacggtggctttgaaaggatacacagtcactttttttgccttatttccaagttttggataatttttcttaggtgtgtctggagcttagaatgtgaaggatggagagaacagagggtcaccaatttctcc

SEQ ID NO: 193986 - DNA, 331 bp, Homo sapiens
atacttagttatgtatgcatcgataacctagtgatgatttggcagtgatttattcttctgcactctgcaacctggtctcacaaaggggaacacatatttatagacttggagttagaaaacatggtaagagttgctagtttcaggagaaaaatattaaataataagatgaactcatataaaaatgaaataaatagtttttttaaatgaaaaacctctcatataggagagagataacttgatcaatacacattaacaactagaaatagacttatattggattacaatcatcgtattcacagtatgaattgcaatgttttctgtttcttgtcct

SEQ ID NO: 193987 - DNA, 370 bp, Homo sapiens
tgaggctagcactcaggacactgttcagcctgtcatatggaaggaattgcctttcagaggagattataattgtgtatatagccacacaaatgcacattctgcctggaggaaattgcacagaagaggatgccttatgctgccactcaggtctctttgtggaaggctgcgtaagaagtgcttacatggcatagtcacctcttttggacttaatgagtcatctttttgtgtgatggctacataaaaaaaaaggaaagaagaaatgtactcttccccaagtgagctgcttttattggccctgctgctttgtctaagagttttatacactcctcatgacatcatttacaatgctggtgcacagacagtaaacaaa

SEQ ID NO: 193988 - DNA, 488 bp, Homo sapiens
ggaggagacaggagagggctggagaggcagcaggaacaggcagaagactcggggtctcgattttattatatgtgccatgggcaggaaaggcagagatgagactcaatggacaccttaagatcactgaagctgccaggtgggaaatggattgctgagcatggagagcaggtgcagaggaccagttaagaccagttaggaggctgctgctgtaacccagctgggatagctgtgtcctaggcaaagataacaacaatgaggatagagagagtggacacgttggataaagtttagaatcacggaacttgctgactggagaagagggcaaaagcagagttagcacaacacatgagttatgaccagcttgagcagctcagcagggggtggtgccatttacagaacagagatggcatggacagagcccatggagaaggaggaggaaaaagagagtttggctttgggttttttttttaagacagggtctctggctc

SEQ ID NO: 193989 - DNA, 258 bp, Homo sapiens
gagtcgtgttagggggagcctcttgtccaaaagtgacagagatatttctctgaggctgagagctgtttttgactctggagattttcacagggcataatgaggcaagcactaaaggaaatagtttggggtgagcccaacctagttacattaataacgagaggattagcaatagaaggggaaaaggagaaggagtaacagaacagatggaagataggtaaattttcttagctttagtttggaagggttctcccctggaac

SEQ ID NO: 193990 - DNA, 1030 bp, Homo sapiens
tagattaggcaaatctgaagagaaaattaatcaagtggaagataggtcacaagaaactaccaagtatttagataagaaaacaaaaagacaagcaatacaagagacagggtaagaggcagagaaaacacaatgagaaggtctagtatatgtttagcatgccagagaagacagaataagacagaagcaatatatgacaagataacggctgagaatattctgtaactggccgggtgtgatggcccacgcctgtaatcccaacacttttggaggccaaggcaggtggatcacttgaggtcaggagttcaagaccagcctggccaacatggtgaaacccatctctactaaaaatacaaaaatcagccgggcgtggtggtgggcgcctgtaattccagctactcaggaggctgacacagggagaattgcttgaacctggaaggcagaggttgcagtgagatgagatcgcgccaccacactccaacctgggcaagttgactccatctcaaaaaaataaaaataaaaataaataaagagcctaatggaagccagtagacaactgtgaacaatggactttagttaataatgtatcatcaattgtaacaaagacactaataatgcaaaatgtgaataatgagaaagtagggtaaggagtatatgggaactctgtattagctgctcaattttctataaacctaaaagtgctctagaaaatatacagcctgggcatggtagctcacacctgtaataatgcaaaatgtgaataatgagaaagtagggtgaggaagtatatgggaactctgcattagctgctcaattttctataaacctaaaagtgctctagaaaatatacagactgggcatggtagctcacacctgtaatcccagcactttgggaggccaaggctggcagatcgcctgaggttaggagttcgagatcagcctggccaacatggtgaaaccccatctctactaaaaacacaaaaaaacaaaaattagccgggcatggtggcacgtgcctttagtcccagatact

SEQ ID NO: 193991 - DNA, 355 bp, Homo sapiens
tagattaggcaaatctgaagagaaaattaatcaagtggaagataggtcacaagaaactaccaagtatttagataagaaaacaaaaagacaagcaatacaagagacagggtaagaggcagagaaaacacaatgagaaggtctagtatatgtttagcatgccagagaagacagaataagacagaagcaatatatgacaagataacggctgagaatattctgtaactggccgggtgtgatggcccacgcctgtaatcccaacacttttggaggccaaggcaggtggatcacttgaggtcaggagttcaagaccagcctggctaatttttgtatttttagtagagacggggtttcacca

SEQ ID NO: 193992 - DNA, 560 bp, Homo sapiens
attgaggtataatttgagtatcataaaatttactcattttaactgtagagtttgataaatagtaactttatatagctatgaaagcatggctacaagccagtttttattttaaatttgcatggtacttagatatttctttttaaaatccagttttagaatatttccttgttccagaaggttccctcttgcccatttgtaggtaataactgctcccggccttagtctggtcctagccccctctctatctctattgttttaccttttttagaaattattttttattttcataaaaactctttgaaataatatttttataacaaatttgcagataaggaaaataagccataaagagcctatgtgatctgcccaaggtcaccgagctataagtgatggagctagtatctatgtccgagatgacctgagagctttggccattatgctatgctgctgtaataagtactatgaaaagtctgaggaattaagaaatgggagagttcacatttggctataggatttggggaacatttgatgcggggggtaggattctttgataggaaaca

SEQ ID NO: 193993 - DNA, 159 bp, Homo sapiens
gtgcttatgatttgtcacatcaaggcaggtacacacacacagatgaacatggcctgctagtggctacagaatccccacaagatatgtatcgagatgacagtgggtatagagattgcttttccagattggccctcaagatccaaatggattaggaataaa

SEQ ID NO: 193994 - DNA, 279 bp, Homo sapiens
gcctctgtggcctttgcagcatcccacacccagccttccctgtttctgttctgtgccatttcccaaccttgccttaccaagagccactgctgtggcaggctgctcttgttgctgggcgcctcacctgccacaccgatttctaaagcctgccttgtcctcgttctccccagtcccacctgtggggtcctccccaccagattgtccactccttccgttctagggcgcaaccggaaatcccaggcaccagcctcatcttgctaaggtgaaatctgttcaatc

SEQ ID NO: 193995 - DNA, 308 bp, Homo sapiens
attgcgcattcagggaacagggtcatggttagaagaggaagcagagattagcagcaggagagagtgagtgagctactcgaagttcatcaggagagactgacatggcccattgggaggctgggctcctagaggcagaggtggcccagccctgtcccctccctgttccctgaactgcaggacaatcctacatgtcctgtgaagcaggatattactagagcacagccaaatatgaaaatagaatttcagaccagccatatctattcttgaaggagaaaagtcatagtgcacaggatttgcaaaaagcgcac

SEQ ID NO: 193996 - DNA, 382 bp, Homo sapiens
aaaaaattcagacaatacaaaagtaaaaagttatagttccaccccctccccctttattccccaagcccatttacttcctcagaagtatttactggtaacagtttggagtgcatacttccagatttttctgtatatttgcatatggatagataggtagaatgatataattacagactttttatttgctattcatattatttgccatctttttatgctaatttggagggtttcttttaacattagtttatagggatctaagtcttatctcgaaattttcattccttttgtttacgatgtctctccctcctgattctccctttactcctttgacaatttcttcttgtcctatttcactactccttgtgttctgtccctttcttta

SEQ ID NO: 193997 - DNA, 283 bp, Homo sapiens
gaattggcaggccataactgaatctcctgtgcctggttctcaaatcccagtcatactctctgggaccatggagcccacagaacctgagaccttatgggcttcagggtctttgtatttctctagaaaagtggaaatgcttgagtctttacagtaaagatactgggaagtttctgtgtgcatttcagagttaaagtcaggacagctctcttactgtcctcttccaaacttctttaacttgtttgtatacatacatacagtttcttctagagatggcacagagtta

SEQ ID NO: 193998 - DNA, 340 bp, Homo sapiens
ttatttagaaggagctgggaaggtactggaaggtttgcagctgaggcgagacagaaatatgacatttaaaatgattagctctggctgctgtagggagaagaaactaaggaaataccagcagaagcagggaccctggccaagaggctaatgaaatcatccaagtgagagatgacaggggcttggacaagcagaggtgacctggatagactctgaagttacggttacctgaaagactggtacggggtttgacagaaaaagaagagtcaaggaagatcccaaagttattggccctgggcaagcagaaacatgaagctgggtttaactgaacaaaggaagaagt

SEQ ID NO: 193999 - DNA, 741 bp, Homo sapiens
cccaggacctttgcattcactctacctgtaaattgtgtacacccatctccctcagctcctatagatatctgctcgaatgttcccttctcagtgagacccaatggctccatttaaaactggaccctgatgcttcctccctacctttcctacttttcctcatagcacgtgccacttaccaactcccaacatactgttttattactgtatttgtttgtctcccccactagaatataggttcaacaaaggcagaagggtttttttcatggcagaaaaggcagaattttttccccaatgtacataaaagtgtctggtacatagtaggtgcttaaaaatatttgttgcatccagtaaaatcatcattcaaatgcgaaggagaaatactttctaaggtaaacaaaacttgagggaatgtgttaccaatggaatcaccttgcaagaaatgcccaaagaagttcttcagagagaagggaaatgatatagttcagaaactcagatctatgtaaagaaaagtgcattagaggagaaataaatgaaggcactaatttaggagctgtgactatagcaaaacaaaaacaggttttaccaagtacatggcttgattgaagccactaactttccataatcatgtcctgctgattacctactagatacagctactttatagaataattaagactgcaggatcaggccgggcgccgtggctcacgcctgtaatcccagcactttgggaggctgaggcgg

SEQ ID NO: 194000 - DNA, 422 bp, Homo sapiens
aaaagaacctccctcattcaaataccctcagaatcccatagcatttacactttgcccctcccatttttatctatcctttgtcctgtatctccaaccaattaagccttttggggctgtggtcaacatgttcggtaactgttaataatgtattcactgggaaataagagtatatagtcttggctgggcattgtggctcacacttgtaatcttatcactttgggagaccagcctggccaacatcataaaaccctgtctctactaacaatataaaaaattggctgggcggtggggcgcgcctgtaatcccagctacttggtaggctgaggcaggagaaccgcttgacctgggaggtggtggctgcagtgagcttggatcatgctactggactccagccagggtgacacagtgagattccatctggg

SEQ ID NO: 194001 - DNA, 350 bp, Homo sapiens
aaaagaacctccctcattcaaataccctcagaatcccatagcatttacactttgcccctcccatttttatctatcctttgtcctgtatctccaaccaattaagccttttggggctgtggtcaacatgttcggtaactgttaataatgtattcactgggaaataagagtatatagtcttggctgggcattgtggctcacacttgtaatcttatcactttgggagaccagcctggccaacatcataaaaccctgtctctataaaaatacaaaaattagctgggcgtggtggcgggcacctgtaatcccagctactcaggaggctaaggcggcagaatctctagaacctggga

SEQ ID NO: 194002 - DNA, 529 bp, Homo sapiens
tgataactttaataatgaacttttattctgtgtactatgtttaaggaagtaagaaattggtgtcttttgagattgctataaaagtaaccattttcaaaactctgttaattaaatgttaagtttcaattttctggaaaatttacgtgtagatctctccttatcagatgacaccaaataaaaatggtgctactgtgtatggaacttcctttgttttattattttaacctatttatctttctacttaatatttcaaggaattactcccaaacaaggctctattacatttaatatttgatatcagtaatgaacaaccaattgcctaaagattagcacatttgctaatggagaagatagtaaagcagataattagaattagtaaatgacctatgcatatgattcagttgtatagttttgaatcctggtattgagtctattagcccaagtgtcctaaggtgccaggtttttgtagtgagtttttttcattgcattgctggcctcctctgtctcatttactatgttaatttaaacc

SEQ ID NO: 194003 - DNA, 1491 bp, Homo sapiens
caagctgatctgcaagtaacataaactgtctgccagagcaaagtccaacagtatttaaagaagaatgacgaattctaggacttagcaatgtaaaattcatatgcctggcatccaaagagaaattacctagtatgtgcccaggagttcaagactatcctgggcaacatagggagactccatctctacaaaaaaatttaaaattgaaccaggcatgatggcacatgcctgtggtcccagctacacaggaggctgaggtgggagaatcgcttgagcccaggaggtcgaggctgcagtgagccatgatcacaacactgctcttcagcttggcaacagagtgaggccctgtctctaaaaaagaaaaaaagaaattacctaatatataaagaaacaaggccaggcacagtggctcacacctataatcccagctctttgggaggccaaggcgggtggaccacctgaggtcaggagttcaagaccagcctggccaacatagcgaaacgccgtctctactaaaaatacaaaaattagccgggtgtgatggcacgtgcctgtaatccccactactcaggaggctgaggcaggagaatcacttgaacccaggaggtggaggttgcagtgagccgagattgtgacactgtactccagcctgagtgacagagcaagactccgtctcaaaaaacaaacaaacaaacaaacagaaaacccaaaatatggcccaaaactaagagaaaaaatagtcaatggaaatagacacaggaattacgaaatgatggggttaaaagacaaggataataaaacagctattatacatattcttggatgggctcagtggctcacacctgtaatcccagcactttggaaggacaaggtgggtggatcacttgaggtcaggagttcgagaccagcctggccaacatggtgaaatctcatctctactgaaaatacaaaaattagctggatttggtggctcttgcctgtaatcccagctatttgagaggctgaggcaggaggatcgcttgaacccagaaggtggaggttgcggtgagccgagatcatgccactgcactccagcctgggtggcagagtaagactccatctcaaataaataaataaataaatattcttaatatagtaaagtaaaagtaggaagtacagtaaaaggaaatatgaattgaatgaaaatataaatggataatacaaaaaaagaaccaggccgggcatgggggctcacacctgtaaccccaagactttgagaggctgaggcaggcagaacacttaaggtcaggagtttgagaccagcctggccaacatggaaacctggtctctaggaaaatacaaaaattagctgggcttggtagcacacacctgtaatctcagctactggggaggctgaggcatgaaaattgcttgaacctgggaggcagaggttgtacagagccaagatcacgccactgtactccagcctgggtgacagagtgagactctgtctca

SEQ ID NO: 194004 - DNA, 280 bp, Homo sapiens
ctgcaacatctcataacttcaacacactcatgtaactctggtggatttcatcagacctctcctctgtgacaactgtttaattaccacacattggtgatctcatataatcctcaacaaccccatgaagtaggcattatttacaaattacttattttacaaagaaggaaactgaggttgagagaggattatatgcttgcggggtctcatagagaccaaccgaacccccttcgaccttgcccgaagggggagtccgaactagtctcaggcttcaacatcgaat

SEQ ID NO: 194005 - DNA, 305 bp, Homo sapiens
tacccatctcaaacttctcattttatcctcatttcaattttagaaatgctatgttaatcatccacatcagaaacctaaggatcatttgtgaccaaccctaaaacagaaggacatggaactccaaccagaaaaaactttccagcagagtaaacaaaaaggcacacaccaagcaatccctaagttctatgttttcacgccaacagagagaacatgaaatgcttctcagagaaaaaaaaaaaacaacagatcaaacacaaggaaatgtcaataagaatgtagttagactttttttttttttttgagat

SEQ ID NO: 194006 - DNA, 171 bp, Homo sapiens
gagaaagagtagagtttaaatggaaatagattctgtgtaaaagctgcctacagattctggagctgcaagtggtgtgtgggtgagactatttttttgccttgcctgatttacaggaatatttttagtcatttctggttttaaagcctaaaaatgccatgggaggtcaccagt

SEQ ID NO: 194007 - DNA, 605 bp, Homo sapiens
atgaaataaagcgatagtttttgagaggcttctctccaaatgaaatccgaatatgtaagatttcttctggatgtatcactgatgaccacaaaaccggaatgtcaaaaccctcctcaggacagatgaataaaatcccaaagaaactagggtctcagcaaagtattctccctcggccgtcaggcagcaatcagtagctggtgaagcagggaaggaacaacgctgcagacaacacccagggggcctcgttaggggcgacagaagggacaattctgatgggcccatctgaaatgaagcaaaagcatagcatttattatagaaagtatgaggctgggggtcaagtcagctggatctatgagaccttcctatctaggggtgtggtccttcttgagcttaccttaacaagtacaccaaagtgcttcaaaggtgacggtgctaattctgtaagtgatgtgcccgaaataaatcttgccaaaagtcagatctcgctggtgttggctaggacagtgctctggaggagactatcatttttagaatgggataggatgccctgaaatgtgtgccacttacccactcacaactgggcacctctgggtgcctgccatgtt

SEQ ID NO: 194008 - DNA, 406 bp, Homo sapiens
tccaagaagcaccgtcttctgtcagacacacctcctgccccgccataggccttcccactgtggcagcagaatctgtgctaggccttccttcgtgaaagaggacaagatcagggctcacgtgactggggccgctgtgactctgagcctctgcgttctgtcagatgagggtagtggtgcttcccctgcgtcctgctgggagaaaaaaggaggcagtaaatgaaaggtgtctcatcacctgcttcctaaatagaagggacaaagaggctgaaaaacagtaatagtcttgttttatgaaaatgccacccctaatctaggagctgggactgccatgccaggacccctcagataatgacatccctgaagaggattagcagctagtctgttatcagtcacaggcagttcaacc

SEQ ID NO: 194009 - DNA, 386 bp, Homo sapiens
tcaatgatgcaaattagattttggttgaatattagaaaaggggaaaaaatagtttctaaaccagttgcttttttttcccctggcagaaaagctgtgagttttaaggttacatcatcagagctggcgtgaaacatgctctacctttccctcttccccagactgttggcagttgttgtagtgaacccaaaggttaaatgggcatgagagtctgcatagcactcttccacgaaaggtgtgggcccttttcttggcttgagccactttgtgggagtggtttaaagacaaccagcttcctcattccctgtgctgttcccactctgtgcataaaaagaggacttcagccctgaggcagaccaggtggcatctttcacaagtacagaatttgt

SEQ ID NO: 194010 - DNA, 220 bp, Homo sapiens
ccaaaagaacagttataatttatttattttgagacgtagtttggctgtttgattgcctagttgatggagtagcagggagtttatctttgggtccgatatatagaaataatgacttggattgccttgaaagatacatgatgggaggtattcagcaaaggatagactattgttaggcactattactaacgcagccttcttctacatcttgtctttttatttt

SEQ ID NO: 194011 - DNA, 625 bp, Homo sapiens
  misc_feature (508)..(508): n is a, c, g, or t
  misc_feature (574)..(574): n is a, c, g, or t
tcagaggattgaaacctgggcttaatcctagctctgccacttaatagctggaccatgaccatggcaccctatttaacccttctgagcttcacttatctcatctaaaagccttcctctttgagtagttatgaggattatcagataatgtgctggtgcctggcaaatagtaacaatttcacttgatacatgaaagtgtttatcttatatccagggccaggtacaggaaggcactcaagaaatgtgctgatggccggcgcggtggctcacacctgtaaatcccagcaatttgataggctgaggtgggtggatcacctgaagtctggagtttgagaccagcctggcgaacatagcaaaaccctgtctctactaaaaatacaaaaattagcccagcaaggtggtgggcacctgtagtcccagctacttgggaggctgaggcaggagaatcacttgaacccgggaggtggaggttgcagtgagccaagattgcaccattgcagaccagcctgancaacatggagaaacccgtctctactaaaaatacaaaattagccaggcttggtggcacatgcctgtnatctcagctactcaggaggctgaggcaggagatcacttgaactgggaggcg

SEQ ID NO: 194012 - DNA, 370 bp, Homo sapiens
tacaaaatactcaggtacaaagctcccaacaagatacattaatttataaattataacagagataccactgcactcatatcttatgtaaatttaaaacttacacagccttaaaactttaaataattcgatcaaagaaacaacataaataaactattttacttaggaacaatgcagttcacatttttgctttcactagaaaaatgttatgaataagagagtattttaagtgagatcaatgaaactgaatatttcatttgtatttgtattgttactaaattgttttatccttgtaacatgactgacaaagaactcccaggagcagaaatctgagctctttcattatcctcttgttgggagcttgcatttttaa

SEQ ID NO: 194013 - DNA, 400 bp, Homo sapiens
tatcttgctcatgattttatgagtcagtaatttgggaaggatttatctgggcagttggcaccggctgggcctgtaagatctgcttctatgataacttcttcacttgcatttctggttcctccgtgctccttgacctccgcacatggatctgtcatcctccagggcttctccatagttgtcttacagtagtcatattttatactacgtggtagttggcttctaagagaaatacctcaagagcaagtgttctgagaaagtggaagctagacatgggtaggtaagggttatgcctagaactggcacaggatcacttcagtattgtattcgtcagagccatgataggacccacctgagttgaagggaatggggaaataggctgtacctaaacttgatactgacg

SEQ ID NO: 194014 - DNA, 628 bp, Homo sapiens
atcctcgcagatgaggaagtgagactccacatagccatgtctcatggccagtaaggggcagagctgggatttgaaccaggtcctcgaggctccaactatagcacttaagggctctgctttactgagcagaggccatctcagcttagtggcacagcagagtgggtgtgacataagctataaagcctgccaagaggagcgcctcccaatcccagacagtgaggctgcagctcccatgtcacccccacagacacactgtgcttccttaaagcacagtctgccattcatttatttgcaagtcactaattctgaatttcagtggttaatactccttagggacaggggcctttaatttggtccacatgataatcttatcaagcaacagatgagacacaataggtctgaaaatcaggaacccaagttccagcctcagcctggccaacacctggctgtgtgaccctgcttaagttccttgctatctctgggcctcaattcttcccacctgccatgttagaaggctgggctggggccgggcgtggtggctcacgcctgtaatcccagcactttgggaggacgaggtgggcggatcatgaggtcaggagttccagaccagcctggccaatatggggaa

SEQ ID NO: 194015 - DNA, 399 bp, Homo sapiens
tgagctcggcaccgtttacatgccacaggcaacccgcatttttattcatttatttatttacttattgatatggggtttcaccatgttggccaggctggtctcaaactcttgaccttgtgatccacccgcctcggcccccaaagtgctgggattacaggcgtgagccactgcgcctggcccatttccttgttttatctggtgttttactacctatatatttattcttaatctaattttaaaattatctgtttttgagacttcattgtaaatggaatcattgtatgcaaattttgtgtgtgtttcttagctcagcaatgtgtttataagagcatctacattgttgtgtgtaggtctagttcattttcattactgtatggtagaaccgactggggatcctct

SEQ ID NO: 194016 - DNA, 566 bp, Homo sapiens
cctggatggcccaaatgtcactcctgccacctccttcctggagaactgcgtaggatgggcagatgccacttctcttcttcctgtatagccaggacctaacacagtgtccggcataaagtcgtctttctataagtatttaaataagtatctactgggtgtacctctccatcacaagaagtctccagcttcccaaccctacagcttccaaagcatcatcttttctttttcttcctaggagccacagtcagaataaaaccaaagcaggccaggcacggtggctcacgcctgtaatcccagcactttgggaggccgaggcaggcagattgtctgaatccaggagtttgagaccagcctgggacacatggcgaaaccccatctctattaaaaatatttaaaaaagtagccgggcatggtggcacacgcctgttgtcccagctacttgggaggctgagtcaggaggatagcttgagcccaggagcttaaggctgcagtgagccgagatcgtgccactgcactccagcctgggcagagtgtttcaaaaaaagaaagaaagaaaaccaaagtag

SEQ ID NO: 194017 - DNA, 401 bp, Homo sapiens
tttaccagaggcctctgtgcccaccttcatctgtctgttgagactgtaaaatgaagggaaataagacttctaagattttattttctcccaatccccaagcctctgccttttgggagcctcttcttaggctcagtatggcactggcattctctgcagggtagtcagatgggtgtccctctttcctttttgaagctgcaggaactgtatgcatagcccttgcatcttgatgactaagtttttttttttttggagacaaggtcttgctctgctgcccaggctggagcgcagtggtgccatcacaactcactgcaactttgaactcctagactcaagcaatcctcctgcctcagcctcctgagtagctgggactataggcatgtgctaccactcctggctaattt

SEQ ID NO: 194018 - DNA, 161 bp, Homo sapiens
tcagtgtacctgtgaacatactggtgcccacaaagagatgagatggaccttgagtaatgacattgcctgagtggataagaaattagaagctgcctcatctggccaactgttagaaaaagtacagtggctgcaaatgtgaccccgtgatcttttgtaactgc

SEQ ID NO: 194019 - DNA, 191 bp, Homo sapiens
gaactgctgcataaaatgagaaatactacactggagaaaaataattaaatttgttattttcaagatatagaatttgttaaatttgttattttcaagatagaggacataattaaatgttttattttcaagatatagaaaaagaggaactaaaatgagatttgagcaaaatactgaaagaggaagaacacttt

SEQ ID NO: 194020 - DNA, 613 bp, Homo sapiens
ggggctgggggcggtggctcatgcctgtaatcccagcagtttggggggccgaggcgagcagatcacttgaggtcaggagtttgagaccagcctagccaacatgacgaaaccccctttctcctaaaaatacaaaaattagtcgggcatggtggtgcatgcctgtagtcccagctactcgggaggctgaggcaggagaatcgcttaaacctggtaggtggaggttacagtgagccgagattgcaccactgcactccagctctggggacagagctgagactctgtctcaaaaagaaaaaaaataaaggaagtagcaacaatgggccattggcagaagttcaagggagagatgatagtaacttggactgtggtgatgttggtggaggtagaatgaagtggatggaggtcagatcttttcagaaataagagtcaaaaggactttgctaatgggttgactattttggtttggaactcaggaaggctttcaattggactagagatgtaagtttgggaggtctcagtagatcattaaagccaggacagagatgagattgcctactatagtaatcattaaccttatcattacaacagaactcacttgtggtactttgttgaa

SEQ ID NO: 194021 - DNA, 344 bp, Homo sapiens
ccagatgtgaggttgggtgtgtgctgagttcctgctgctgggttgagaaaaggtgatgagtgacacctgtcttccgcctttaaggagaaagggtatgaccaccgcctctctttcccacttcttgctggctggagtggagatctcattggccacgcaggttacagtaacactttcatggacctaacaggtcaagaataaggtgaattcttgaggtccttagtataacatcagatgaagctcctctagcaaatccaccgagcgagagtggtcaattccattcacaagatgaagacagagctgcccaacaggtgccattttagcttctacaaaggacccaagcccgg

SEQ ID NO: 194022 - DNA, 150 bp, Homo sapiens
caatgcaagcttaatattttcatatttattttttgccttatgcaatatttttcaacattttcatgagttgttggtcatcactatctctattaactttcaacaacttgctcttgtaagtcacaaatagtgatgctgctgaaactgtttctc

SEQ ID NO: 194023 - DNA, 383 bp, Homo sapiens
gtgatctacaggatctacgtgacacttcaggcttaagtaaactaacggcttttctatttattaaagcaacatttaaaaatacttacaaagttattaagagagctatacaatttcctttattgacacattttataaaaaaagagaaatcccttctctttcttatttctctaaaacaaatttagaaactattcttttcgtgagctcctttttctgtcacctgaattcaaattggaatatttttgctcaccgttggttctggagttttctccatcattcaagccaggtttgaaatcctgtgtcccttggtaaaatcatctattttctaatagacggctaactgcctaggtgttttctttactcaccacttctctctgaagtgtcaa

SEQ ID NO: 194024 - DNA, 1077 bp, Homo sapiens
ggggaagcaaggcatgtcgtacttggtggcaggagagagtgcagaggaaactgccacttataaaccgtcagatctcatgagaattccctcactatcatgagaacagcatgggggagaccacccctacaatccagtcacctcccaccaagtccctccctccacacatgggaattacaattcagattacaattcaaaatgagatttgggtggggacatagagccaaaccatatcagttagtcagtgaagactgaggtatctgtagaagtgagggaggagcacagtggtctggatgaaccagtggggtgatagtcaggggactggcattcagtgaggctgggggagaagcttcctaaaagcattgcccttgaaaagcagggcatacctatctgatactgaggatgtagaatgcagtttggagatgcttcctagctacctaatcttccaaggcaaaccatgcactcttcatcctgatatttgtgatgcctccctgggctacatgacagagggtgcactgcaaaggatgtgaaggaaagtcaccacagggcaaaggtggaaacccaggggcctttccccagtgagactttctggctgttcctttggaacttccacctgctagttgcagatgtttgccactggatggggccccatgctacgtgggaactgttcaggactgtgggtacttagttccagcagagctggctccaccagggcaccaggactgcaggcttctcaactcctggcctggagaggcagcttcagcaaccagtgcctgggaatccactagccctttctctgtgagtcacgtgagggcagaatctgctcaaagtcagagggctggagcaacctggattgtgccagagtgagggcccagctcactggaggtcagagtaagagagtcaaggatgggaagaaacagggttttgctcagtcttgcagatactgaggcactcaggaggctcaggatggcagcaacagggcatgtgctaaacttaccctagcctcttccttttaggcagccaccacagaggacatctgtttgcctctgtaccctaccccatctccatgctggtagatat

SEQ ID NO: 194025 - DNA, 539 bp, Homo sapiens
ctctcataattgtattatgtacagcagcatcagcatcacctgggaacatgttagaagttcgaactatagacctccaacccaaacctctggaatcaaaactcaggagataggccttagcaatttgtgttttattatatcctccagctgtctggagaaccacataagttttgagaaagaaggcaatgcaccttatcattcttcaaggcaaagttcacttcacttagcttggtattcttcactgcacctagcaccctcaacataacaagcacttaatacatatttgtgacataaaatagattaaaatattctaaagacagaactcattttagagaacaatcctttccagccactatttggagattttgatactagagatgtatttggctgagaagtttcctttccttaacctattgctaggttctgtgaacttgccatgaattgaaaccaaggatggactacagtcagaatgaaggaagatgaggaagaaaaaagcaaagaagaaaacaaaaccactctattccttctgaatttggcacaaa

SEQ ID NO: 194026 - DNA, 846 bp, Homo sapiens
ctctgcttctattcttgtactcttcagttcttattcttacaaagcaacgaaaatgatcattagagcatttggattttggatttttggattagggctgctgaagtggtacagtgcatatattcaaaaattaaaaaaaaaacctgaaatacttctggtaccaagcattttggattaggaatactttcccttcttcccacctaatctttcaagccataaacttaaaatccatccctgatatccataatctatcactttcaagtatactatataatttatttaagtattatggctgttagtatttcagctagaccataaactccaggaatgcagggattttagtctcttttactgatgtattccatgcacctagtacaatgcttggtataaagttctcaataaatatatgttaaatgaatgaatgaatcaatcagtctacattcctttctgttccacctgctcaaacaaagtatcttgttactaccgtgttctaagccaccattagttgtggccaagatgattgcagtagctttgttttttttttttttttttttttcttaagagacaggatcttgctgtgttgaccaggctgtgatgcagtggcttttcacaggcatgatcatggtgccttacagcgccgaactgttgggcctcttgccttacgctcccaagtagctgggactgcagatgtgagccactgtggcctggcatgatagcttttaactaatctctgcttctattcttgtactcttcagttcttattcttacaaagcaaccaaaatgatctttggataacattcgatcttttcacactcctgcttttaaaacttccagtgaaatcccccagtg

SEQ ID NO: 194027 - DNA, 347 bp, Homo sapiens
tgcatgttgtcccagcacagtttattgaagactattctttctctcagcgaatagttggcaccctcattgattaactataaatctaagagtttatttctggactctcaactctattccattgatctattatatatttccgtccattccagtaccacactatcctgattactttagtttcataataaattttgaaattaggaagtgttcctcaactttgttcttcttttgcaagattattttggctgttctgaatgctttgcatttccatatgaattttaggaccagcttgtcagtttctgcaaaaagggctgctgggattctgattgtgattgtgttgaatctgcaga

SEQ ID NO: 194028 - DNA, 144 bp, Homo sapiens
agaagggcacttgtcctaaagaacttacttattataaagccttaatacttaaagtgtgtagtactcatgataatggtacagaacagaaggcccagaaatagacacataaatttagcatatgataaaggtagcaaatgagttaaa

SEQ ID NO: 194029 - DNA, 469 bp, Homo sapiens
tatgttctttccgtgcctactatctgtgcggattaaattctaaatgccgcacctggaccacaggccctcactccccatctcttcctccccgcctcccgtttgcgtccactgcgcattccgctgacagggactcatcttcctaagacagtactttggttttcttcccctgctcagaaacaatcactggctcccgactgccactaagaccaagttcaacctccttaggcttcacggaaggtcctctacaatgaggcctcaagcaacctttcccctccctctctctgcacccccgcagctgatctgcttctctcccaaaaaaagccttcctgcacctagccccccagatctctggagacccagaaaccccctttgcctctgtctattccctctgtgtctactaacatccctcccttgctgttctccaagcatttattttctgcactacctcaaatacttgtctgcacctttt

SEQ ID NO: 194030 - DNA, 202 bp, Homo sapiens
atttcctgactcagattgagtgaatgggtcaacctgtttggtttaaaaacaaaacaacaacaaaactacctgtaaataataccaggtttgggggcacatgggagtcaaatgatagtaaaacgtatttacttgaacagcattcttgactaacacccaagactggaccctgtttaaggctcaaccaagaatctgtctgttctcg

SEQ ID NO: 194031 - DNA, 164 bp, Homo sapiens
ctgtagcggttcatcagtaacacaaagagcaaaacaggttttcctaatataactggcctgaactccagccagttttaaattgtaagtggagctaaagacaacactacagattaagtatccctaatgcaaaaatacaaaatctgaaatgctcctcccaaatccaa

SEQ ID NO: 194032 - DNA, 355 bp, Homo sapiens
gagaacataactttgaaaaagaaggtaaaagcactgatataactccactgaccaccataaagaaatttctttaaaccaaaataagtaattctactagactaaaccataagaaattgccaatattcaccaggtgtggtggcttacgcctgtaatcccagagctttgggagatcgaggcatgcgcatcacttgaggttgggagttcaagaccagtctggccaacatgatgaaactccatctcttgcttggaaaaaaagggggggaaaaaaaaaaagggcacagaaattacctgggtgtggtgggggggcgcctgtagtcccagctacttgggaggctgaggcaggaaaatcacttta

SEQ ID NO: 194033 - DNA, 336 bp, Homo sapiens
ggtgacggggcctccagtgctgcccggggagaagccttgagctctccagacaggaaatggagaactgggccatgagcagaaaagagaatcagtaccaaatcacttttgggggcaaagaagtgtcagggaagaagggatgaggaggaagacaggaccgtgtgaagaggaccttctcggaagggaccaaaggcagttagtggagtcccaagacctggggtgctcagaggactttgcatgaatgaacaaataagatgaatgaggctttatcacgtggccatgatcgtcaagcatcagctgaggatgcagtgcccacttaccgcgactgaaacgtgaaca

SEQ ID NO: 194034 - DNA, 647 bp, Homo sapiens
tctcaccgaaagagacattcctgagacattttttacatggcttcattgaagataactctgtgatatcaaacaatccgttgtccttagtggtagccagttcaatacacttccttgtacctgtattggttttatctccttttctgtctcacgttatttatccttctctcccgatccttaatgtatgctccctaacaaaatcgtggcacgtaaacccttgcctcagactctactttctgaagaaaccagctaaggaaaaaatgtctctaaagaaagaaaaatagagtaatgtaaaaaatgaaaatatgggattacaggcgtgagccaccatgcctggcccactctccccttttgtgttaaaaatacattagcatgctatactttacttcataatatattgtttttaaatagaaaattattcaaatcagcaattaagtcacttgatatgtctcaacccccagatctttgagataaaagttgtattgcaggaaaatgggcttgtttgtcccttggctaccagtacctgacacatgactatgtattgtcaagggggcagtactgtgctttggtttgagaaacagcctcatggaaacgagtagtgattccaacagaaatgtggtcttgtgtctgtggggagaaggatgcaatcg

SEQ ID NO: 194035 - DNA, 356 bp, Homo sapiens
taggcgtggtggcgggcacctgtaatcccagctactcgggaggctgaggcaggagaaactcttgaacccggtgggggaagttgcagtgagccgagatcacaccattgcgctccagcctgagcgacaagagcaaaactccatctacaaaaaaaaaaaaaagaaatttcttattgggttaaagtttggagaagtaatgttactaatgcatttcactgagctaccatgaggtggtactgtgtcttagtcaatttttatatttatccccaaaggatatattttacatcttcatatgaaatttagtaagtagtcaaaagaattgtatgaagattacatttttgttcttacctgatgactta

SEQ ID NO: 194036 - DNA, 835 bp, Homo sapiens
attgcttatgcctgcatagaaggggatataatagtctggagcatatgtacacaaactgccaaaatatggtgtgaaggttggcctgacaaatgatgctgcagcatattgtactagcctgctgttggcctgcaggcttctcaataggtttggcatggacaagatctatgaaggccaagtggaggtgactggagatgaatacaatgtggaaagcactgatggacagccaggcaccttaacctgctatttggatgcaggccttgccagaactaccactggcaataaagttttcggcaccctgaagggagctgtggatggaggcttgtctgtccctcacagtaccaaatgattccctggttatgattctgaaagcaaggaatttaatgcagaaatacaccggaagcacatcaagggccagaatgttgcagtacatgtgctacttaatggaggaagatgaagatgcttacaagaaacagctctctcaatacataaagaacagcgtaacttcagacatgatggaggagatgtataagaaaggtcatgctactatacgaaagaatccggtctatgagaagaagcccaagaaagaagttaaaaagaagaggtggaaccgtcccaaaatgtcccttgcttggaagaaagggtagctcaaaagagggcaagattcctcagagctcaggagtgggctgctgagagctaaatcaaacaactttctgtgaggatttttcagataaagacaataaacttattgacagcaaaaaacaaaaaccccctcaaatttgaattttgttaataaaaatttcctaaattaaaaaaataagatgttgtatgtattttg

SEQ ID NO: 194037 - DNA, 414 bp, Homo sapiens
ctgtcccccacataaaactcccccacatatctcaagaaactttcagcattttgaaagacatactctggggtcctgttgtgacagccttgtgccacattaacttctctgtcttgttcccagcaaagaagcctttgctaatttcacaacaggaaagcatgcaagaaattcgagaacaaaacaaatctacacgcagagcccagcatcttcaagcaaacaccctgaggtacagacccgaggctagatgagtccggactgcagatgaggcagctgcctcttaaactgcaaggggactgaaaaagtcatttgcctctaaaaaaccaactctgaatacaaattgataatgaatattcatgagcccctccagcttgctctagagccacccttgactgcaaccctggactctgcttcctaaaa

SEQ ID NO: 194038 - DNA, 431 bp, Homo sapiens
acccttggatggtggagagtgatgaattgttagtgatggatggtggaaaatggcaccattgagttgtgaaggatggaagatggcagagaatgatgtggttggatggcaccactgggtggtaggaaaggagactgcaaagaggaatggttgagtagtggggaatgaagacagtcagtggaagatgccatcactgaatggttaaggatgagttaccaagaggggatggtggtggatgatggaagatgatggtgttgggtggaactcgggacggcagaaggtagtgagttaccagcagtgggtggtagcagtggcactgttattggatggtggaagatgatggtgttggatggtggacgatgaaagatgatggcaccattgggttgtagaagatgagtcatcattgatgagctatggacagtgatggagttgag

SEQ ID NO: 194039 - DNA, 579 bp, Homo sapiens
gagggtatgttctgagaaatgtgtcatcagatgattccaatgtgtgaacatcacagagtgcacttacacaaacccacatggtatagtctactatacacctagactatatggtatatggcttattgctcctagcctgcaaacctgtaatggtaagtattcgtatgtctgaacataggtaaaatagaaaaagtacagtaaaaatacggcattatactattataggaccaccatcatatatgtggtccatcgatgactaaaatgtcattatatggtacatatctctattcatttatctaacccagctcctactgtgtgacacattctgagtaacataagttcagccccctcaaaacttacagaaccacaagtagaaacagactagtaagcaaacagctataacagaaaatgcaattgatacatgtcagaaatatggcagtttttattgagaaaaggagatccaagaaaacttctcagtaaataatatatatttgaatgggggccatctgaacagtcttaaaagacaagttgaaggtatcccataaggaagaacatatgaggcaattaacaacaaagtgctat

SEQ ID NO: 194040 - DNA, 324 bp, Homo sapiens
agcaaaacaaaacacttgagtctgatggaatccccgggtctagtaaccagtttacaggaatgacaagggggagggacacagtgaatggatgctggcagaatccaatctgtaaaggcaggtgtggggaactacacaggacaagtgactccatgagaaaaaagcagagggtgccgggcgtgggggctgcaatctcaacactttgagaggctgaggcgggcagatcactggagacaggacttcgagaccagcctggccaacatggtgaaaccatatctctactaaaaattagccaggtgtcgtggcgagcgcctgtaatcccagcta

SEQ ID NO: 194041 - DNA, 551 bp, Homo sapiens
gttttcatctgtgtgctaattgactttttagctctgtgtctatcctggctccagttccttaaaggcacaagcagggattgcataccctcaacatgcccagggcctggagaaaatgctgggaaatgacagaacttcagtgaatgtgcttttacctagggagggtcatctggaaatacctatcaaaatgacaaatctgtttacccttttatccaataacccaattactgggaataactgaattcactcatatttaaaagattatttgtggccagacgtggtggctcatgcccgtaattccagcacattgggagtccgaggtgggtagatcacgatgtcaggagttcaagcccagcatggccaagatgatgaaaccccatctctactaaaaatacaaaatttagccatgcgtggtggcgggcgtctgtaatcccagctactcgggagactgaggcacaagaattgtttaaacccgggaggcagaggttgcagtgagctgcaatcacaccactgcactccagtatgggtgagagagcaagaccctgtctcacaaa

SEQ ID NO: 194042 - DNA, 1067 bp, Homo sapiens
agaccataatggatccttaccttagaaaaaaagcacatacatcaaaatttggcatgcaatttcaggagtttgttaacctcctaaggacctccacaaacctgctagaagtacaaagaacctaggttaaaaaaatccctgttttagagtgacatatgcaaaaatggtgcagaatggaactccaggtgcttgtccctcccaggaacaccaagaaacttgcaaacactgtcagaatcaagtttattagaactctgaagatagtcaaaagtttatggcaactaagataacttttaaccaggaaagggctgaaatgtagtaggaaagctttgcggcattttaacctactcttacgcaaccccctccccagcctggcagcaacctttaagacagcagcctgagttctcactgtgggttcctggttctggaaggagtagagcagaacttgtttccaagaaattgtgtttgtctgttttgacctgtttggaggttccctgaaaaactgatgcaaagggcttgcctttgttttgcataactgggaattctctcagggtggaaaagtagctttgtaaataaagaatggtcctcaaaaacattaaaaggcaaatgaatgagatgttgaaacctcaacaaaagatacagttgaggcaaacaagacacatgttgaaaacctggctggaaaggtggggagtaagatacttgggctatgagggatgtgaaaagctcccacatgtatcagacagtctgaaggcccatgcacatgtccagggcagagtccacaatcagaaaaaacatgaagagacctacgcttttacttctagttttcctttaggcttagcacaagcagggagtaaagtagtgctaagtcatagctgtaatcagcctgactaagaattgaagaggtggctcaatgcagggccaatctgtaaaaacctggagacttttctttttgtttatttttggctccagatatttaaagcactctctgctgtcaaaccactagctacccactgagttaagggaaaagagatttcagagaccacgcatgacaaggaatagaggctttataaaat

SEQ ID NO: 194043 - DNA, 504 bp, Homo sapiens
cctcggcctcccaaagtgctgagattacaggcgtgagctactgcacctggcctctcttcctcattttcaatcctgactccatcccaccttttacccctcagcatataaaccctcagctccctcccatattacacatgcacatctgcactctgcagcccccggtatagccttcctccatccttcttttcccagttaaccttcagcaaatggctaatctatgtctgttgccttccttgtcttccaactgtttccttaatcatctgcaatctggcttttgcccccccaccattccactaaagtcgctctcactaaagtcaccaatggcttctttgcccatccagttggcccttctgagcccttatgtattagtccgttttcacactgctgataaagacacacccaagactgggtaatttataaagaaaaagaggattaatggactcacagtttaagtgcctggggaggcctcacaatcatggcagaaggcagaaggcagaaggcacg

SEQ ID NO: 194044 - DNA, 275 bp, Homo sapiens
tgtattgggggggctggctattgttcttcagattattaaaataatattcctaaataatcaattgtaaagagctatgataaagtcttgcttgtatccaaagctctctcaatagctcctcacaagctcaagttcttcctccttactaagctttgaaatgcatagattgtattcaaccatattattattattacttttttttttttttttttttttttaaaagggagcctggttctgcccccttggttgaactgaaggggcgcaatttgggttaattg

SEQ ID NO: 194045 - DNA, 186 bp, Homo sapiens
actagacttagggacgggaaacccaaaccgtgccacttttaggtagaccaatggaaaaaaacattaacaattctacttaaaaatgctagaacagtttttaaaaagatgttttgaattcataataaagaaatgcttctgaaaatgtaaaagagcaaggtagcttgatggggagggtgtaaggaaggg

SEQ ID NO: 194046 - DNA, 403 bp, Homo sapiens
cccaaccactcaccttcctcaagaccccaccttcaattcctgcttaaaatatgtaacatggattctccttgtctttttaagataaagacccaaatccttatcactgactgaaagcccttttgtggctacactatgcctagtctagccctatctgccctcaggtgggcctcatctgatcacatgctctcaggtattctctccactacagctgcattggtctttcgttcctggaatacaacatgcctcctgccaccaagggctgctgtcctttctgctataaaatattgtcattcctctcttcatctacttcaagtatattctactttcagatctcagttcaaatgccactttatcaggtaaaccacttttctggtcaggcgcagtggctcatgcctgtaattcc

SEQ ID NO: 194047 - DNA, 267 bp, Homo sapiens
aaagagagtaggacagcacaaatacaaataagcaagtgggtaagtctggataacggatatccagatgttctttatactatatttttgtaacttttgtaaatgtatacttccaaataaaaggtatttaaaaaagaaaaaattggccgagcacagtggttcacacctgtaaccccagcactttgggaggccgaggcaggtagatcacctaaggtcaggagttcaagaccagcctggccaacatggtgaaaccccgtctctactaaaaat

SEQ ID NO: 194048 - DNA, 466 bp, Homo sapiens
aaaattgtacaaagcaggaccaaggcattaggtttcagtcacagccaagcaagtgtggacagtgagtaatgtctgaagattccatagcttgatcacagctacttttgtcctgctgtctgaactccattgtcaattctcaaacaggccacactctcatgataggggccattcatatgctgttccttctaccttgaattcccttctctactttgatatttcctattcttcaggtttcaggtgaaacatagctttgtttagaaagctttcctatcctcccagcctatgttagctcagcctattgtgtaatttcttagtaacctatacttctttgtagtcttcatcatactggtaattatttgtattatgtctgagttccacacgtgagggcaggatcttggtctgccctgtccgccactgtttcccaagaacctagcatagggtctgtctggcacatttgtgttcatta

SEQ ID NO: 194049 - DNA, 523 bp, Homo sapiens
atcccagcactttgggaggccgaggcgggcggatcacaaggtcaggagatcaagaccatcctggctagcaaggtgtccgctctgctcctgatccagcgaggcatccattgccactcccgatcgggctaaaggcttgccattgttcctgcacagctaagcgcctgggttcatcctaatcaagctgaacactagtcactgggttccacggttctcttccgtgacccacagcttctaatagagctataacactcaccgcatggctcaagattccattccttggaatccgtgaggccaagagccccaggtcagagaacaggaggcttgccaccatcttggaagtggtctgccaaaattatggaagtggcccgccaccatcttgggcgctctgggagcaaagaccgccccatggtaacagcaccttaactgtgtgtccccaaggacctacagatcacagggcaacaggggctgtgagggagttgtctggatttcccaaggtggaggaggcgaaagaggagatggatcc

SEQ ID NO: 194050 - DNA, 227 bp, Homo sapiens
aaacttccttagcccctcaaacaaaaacagtcactgttaaaagcagtgttgctatccgatacaacaataggagggtatagaattttgaacaggaagaacatgttttcttcttctttttgatttctattgtacaacatgttgaatatttctagttaataatagtgttgcctatttcaaaattgctaagtaaatttcaaatgttctcatcacaagtaatgctaactatt

SEQ ID NO: 194051 - DNA, 267 bp, Homo sapiens
tgcggtcgtctctagcaggatcccctagggtctaggcgtatatactgaagtatttggcagtaaaggtgcatggtcttcaacttctcgactggaacaggggaaaaatacatatacgcatctgtgtgtatgtatgttaagaaaatgataaagcatacagggctaaaaaaaggaaattaatgagtaggtaaaggatatatgagagttcccctaactgctttttttcttttttctttttctttttttttaagacaaggccttgctctattg

SEQ ID NO: 194052 - DNA, 369 bp, Homo sapiens
gaggttgcagtgagccgagattgtaccaatgcactccagcctgggaaacagagcaaaactctgtctcaaaaaaacaaaaaaaaaattattgagtttaacacaagattttccaaagagtatttgtgtctcatttcattttatgtaaatgttcaatattttaacttctttttcacacacctaaagtttttgaaagttgtgaaacttaaatgtgtttagatgtggactttagaggtcaactgaaacatgcctgggacttggtgactttctgggaggacttacccacgtggccatggttgtaaccatgacaacactttgagctcgagtcccccagattcaattcgggtgtttagtctgtagtcctccggccta

SEQ ID NO: 194053 - DNA, 386 bp, Homo sapiens
tcttccccagagctgtattacctgatcgctaggttcttgcagtctggaccctgcaacaaatccgctcaggtgctagtgcaggagctcgaggagcatcagctgattccgcgccgcttagattgggaggggaaagagcaccgaagaagcttcgaggatctggtggcagcaaatgcacacattcctccagactacctccttaaaatttgtgagagaattggtcctttactagataaagagatccctcagagtgttcctggggtacagacattattaggtgttggtcggcagtctctgctacgggatgccaaagactgtaagagtacactatggaatgggtctgcttttgcggctctgcatagaggcagacctccagaactacctgtaaa

SEQ ID NO: 194054 - DNA, 714 bp, Homo sapiens
gaatagacttacttgcccagtgggtgacttttgacatcacagccaaaatttccactgcatatttcataccaactcaccctgaatttgcgtgtgtgactcatgaagaagcttgaagacacaactatacacgttcaagggcctttccaaaattcctctcctttgctgccaatcactaaccaccccaaagctcctcctcagaatctctcccttaaatatactgcttcaaggctggtcttgcaatgtacctttctctacagaaatatctgcaaaaatgctccagggtgtggctttccattgtgcatgagcaaacagactcagtttggttcagcaacaccccttgctactcttgttcccctcttcatgtagaacacatctctttattacatttatcccatttccccttaccctactgccaccagcaacgaaggagacatggacttgaagctctttagctttctgtgctgcgaaatctcaaaggcaagcaattctaaagggtctggctacccacttaaaatcagagcagggacgaatctatgggagagcaagaccaaactataatctcaaatgattgtgctgcaaatggattcataaaatgttaaagagggcggtaatgcctcagaaaagagaatcctcattgtggtgattgagctggctttaggatgcccacggtagtgatacatctcaccgtggagaagggagaggtggggctctttg

SEQ ID NO: 194055 - DNA, 140 bp, Homo sapiens
agcaatttttaccccacgcccgaatctagcacctattcaaggatcatgcgttttgttttgttctagagtcatctccctaccttttgcatcttttattaatacatcaacatatcagcgctctgggccactgttgtcttata

SEQ ID NO: 194056 - DNA, 383 bp, Homo sapiens
  misc_feature (330)..(330): n is a, c, g, or t
ttttgagagttatacgggccgcgtgtgctttattaaactcaggaggaggagtgattcagatggaaatggccaacagggatgagcgtcccacagagatgggactggatttagaagaatccttgagaaagcttattcagtatccatatttgcaggctttctttgagactaagcaacacggaaggtgtttttatatttttgttaaatcttggagtggtgatcctttccttaaagatggttctttcaattcccgcatttgcagccttagttcttcattatactgtagatctggcacctctgtgcttcacatgaattcaagacaggcattgtatncttagttttttttttttttgtgtggtgtatggaacgttataaaatgattataa

SEQ ID NO: 194057 - DNA, 326 bp, Homo sapiens
agatggaaatggccaacagggatgagcgtcccacagagatgggactggatttagaagaatccttgagaaagcttattcagtatccatatttgcaggctttctttgagactaagcaacacggaaggtgtttttatatttttgttaaatcttggagtggtgatcctttccttaaagatggttctttcaattcccgcatttgcagccttagttcttcattatactgtagatctggcacctctgtgcttcacatgaattcaagacaggcattcgatttcctgaagaccaaggaaagacagtccaaatataatctgattaatgaagggtct

SEQ ID NO: 194058 - DNA, 306 bp, Homo sapiens
caagctgcgcgtcacaccctcgccgctgccacaaaggatcctgggcagttcagacctccaagctgtgcgtccacaccctcgcctgccttgtcttctggacacttttgtgtgacataagaatgggtttgagggaaaaattattatttttctctgggtgatgaatatatttggttattgtctaaagcacttattaggcacctagttgcacagagtatggtgcagtgtagatataatccttaatttccagttgcttacagtattaagagtttaggacagagagagaatggaaagcaatactaacctctc

SEQ ID NO: 194059 - DNA, 476 bp, Homo sapiens
tggcagcagcctgctgaggctgaaaacccctgattagatgttctttgtgccctacaaagtagcttaaagtacatcttattttacctttatacaatcttacaactaggttatcggatgaaattatagctgtttaacagacgaagaacttagatctgatgatgtttagtggtttttccagaatcatatagccaggaccccaacccagatcttctgactccaagtcacatccattttttgttcttttgtttaagtcagagaagctagagtaatttcttcttgctttctcttagtgttcacattaaggagagctcttcagccagggagatcctcttttatgacattgggcctttatggaatcaggtaaccttaattctcttaattgccagagcagcagtgctattcatatgaaaatattattcagtaataccttttattaaatattctttttaggcttttcccccctcagatatcaaaca

SEQ ID NO: 194060 - DNA, 527 bp, Homo sapiens
catctgttaggcaaatataaagcaggcagaaaaacatgaaaagcgagactggcctagcctcccagcctacatctttttcccgtgctggatgtttcctgccctcaaatatcgaaccccaagttcttcggttttggaactcaagactggctctccttgctcctcagcctgcagacagcctattgtgggacctcgtgatcatgtgaattaatacttaacaaactctcctttatatatatataaagattgccaatatatatatattaagattgccaccaagacactttgggttggaatatatatacatacatatatattccattagttccatccctctagagaaccctaatacaatgaaaaattaatataacagtattctacactaactgatccagtatagtctcctgagtacatttttcacttttttgcttattgcatttatagaactcttggtttagtgcttaaagcaggagaaaaaatgaagaatgttcctccttttctcatctaatttaataaacacttttgaataa

SEQ ID NO: 194061 - DNA, 284 bp, Homo sapiens
ccaagtagacacacaaggaggagggcagtgctgagagacgggggaaggattagaacacaggctttgatgaccttggcagtgtgacatgaggcaagccattttacctctctgaacatcaattttctatgcatgaaataaataataataattcatggaggctgggcatggtttttttgtatttttagtagagatggggtttcaccatgttggccaggatggtcttgaactcctgacctcatgatccgcccgccccggcctcccggcataatttttaaaatgctcat

SEQ ID NO: 194062 - DNA, 334 bp, Homo sapiens
gcatacacctgtaatcccagctactcaggaggctgaggcaggagaatcacttgaacccaggaggtggaggttgcagtgagccaagatcgtaccactgcactacagcctgggtgacagagtgaaagtctctctcaaaaagaaaaaaaaaaaaaacggaagcttgggagtcagcttcccaagtttggatcctagctctgccactttagaagctatgtgatgtctttgtgtttctgtttcagcatgcataatgtgggaataagaataacctctaatgttattgtgagaattaaacgaattaatgcaaataaagatcttagaacaataaatatagtaa

SEQ ID NO: 194063 - DNA, 629 bp, Homo sapiens
aacagctggaatcagcagcactgaccaggttatatgtgtctggaggaaagagaaataaaatgagtgtgtgggagatggaggaagagggttaaatggggcagagaaaggggattctggaagccattcccagacagacaggagaaaatggccaggtcatcagaattgatgcaaaagagctattagagaggccaaagcatgtaactgaagaaagtccaggaggagaaatttcaaggatttcagaacagggcactagcaaacagtctcacaaaaggacgtaaaagtttgcaagtttgggtgtcaatgtgcagtgccccggggcttcatgtctgaaaggccagatcaacattatcctaaggtcttacatcaagcatattacatgagctgctggtaaacagtacagacaatcatggcctacagctgagcagatgctgatgctgatgctgatgctgatgctgatgctggattcttggttcgctaaatgcaaaagaggtgatcagggagaatggcaaggagaacctaggagcaggcttaggagaaactggcaagggtctcaatccataagatggcttgcttagagacagggctggtccagaagtaggggaaaatggttggtttgttctcagtgcatg

SEQ ID NO: 194064 - DNA, 634 bp, Homo sapiens
aaaaatcctctaccccacgtaaaaagagtatctggcatttaaggaaaataaaattatgatcagacttcaacagcttctccacattgtcagaaacaatccaaggacggtggggtgtactaggcatttcacatgcaggagaggctcccctcacgccttggggctcaaaaggacatttctttaaggcaaaatgcaggtggtggagaagacatctttctgtgatactttcagaaaaataaaataaaaatgttttttcttggctgggtgaaatgtgatttcactttttatgataaaagataaattataatcaaggatgtttaatggctgcaaatagatgtgatcctctgggctaagaaatattttaaagtgataaatagttgtaattagcatttctaaaaccaatcaactgtcattttctatgtaactaatgctattctaagctcagtgagtacagaatgaccctactttcttaaaccaaaaaccacgatacatggactggagacagagaaaaatagagcttactatgtgccaggcagtatcctcattgctttatgtatattaattactttaattcctacaaccctataattattgccattttacagatgaggaaattgaggcacagagagattaattg

SEQ ID NO: 194065 - DNA, 176 bp, Homo sapiens
aggtcgatggcgagaggtcaggatgcagtttgtgccataagtggaacaaagcaaagagaatagtccctgtaattagtcctgtgtttgaacttaacagcactactaagcagagagcttgggttccatctgaaagctagacctttagggattttccaatttagtgaaaaaagataaga

SEQ ID NO: 194066 - DNA, 445 bp, Homo sapiens
tcagctcggtaccttctttaggcaattcaaattaaggggcattccacaaaaatgtcgaggacataaaagacaaagaaagggccaggcatggtggctcacacctgtaatcccagctactggggaggctgaggcaaggagaattgcttgaacccaggaggcggaggttgcagtgagccgagatcgcccccactgtactccagtctgggtgacagagctagactccatcttaaaaaataaaaataaataaataaatccaacatctagttcatctagttgtactcacaggcagtttctgttacctgcttggttttttttccccgtttggtgtattggttgtatttttctgtttctttgcacatctcataatttttttattggaaactggacattttagagaaatgtattttagcaacctggggtactaaggtccccttcacctgttgtt

SEQ ID NO: 194067 - DNA, 401 bp, Homo sapiens
cctggtgctaaagccatagagggccttcaatggaaaaatggaattaaagcaggggatagagaccaagggcatgcccacaggggacaagaagttgttaggagcctggacaaacaggtgccccttaagttattgggtgtccccaaataacagctaataagtaccctgtactggggtggtggtggcatgccatgtcatcagtaaggcatcaggagtgagagaagagccaagatgccccctactgatagtccatggcagctggtggtgaaataagtcacttgggagacagacccataaagggcagccccagaatattttttaaatccccaaagggccaggaaataaggtacgagatatccattatagacaaagtaagggacccaggcacctggggggtaaggtcc

SEQ ID NO: 194068 - DNA, 415 bp, Homo sapiens
ctctatccatgaagcctaccatctgaggttgggaggaggcaaaggatataaaataaacaagtgtataatttcacatcctgctaagtgttatgaaaactaacaatagagtgctatgagagaaaataacagggaaagcctgtggtggcttacacctgtactcctagcacttcaggtggctgaggtaggaggattgcctgagcccaggagtttgagattgcagtgagctatgactgcaccattgcactccagccttggtgacagtttgaaaccctgtctcagaaaggaagggaggaaggaaggaagaggaggaaaggaagggagaaaatgaaagaaaggaagggagaaaaaaagaaagagggagggagagagaaagagagggaaggaaggaaggaaaggggagggaagaaaggatgga

SEQ ID NO: 194069 - DNA, 462 bp, Homo sapiens
ttagccggctgaggtggcgcatgcctatggtcccagctactcaggacgctgaggtgggaggactgcttgagcctaggaggtcaagcctgcaatgaactatgattgtgccactgtactccagcctgagcaagacagcaagaccctgtctcaatgggtgtgtatctcgtcccctctacatatgatcagctgctctgcagcagccatcacctcatctccatgagcagacctcatctactggacaaacgccatcagcccaaacggctccagcacactgtatgttaatgaccaactggtgtcagtaaaggtacgtaatgtatttattatgtaattctgaattatgtaacctatgtaatatgtactataatgtatgtttacagccaacttaatgtcctaccttctggtttttttccaggcccaagagcttatccagaaggcttcattttagtttgtatagttgcagct

SEQ ID NO: 194070 - DNA, 440 bp, Homo sapiens
ttgctccagcctgagcaacaagagtgaaactctgtctcaaaaaaagagaatgcaggacagaaatctggtgtgggttcctgctgcagttgtgtaaataggtttatgtcctactaggcctgaaagtaggatgggatatgttgtgaaaagtaggacggaacaagttgattggcagggctgcctttccagagcaggtagagagctggcacttggtcagcaggcctccagtgacagggctcagataccagtacccacgatagaggtcttgattctcccatgtgataggtaccatttccttagcaaagttccttctgacttttttctggaaaggggctggggtaggatagtggggagtagggatgtcctggctggtatagccattataagtttttcattagtctcctggattcagatccacttgttactgccaccctctcttacca

SEQ ID NO: 194071 - DNA, 375 bp, Homo sapiens
ctggaagctgcaagagatgtgatcttcttagactaggataaatacagtcagaacttgtagttgaaaggtttaagtgaagctattttttcaatgtctatacatgaatatgcttctagtttgacatagttaaagataacaaagtcaacaaaagtgaggaataatttggaaatattaaaaataatgcagcaacaaacacaattcagaacactaaggtaaaaaatggaaaaataaatcaaattctagatctgtttcccaaaaagatttgaggtccctttgaaggagaaactagaatagccccccaaaatacatcagcaagtaatttaaacctttattgtgtattgtatactgcacgtatgtaatatgtaatttttgtaa

SEQ ID NO: 194072 - DNA, 545 bp, Homo sapiens
gagtttcgtttacatgtcctcataggacccatttcctaacattttaatcattttagtcactctcctttggacgctatccaacccctgcttgctgtgcttgggttcaggtccagaagagctcttagtgtggtgataaagttctgaatggggcttcaagttgtggaagggctgtcatgggaccctcctgctccttgtttttacatcctcatgttatgtacctttaaaaataactcactacgttgctggttcatgctttgcctagatctcagattttctcttttccttagataaattcagtttcccccatctctcgagtggttagtttttactaccctccggattaaacttgtttctgtaatctttacgatagtgtcagcaattggccactatcaacaggaattgaaaaatgccaatccaaaatgcaattgctttaatacatatttgtgatcatatggatacctgatcttaaacacatatataccttgtttattacatttattttgaatattctctggccccatttggtattgttctctaattaattg

SEQ ID NO: 194073 - DNA, 267 bp, Homo sapiens
tagggggattaaatgatactccagttgtacactgtccccatctattcagtaaagaaagtttaccaggagtccaggataataaaaatcaaaacattttgtaacaagaagaaacttcaaaaattaatcagttcaccttgctctctgaataagatagcttaagccagaaaaaaataaccactttggacaagacagtgacagacgggttgaaaatcttaaccagtatgctaaatactgcacttttaacctgaagattttgtttgtttgttt

SEQ ID NO: 194074 - DNA, 305 bp, Homo sapiens
gattttatgacattaccagtaatataaatgaagataaaaaagagaagagtcttaacaaagactgagcccaacattaagaagtcagcgaaataaagagttaaaaagaatacaaaagaccggccgggcgcggtggctcacgcctgtaatcccagcactttgggaggccgaggcgggcagatgacaaggtcaggagatcgagaccacggtgaaatcccgtctctgctaattttggtatttttagtagagatggggtttcaccatctgggccaggctggtcttgaactcttaacctcgtgatccacctg

SEQ ID NO: 194075 - DNA, 462 bp, Homo sapiens
ggggagagtggatgctgcgtgggagatgagaccaggaaatttgccactgcatcattggtttttggacctttggcagatctgatataatggaaggcatttagagcatctgaatctattgactgtccaattcagtcgattgattgttcagtgttgccaacattttgactttagttcacagcatttctcttgaaatgggttggctatattcccaatcaaatactgattgacacattggcatcaagcattcttatgtgcccagctcagtggtggtcacttggtggaagaatatgatctatcaccaaggagttactacttagtttgggaggaatcttaagtaacatggaataatttggtctatcttagccccccaaaagattgctttcatttatttatttagccacgctttggcataattctttaacttgctattgggagatattttggttacccattgtcaataat

SEQ ID NO: 194076 - DNA, 579 bp, Homo sapiens
cctggtacagtacctgcagctcagtcaccaggaaacagtgcctgcagctcagtcggggcctggtatagtacctacagctcagacaccaggaaacagtgcctgcagctcagtcggagcctggtccagaaccgtcctcagcagtttcaactttctgggacgtggagtactcagaaggatcttatctcagcagtggaaatatttgggcctgaactaaatactgctctgatcctccctaataaacgttaaaagcaagtcctaaaaggagcaaaatgtttcagagtgacttcacaaacacaaaataatattcagaggaatacaaaaacaccctcattaagaaacaccagaaatgcaaagaatagggggaaaacccataacgaggaaaagaaaatagaaaaccacccagaaatgacagtgttagaatcagccagccaaggacagaaaaacaggtatttaactgtattgtctatggccaaaagcagaaagactgaacatgttaagaactgaaaatacagaagatactaattcagagtgaacttctagggaagaaaacaacatctaaaatgaaaatgatattagatg

SEQ ID NO: 194077 - DNA, 488 bp, Homo sapiens
gttggccaggctggtcttgaactcctgacctcaggtgatccacctgcctcggcctcccaaagtgctgggattacaggcgtgagccagcacgcctggcctggaatcttatcctggaagaaaaaagcattgttgaaggtctgttatccttcagagatttaaaggggaaaggaggtaaaacatttttgagcatacactatgtgacaggtattactaggtactttttaagtgtttgttttactttgtgaataaagtgttacacgtaagaaagagtaagagaggccgggcgccgtggcttacgcctgtaatccaacactttaggaggccgaggctgtcggatgacaaggtcaggagatcaagaccatcctgtctacagtgaaaccccgtctctactaaaaatacaaaaaatcagccaggcgtggtggcaggcgcctgtagtcccagctactcaggaggctgaggcaggagaatggcctgaacccgggaggcgg

SEQ ID NO: 194078 - DNA, 780 bp, Homo sapiens
gagttatttcaatttgagatacaaagtgataccttatttttcttaatgaagcaagaaatttttctattttaaaaactgtcttggcagggcgcggtggctcatgcctgtaatcccagcactttgggaggctgaggcgggtggatcacttgaggtcaggagttcaagaccagcttggccaacatggcgaaaccccgtctctactaaaaatacaaaaattagctgggcgtggtggtgcatgcactgaggcaggagaatcgcttgaactcaggaggcggaggttgcagtgagccgagatcgtgccattgcactccaacctgggcaacagagtgagactccatctcaaaaacaaaaacaaaaaacaaaacagaaaactgtcttgtattttggctttgtggtcagtttctgaatccaaagttaagtattttttctatatttcacagtccatgagctgtttttaagtcttacttttccttttcttagaaatgttagtaacaactagggccgggcgtggtggctcacgcctgtagtcccagcactttgggaggccaaggtgggtggatcgcttgagaccaggagttagagaccagcctggccaacatggtaaaacctcgtctctactaaaaatacaaaaattagcagggtgtggtggcgtgtgtctgtaaccccagccacttgggaggttaaggtaccaggatcgcttgaacccaggaagtggaagtttcagtgagccaagatcgcacccctgcactccagcttgggtgacagagtgagactctgctt

SEQ ID NO: 194079 - DNA, 233 bp, Homo sapiens
  misc_feature (4)..(4): n is a, c, g, or t
tagncggacctgctgctgattatttgttgcatgtgtgcttttttttaatcataattaagaaatcactgccaagactaatgttatgaagcttttttcctatattttcttctaggagtattttacagtttcttgtctttaattctttaatccaccttgaattaattttggagtatgatgtaagatattagtccagttctgttattttgcatatagatatccaacaatttccaaca

SEQ ID NO: 194080 - DNA, 222 bp, Homo sapiens
atttgttgaactgaattcttttctctatgctgctgaaaaatttacaaatgtgtcttcgaacaaatctacagtcaaaaagtgcactcccgatggggtcgtaggagtattttacagtttcttgtctttaattctttaatccaccttgaattaattttggagtatgatgtaagatattagtccagttctgttattttgcatatagatatccaacaatttccaaca

SEQ ID NO: 194081 - DNA, 742 bp, Homo sapiens
gaagttattacaaatgttatttttccttctttcctccctcctccattgttttaaacccatcccattttgtttttgttctaatctataaaggatataaatccctgactttgttcacagatatgattttcttatttataaagtcatatgtaaacgtttatgtgtatatataaactatgtatataaatgcagactgacttttgtacatgtaagaaagacatatacagaacactcagattttctttttttaatgacatgacataactttttagcttcttcatatatattctcatatataatgtagttttataaatatcagagctgttaagaaccatgcttacaattttttttctctattacaaacacttcctcaaaaattggtttaaggaaaatctcagtgccactactaattaataataaagcttgtgtggtccacatatttctaaaatcatacattatctgaaaagtaaaattatctttaacttagttttaaaatgtaagatagaaaattttatagtaacatagctgttatattaagaaagcccaactgatgaagtttccttacagtgtagtattgtttttctgtgataagattttctatgattaaaaggcaatttcatgcctgtgatcacagcactttaggaggccaaagcaggaagattgcttgcatccaggagttagagactagcctgggcagcatagtgagactagcctgggtaacatagtgagaccgtgtctctacaga

SEQ ID NO: 194082 - DNA, 186 bp, Homo sapiens
tattattcttcatagcaactgagactatgtggtacatttgttcatatatatatacatatattgagtgcctctccacgctggaatgtaatccccacgaaggtagaaatcttgtctttttcactggtgtattcccagtacctggaggagtactcattcaataaatctttgaagaagggtaccgagctc

SEQ ID NO: 194083 - DNA, 147 bp, Homo sapiens
gtcaagctaagccttttcccaaacacaggaacacaacactggttgaataataaatgaacacaaaagaataccaaattctctttgacattggccttggtgagcaacaccagctgaactgtctgcggcagcgggggaccaggaaaacat

SEQ ID NO: 194084 - DNA, 415 bp, Homo sapiens
ccaaggtcatctgtcagcaaagtaaactgattacagtaattttatcttttaactaagttgcacatcatagtatattgatcctagttgagtaatctgattcaatttgtgtgaaattgtttgaaatactactcagtaaaacttgatctggaaaagagataaagttgtgtttgggtaccggagacatgatcagaagcactgagtagattaacctaatttacctttaatctttagtgttatgagtagtctaaggtcctgtaaatacagaagggtcttcttaaaagtgtactttttttggtttaactttacaagggataaattagcaacctttcttgatctcatataacatatcatgttggttctccaaaaacagttatcgatgaattatttttctcatataatttattctttgttgaca

SEQ ID NO: 194085 - DNA, 490 bp, Homo sapiens
gctgacccttgttggcttttgtgtatacccccctcctctggcccctgtggaaatggcaggttcaaggaggctgcgtcctgcatctttgagtaattgtggacatcgcgtgggagcccaggtctgggacagtctcctcctgacaggtttgggtcttccctgctgaagggctgacatgggagagagctgctgaggcgtcctgagaagacacagtgcccgtgctaagctccatcacttgtttcctcccacgatgggtgtcgtgcttgccatgggtacaaaggcacagccacccactggccaggctgaaggttctgtgctgttggtttgcccagggtgataggcagctatgaccctgtccccaggtgtgtctgtttgtgaactactgtctgggatgagggccatgacctttattcagcctcaaaatggagatgttcttgtctctggtattaatttctgcctggataggcgaccgtgcaacaaagagaagccagcc

SEQ ID NO: 194086 - DNA, 491 bp, Homo sapiens
atcatcacaagagttattaagtgttcggcaggagtcagtggaaccccagcccaggggtgtacccaagaaagagagggcaagaagcccagacctgggaccacaggagcagatgaacccaaaggagaagctcaaaccttttcaaaggagcggtgaggagtagattcatatgggaagatagactgccattccaagttgggaagtagggttgggaatagtgagtgggaaagggatttcaggagtaagtggaaattgcagaatatgtggttgttgacatgtagtttagcctctggtattcatattacctcttgataagtccacaagagaatggctccctagtttttatcggaacttggaattattttatttcctcttggtaatgatgatagtataggtcattattttctagataaaaattcttttctatacttgaaggcacatcttccttttggttgttttccatcttcaaattaaactatatttgttaccttaag

SEQ ID NO: 194087 - DNA, 388 bp, Homo sapiens
tgctttctctttacacagaaaacctaatttgcttcctcctgcctcaagacctttgcacattcctgctcctggaatgttcttctcctgttattaactccatgtcactttctcacaaaactgttcttcatcctccagaagatcccaggccccgtttgggctttcatacccccggcacattctggtggggtgctaaactcagattatagtgatacacattggttgaataatatatttatcagactataagctccatgaggccagagacttgtctactttgcttaccacagtattcccagtaactagcacagacctaccaaagactggctgctcaataatttaaagaataagtagagtgcagtgcaaggatgacatgcgcaaggtgtatatg

SEQ ID NO: 194088 - DNA, 568 bp, Homo sapiens
ccaccttagatttcccttcaggtccttttggccagacttggattacatggccatcccctagctgcaaaggaggctggtaaatgagtatctagcatttctagccttcagagaggaaggcagccctaccaccaaggaaaatacattgagaatggctcttaggttggcaatcagcactgccacctgaggcaggaggtaaccagacaggtctgtctgccaacagaacctacgcctttaacctctgctccatgatgtcacctttaagattcatccagctcttaaattacctttccatcacaaacactgtaatgtaaccacacccccaaactcactctacaccttcttctctcccatccgtgtacatgaagttccctcaacctgaaattctgcctcttccacatctgcttttagacataaagtctactcttaatagatgctactcaaacaccactttcccaataaagtcttccaaacaactgtggataggctttgcaactcctctctggtctcctgtagcataagggaacaccctgtggactccacaagtttggtgattgaattggactgtttt

SEQ ID NO: 194089 - DNA, 435 bp, Homo sapiens
  misc_feature (13)..(13): n is a, c, g, or t
  misc_feature (115)..(115): n is a, c, g, or t
  misc_feature (117)..(117): n is a, c, g, or t
gactacggcggcntcgtggtcttctgcatcttctttggcatctctacggcatggtgggggccctgcagttcgaggtgctcatggccatcgtgggcacccacaagttcttccaagntncattggcctggtgctgctgatggaggcggtggccgtgctcgtcggggcccttcgggaggggtcctgctgtcacccaggctggagggcagtggcaccatcacagctccctgcagccttaacctcccgaactctagccatcctcctgcctcagcctccagagtagctgagactacagatgtaagccactgcacctggcctgtttctttttcctccctaccccccaaatgtctcagcagaaatcaccccttttgttagctgtaagtaacaatgtaccccgtcatccatggcattagagaatgaataaaatacagtaaaagc

SEQ ID NO: 194090 - DNA, 579 bp, Homo sapiens
tggtgtactgagtgatgtgactgatggtgtactgagtgatgggactgatggtgtagtgactgatggtgtactgactgatgtgactgatggtgtactgactgatgtgactgatggtgtactgactgatgtgactgatggtgtactgactgacggtgtaccgactgatgtgactgatggtatactgactgatgtgactgatggtgtactgagtgatgagactgatggtctactgagtgatgtgactgatggtgtactgactgatggtgtaccgactgatgtgactgatgatgtatttactgacaccatctttctttaacaggggtcctgctgtcacccaggctggagggcagtggcaccatcacagctccctgcagccttaacctcccgaactctagccatcctcctgcctcagcctccagagtagctgagactacagatgtaagccactgcacctggcctgtttctttttcctccctaccccccaaatgtctcagcagaaatcaccccttttgttagctgtaagtaacaatgtaccccgtcatccatggcattagagaatgaataaaatacagtaaaagc

SEQ ID NO: 194091 - DNA, 232 bp, Homo sapiens
aggatacaatagtgattaagacagttcaatctttcttgtcttgaagcatatattctagcactactgtgaaaacattattcagtcaagttgaatattgacacattcatgcttcatttatgtttcaaggaataaggtgcttttatattttattttttaagtagataacaagtacaagcaccaaaactgtttttatgtcaagccatttttttgatacacatttttttttttttga

SEQ ID NO: 194092 - DNA, 424 bp, Homo sapiens
tgcccacctcggcctcccaaagtgctgtccacaaatggacaggtgtgagctaccacacctggccggggcacgatttttaatagaaggtgcgatggtgactgttcttgtctagcccttgatcttaagggggagtctgatgtcttgtcatcttaacccttagcattatctcctctaccttttccatgttaaagaaatatcctcatgaaagagttttaatctgggagtggtgtgctgaggtgtgcatttgaattgcttgggcctcagtgtgcagaggggatcagagtgggcaagggcaggtatagggaaaggagtgggaaactctttcagtattgaggcaaggcatggttgcagtccctggggcaagttctcctctgtgggaggcaggagtgctgggtggatttcataggtttttgggagatggaat

SEQ ID NO: 194093 - DNA, 265 bp, Homo sapiens
gaggaacatcgaggccggggttggcggaggaaaacgggggatgctgtgagtggggttccgggcgaaggcagaatggataggagagatggcagcgaggtggggcatgaagcctccaggaaaaagctccaaaggaccagaacacgggttccggagcctggggttgggggctttaggaatagacgggaagtgggaaacgggaaaggggtgtggtaggtggaaagagggattgtggctgatgaacctgggggagacggaggcttgggca

SEQ ID NO: 194094 - DNA, 195 bp, Homo sapiens
tcaactggctgggagtctgaacatgaaacacttttagttttccaatacgtactctcaccgcttctgtcaaatgctcctctctagctggctttcagttttccttaataatatgtgtctgagtccatctctttaagtcacttcaatttatcaaaactattttgtattagctcttaaagtatactttagtgctgtttt

SEQ ID NO: 194095 - DNA, 578 bp, Homo sapiens
ctctgaggatcctcaacgacccgaagacgaaaaagaaaaaaaaaaacaactattgctaaaaaaccaggaaggtgtggggaagaaacaatcttgatgaagataaagtagcttcaggcatcaacgccctttaaaaggcataacttttgctagaaaaattggcaatatttacattaatatgtggcatttaagtattcagaataattatctttcttaatgtactatttctaaaatcacctcccataaattgtcttagggttcgtttaaacgacccgaagacaagaacccagacttttagacagacgcacctgttgcattgtcttgagccagagcctgggagagaagagagagcgtgcaagagagagctcagagcaggcaggcagcccaccccctgcagcagtgctgggcttcactggagcccctgcaggaagtccagcagccctgtatgccactcctctggtttgtccaggtaacaggggtgccccgcccccttcatgatcagcacccggtggttgggcagctgcttcaggtgctcaaagctggtctgacccatggggtcctggtctccatatacaatcaga

SEQ ID NO: 194096 - DNA, 823 bp, Homo sapiens
gtctctatgaatctgactgctccaggggccacataagagtggaatcacacaggactagtccttttttttttttgagacaaagtctcgcgctgtcacccaggctggagtgcaggggcacaatctcggctcactgcaacctccgcctcctgggttcaagcgattctcctgcttctgcctcctgagtagctgggattacaggtgtgtgtcaccacgcctggctcatttttgtatttgtagtagagacggggtttcaccatgttggccaggctagtcttgaactcctgacttcaggggatcacctgcctcagcctcccaaagtgctgggattacaggcgtaagccaccgcgcccggccacgatttattatttttagaatggatagtcctaaccactaagcattttagggcgctaccctgtttctgtagggcatattgacatcctgaatgcaaggaagtctggttaatgctattctctcaaatacagggttttggtggattttttcacacatattctataaacatctaagatctgttcactgtttgactctggttgattgggtaatttattcaacaaatactacttgagagcctgtcatttaccagcttctgttgtgggcctgtgaatatattagggtgtgatgacagatgaggtcttgtcttttggaaacttaacaggattgttgggggcggggaacacaaaaggtaagcaaataaactacaaattgagaaaagtaacatagaggtgtccagttcaggactctgatagacactgaaaagggggagacctaagggtggtcagtgaagttctttttggggagagtgagg

SEQ ID NO: 194097 - DNA, 444 bp, Homo sapiens
acaggtttgagtcactgcgcctggccttgaagcaacatctttgacgctgtcatgccatgtagtaatgtcactcaatatagtaatgtcactcaataacaggtacaccttctgagcaatgtggtgttaggcaagtgcattgtcacgcgaagatcagagtgtatttacacaaacatagatggtacggcctattacacgcctgggctatgtggtaaggcctattgctcctaggctgcaaacctgcacagcatgatactgtactgagtcctgtaggcagttgtgacacaatgttaagtatttgtgtatctacacatagaaaaggtacagtgaaaatacaatataaaagataaaaaacagtacagtatagggcacttaccatgattggagcctgcaggactggaggttgctctgggtgagtcagtgagtgagtggtgagtgaatgtgaag

SEQ ID NO: 194098 - DNA, 299 bp, Homo sapiens
gagggcctcctggaggcatatggaattgtgtaggggcatttttggttcttccaatgtcttgagatgtgcattcctgaaaaatattaggggtagccaggtatggtaaatgtcctgttcagaataccaatattaacttaatacctcattaatacagttaattatgttcttttttgggcatcaattctgcttttaagtatagttaatcctttagttatggagtcattcatttttctagattatgtctttcaagattcctgagagaaactgacttatcccttttaaaatctttgattaatata

SEQ ID NO: 194099 - DNA, 451 bp, Homo sapiens
cctacaaagtgcaatgccaagtctgaggacacaccaagaagtataagttgtctggacacaagaagtttgtactccagtatagaatgtgtgccacatgagtacatgtgaaaagtgaataatataaatgtaccctatactacctgctaagtggattacatgagcattacaggcagaatgttaagccatgcaccaaagacacttttgacaggtttgggatgattgtaaaccatttcctaggaattgttcataaagcttaagacactagaagtgagtgttaactttgcaggaatagatcattaggggctgtttggtactaggatatttcataaagaaggtagaaattgagccaggcttcaaatatcccaggactgagtgtttggttcccttgtccactccatctgcattcctcttattaataaataatatcaccatccaccaagctgctcaccaa

SEQ ID NO: 194100 - DNA, 139 bp, Homo sapiens
ataaattagcaaatgtgagaaagaacaaatctttcttatagaaaattcttctcaaaatgtagaaagactagaaaatcatcttcagaaatctactgcaatgcttgttatattcaagatgcttatttattaatgactgtga

SEQ ID NO: 194101 - DNA, 285 bp, Homo sapiens
tattcttacaatattagtataatatgtttcttctaagataagaaaacaactagaaaatttgtcattaaaattgctccaacctctaaaaattcttacacttaaaacattttgcagcctaattgacaaggttagcattttatacaggtctatgtcttctaaactattattgtgtttttgcaatatacttatcaattaattgtgataacaattaaattgggtattgtggtaccagaattacaatattaccatttatgatttcttatatttagtaattaagatattaaa

SEQ ID NO: 194102 - DNA, 315 bp, Homo sapiens
tggtccctcctccttttccctacaacttgttaaagaaaactaagttatttatcctgtagaatcgcctgttcagaattttgttggctgcgcccccatggtgttctttaatgtgttcctttgtgctgttcactctccatttacagataggtgtaggagcttgattcgattcagggtttttgtcttttggccgaacacttcataggtagtgctgggtacctgctgagtcttatcagaaggctctctactgtaagattgaccagtgggttccggtgttgccattctcatctatccttacaaggttttttatcagttttt

SEQ ID NO: 194103 - DNA, 189 bp, Homo sapiens
tcaccagtcagtgccccctttccatagccaccacaagcacacacacatgcatacacactctctattaagtacctataaaacactaaacttataagaattacataatatacatattaaaaatttccagtcatacaacattcaacacccaattatctctatttcatcatttccaagagagccaaaattgca

SEQ ID NO: 194104 - DNA, 533 bp, Homo sapiens
ctgctctagactgagagcagggcccccgatcagtatggggcaggcgggggcagggtacagcaggtcccaggcttggaggatgtggggaacacgggctggcaccaaatgtcgagggataaacttggccagtgggggtcagggtcccatgccacaaaggccatcatctgtgagcactccccacgtgcggggcgctagaccacagcttcactcagacttgctcgttgactcctcacagatatttgatgaaggaggaaggctctattactgttattatactgtgtgcacagatagggaaaccgagtttcagagaggtcaagcaactgctcccaaggcccaggcaaataaatattcctctgagcaaaggtgaaggcacagcatgacctggtgctgagcccttcagcactggctcagtgacagccctgagtgaggctgtggggttgcaggagagggagcagtgggaacagggcctggggtcaggcatcagcctcaaagcatggcaattggttcccaccacaaaatcacagttcaccctg

SEQ ID NO: 194105 - DNA, 335 bp, Homo sapiens
tcccttaagcataatgactgcttctttggtccatttagtttgggtcttttgcaatttatcagagatgagttccctggagtctgggatcccattcaaagcagtgtgggcgcacgcataagtgtgttgattgcatttccacaatcctcagattctgcccttgagaggggctgtccctccactgattcctggaatggatgggcaaacagagccccagtgtctccaaaagcacttcagaatccccctcaccaccaccgccacgccgccaggaaatgaattaacctggacacccagacagctgccattaactcgacctcccctccataaagaagcacctt

SEQ ID NO: 194106 - DNA, 569 bp, Homo sapiens
ttcaccccacacaaagaagctatttagaaattactagaaatagaaaattaataaagttttacattaaaagaaagcccagagggtacataaaggaaaaggacaactgatatcagaagagcagaacaaagggagggaacagaaaatgtcacaatcaccgtttataaggtttctgtcaataagaaaatggttaacacattttagaaagatttcaaatcatcagaaacagttaaaataaaagctggtgcttaaaagtttcagttacttcatcacctcattcactgacactgccaggtaaatgaggcatgactattgactattacaatccgtccatataaaaatattcctaacaaaaaacttcacactaaaaaaatccatatataatatttctttcaatgcagcttcttgatggttttattcagccagtaaccttcattattcaattaatacaaaccatatttcatgctgctccagttggtggcatcattttcaaatttactaaaaataacaggaacaatctactgaagaaactcatcggccaggcgcagtggctcacgtctttaatcccagca

SEQ ID NO: 194107 - DNA, 318 bp, Homo sapiens
aaaagaaaaaaaattagccgtgcctgtgattccagctactcaggaggctgaggcaggaggactgcttgagcccaggagtttaagactgctgtgaactatgatcatgtcaatatattccagcctgggggacggaatgggaacccggtctctaaacaaaacaaaaatttgaaaaggagccctacttaaacgtttacaaagcgcaatagaaggtgaccctcgtgagcagaccttcctaatggaaggctttgcttttagcgaggacctgaggtaacaagactacatttaaaggagaatgtgaactaagtgtattagaaatgg

SEQ ID NO: 194108 - DNA, 612 bp, Homo sapiens
tgcctgcctcagcctcccaaagtgctgggattacaggtgtgagccaccccgcccagcctggaaattgaatttcatagcattttcatgtgtcttgaaatactggtcatctgactttctttccccccaatcattaaaaaatgtaaaaatcacgcttagccacagggagccacagccctagcagtaaggtgttagggaacgcttggggcggggatctaactgctctttatatggacttctgagtttctcttgtgggaattcctttctaaaggacttaggttttggctcttctcaccttattactaataagcctggttaaaactttgaaatctgtctcctctacttattctctttgtgtttttatatcctttcatttctttactgtcattttaggagaattttggaaagtagaatgatgcatatatgcagtcttgcatgttcctacttttatgctgcattttttaaaagtcacatctaccttcattttaatagctttgtttctctaagagtaagaaatatcttctgcaggattggagatcaagaaatttttttgctttcttccttcgctagaataataaatcattctgctattctttttggtctttttatgggagg

SEQ ID NO: 194109 - DNA, 587 bp, Homo sapiens
caatgttttttcccctcaaacattttcaatccacagttggttgaatccatagatccagaacccatgtatatggagggctgactatatctgagtttgaactatatctttttgctgtgaaggagataactgaaaacactcaatagagtctgctaagtagatggcagtaatgaatcgacattaatttcctggtatagatggcttaattttgcttatacagacaaatatccttgtttgtagggaaagtatttggtgggcgatgggactacaaaaaccagtaaattactctcaagtgttcttgaattatacttctaatttttctgtaagattgtaagtatttccaaaaaatacatttaaaaaatttttaggttgtataggcttgaatgatctgccaaaactctactttttccccaaaagccctactatttttagtgcataattttgccgaacattaggttttaaaggaacacacatatattagaacataaatgcaagaatgtgttagtgaaaaacaaaatcctgtatatggaaaaggatcactaaggagacaaaggtcttgaaattttaacactagaatatttggaggggaa

SEQ ID NO: 194110 - DNA, 549 bp, Homo sapiens
agaaggcagcagatgcaaaggccatggggcaaaaacatcttactgggcctttagagctgtgtaaaagctaatgagtgcccagaacacagtgagaacagaggagaattgcataagctgagcttgaaaaggcagcagaagagatgccacatgacacaaaggagtttggatttgaagccgattggtaggttttaaccaaagggacgaaatcatatgatttgtatttggaaaatatcaattcggttgccaggtaaagaatggatgggcaggccaggcatggtggctcacgcctgtaatcccagcactttgggaggccaagacgggtggatcacttgaagtcaggagttcaagaccagcctggccaacatggtgaaaccctgtctctactaaaaaacacaaaaattagctgggtgtggtggtgcatgcttgtaatcccaactacttgggaggctgaggtgggaggatcacttgaacccgggaggtggaggttgcagtgagccgagatcgtgccactgcactccagcctgggcaacagagcgagactctgtctca

SEQ ID NO: 194111 - DNA, 132 bp, Homo sapiens
gttacactcacagtactgttgtttgctgccatggtgctttaggaagtgtgagagttcccgggaggcagagtcaataatgcagactacacgtagtgaaaacatggccaggagagctgtagttcaggctctcag

SEQ ID NO: 194112 - DNA, 518 bp, Homo sapiens
atgcgcgacgcttccatcaatctgtgttttttgccttctagtatgctttgtaattttctcgatagcgagataatagaatactgggtaaaagtaactgctgtaaataagcccttagtgatatgatggcaaggtgtgaggggaggggaaatgattttcaatggtttgtagtcctataattatgtctcagtcttttagtgagcctgtgtctctgtactacaaactttatcagtgcttctccgtatttttaccctttcttgggtggcacaggatggctagagtaggctggagttggatattttctttctcccccatggaaagttagatttggctggacctaggtattttccttccctcaggtgagttaggctctgacaaaacactagcaggttaagttctgattatagtttcttctgagaaactattcataagaaagtattcagaagagtagaatgctctggcgtatttaaaaaatgtttattttttcctccccttgatggaagcgtcgcgcattttttttt

SEQ ID NO: 194113 - DNA, 436 bp, Homo sapiens
acttcaggggacagggccaaagcctcctcatgtccccacacttctgtggagtcattagagggcagacttctagttagttattgattataagtctcatttcaaaacatggaattaaatagtcccagagaagtgcaggaaaaagtgatactgacattgatcacccttgggttgtaactatcgcagatacaggcaatagttaatcaaagtcttgttccttcactctttctttctgggaatctctctctctctattcatggtcaggcaatgaacttgggtatttcagaaagctgtggcaagatgtagttagtccagaatggttcaggaggtaaggagggggtgcctgccatctacatttggttttgtccagttctgatttgtgttcacagttttcagacccatagaaggtgaagggttttaaatcttaccatatctcatc

SEQ ID NO: 194114 - DNA, 260 bp, Homo sapiens
tggacttgacactctgaagctcctgtgggttccagactgccctgctggctgcgatgctggccctgcctgctcatgaatgctatccagcccatcccctgccattcccaatctgaacatccaacaaattgccatcaatggagaaccagccatctggaaagatttcttcaaatgcagagagccaggatcaccaccactgagccctctcagttctctttgtccttttatggtctttgtcccatctctccttgcagtcccacagg

SEQ ID NO: 194115 - DNA, 1027 bp, Homo sapiens
agagacagttgcttgctatgttgcctaggctggtctcgaattcctggcctcaagcaatacccccaccttggcctcccaaagtattgagattacaggtgtgtaccacccagactagccaatggcaatacttccacactgcttcctgccagagagtcgtcaaggaaaacatagcaaactgaatcgattgcattctagttatgagttgtagtggactgaatagtgtctccctccaaaattctacacggaacttcagaatgtgacttaacttggaaatctttttagatgtaattaaggtaaggattgagatgagatcgtcctggattaagacaaaccctaaatccaatgaaagtatccttacaagagccagaaaagaaaacataggagacacacgggagaacgccacgttacgatagagacagagattgcagttacgctgccagagccaaaaatccacgggagccaccagaagctgaaagagtcaaggaaggatcgtcctccagagctttggagggaatgtggctcctggcctccaaaactatgcaagagtacatttgtgttgttttaaggcactaagtttacggtaatttatcatggcagccctaggaaactaatcccctagctttaatggacaaaaatactgcacgctgcttctgctgctaataaatggccagctgacaaactccaggaaaaggagaaagcagttatagacagggtttcaccatgttggccaggctgctcttgaactgctgacctcaagtgatccatccgcctcggcctcccaaagtgatgggattacaggtgtgagccaccatgcccagccttcaacaataatttttgatgtactctctctgccagcaataactgatacgatggagtagaaagatcaaggacagagatggagacaccaaagaagaaataaattaaatggcatctccaaatcaatggtaaaccagggaaatgaactgaatcagttccgtctgtctcctcatgtttaaggaatgaataatttgtactctgggagatatat

SEQ ID NO: 194116 - DNA, 431 bp, Homo sapiens
tgctagaggatcccctcatgggtttcctgaacagccactaggtctgaagaaattaaaagaaaaaaattttttttacttcctgaaacaaatgaaaacagaaacacaacataccaaaactatggacaatcaaaagcagtgttgagagagaaatgcacagcaataaatgcttatataaaaagtggttatttcaaataaaaagtggttacaatgaacctcaatggactagaaaagcaagaacaaacataacgagaattagtaggaggaaagaaatggtaaagatcagagtagaaataaacaaaatgaagacttaaaaaaaatcaaacataaagttgacattgtgcaaaaataaaactgatataccactagctagaccaaccaagaaaaaaagacccaagtaagatcgaaaacaaaaagtgagacataaaaattga

SEQ ID NO: 194117 - DNA, 163 bp, Homo sapiens
acaaacagaccaaacagcatgatgaaaatgattaccttttctttttctggcttctcttcttgttgacaaacaaaaattaacaggaaaaaacttcccacttaaaaagttgtactgattgttattggtatgttgataacatctttaaattgggtatttgtggtaa

SEQ ID NO: 194118 - DNA, 271 bp, Homo sapiens
ctgtgtaagaatgcgagactctgtctcaaaaagaaaacaagtctttctacgggtgtataggattagaggttgactttctccactcagctgcttgagtgacagagggcttctgttcgcctcagttgtctggtacaatcagattctcaataaatatgttgaatgagtgaatgaagtagtgtcagcatatacagaggcaagaaaaacctggtattggacgaatcgtgtagggcgcatggtagagaaatgagggagtaagatagacagggatgtg

SEQ ID NO: 194119 - DNA, 211 bp, Homo sapiens
taggattacacgtgtcaccatcgtggccaaccagcaagctctcttttaatgattcagagtctcaggccatagcagtataagtatcaaaacatctattcccaacttggagttgagatttctaatacgaattctattttctccataatcataaaatagcatcaggaaaagtctcttgacatcttaaaatacatatcactggaaagtagatctt

SEQ ID NO: 194120 - DNA, 631 bp, Homo sapiens
atattttttgttgttgatatttgttctcttttatttatttactaacaaaatagtaataaaggcgttacatttaggctacactagatttaatatttatttaataagatcatttctcttatttctcttcctcctccttttctttttctcctcttcctcttcctcttactcctacctctcctccctgtccttctttttctcccaatgctcaagtagatccaagccccccacttttggaaggagagttgcagtgttttaccccaacagggtgactgcttaataaaagaagaaaaatctgcttactcttttacaactaaatggttacattgattacatttagttacaacttttatttttttacttgggctatgaataaaccatttttgtccagagtaaaatataaaatttctgtaggatatcttctgtctttatgtccttctcttgttgcatttttataaattatttcttaggctgaaatgacctaagctttcaagtacatgctgtaggagcaatactgacatttgttccatcccagtctttcctcggagaaagtgtcacaatgtaaatatcctagaagacctcaggctgcaaaggaaaaaccttcaagtgtgccttgaaaagtcttttttatgtg

SEQ ID NO: 194121 - DNA, 314 bp, Homo sapiens
  misc_feature (10)..(10): n is a, c, g, or t
  misc_feature (12)..(12): n is a, c, g, or t
gttacactgntnggatgacagtttcactggaagttctgcctatatcccttgccgcacctggtgggccctcttctccacaaagccttggtgtgtgcgagtctggcactgttcccgctgtttgtgccagcatctgctgtcaggtggctcaggtcttcaacggggcctcttccacctcctggtgcagaaatccaaaaagtcttccacattcaagttctataggagacacaagatgccagcacctgctcagaggaagctgctgcctcgtcgtcacctgtctgagaagagccatcacatttccatcccctccccagaca

SEQ ID NO: 194122 - DNA, 290 bp, Homo sapiens
  misc_feature (10)..(10): n is a, c, g, or t
  misc_feature (12)..(12): n is a, c, g, or t
gttacactgntnggatgacagtttcactggaagttctgcctatatcccttgccgcacctggtgggccctcttctccacaaagccttggtgtgtgcgagtctggcactgttcccgctgtttgtgccagcatctgctgtcaggtggctcaggtatgagaaacagccccttgggccattctcagtgaagagaacattttgagggaccacctaggctgagcaagtgggacttactagaacagatatttgtcttgttttaacctcaactgggacttggattatcctaaaatagca

SEQ ID NO: 194123 - DNA, 220 bp, Homo sapiens
agggcaccacggtgcgctctttttccaaggtgcctctcagccagggtccattcacctccctgggtagaggttggaccagaacagctggcgagaagggttgggctggggagagcagcagagacaaatcctgtgccagtttcacttcattcgggagccatggaagccttttgagctggggagagaatcaatcaatcagactgatacttaaaaaatgtcattc

SEQ ID NO: 194124 - DNA, 676 bp, Homo sapiens
tcgactctagtagtatcccggctagattctttgcccttcttggcactttcctttcgaatcatccttctggacaaactttgatggagaatttcacaccacgctggaaaaatgccggttatgaaaggattactggcgccgcaaaacaccttcctggacaccatcgccacccgttttgacggaacacatagcaacttcatccttgccaatgcccaggtggctaagggtttccccatagtctactgttccgatggcttctgcgagcttgctggatttgcccgaactgaagtcatgcagaagagttgtagctgcaagttcttatttggggttgaaaccaatgagcaactgatgcttcaaatagaaaagtcactggaggagaaaacagaattcaaaggagaaattatgttctacaagaaaaacgggtctccattttggtgcctactggatattgttcccataaagaatgacaaaggagatgtagtactttttctggcctcgttcaaagatataacagatacaaaagtgaagattactccagaagatacaacagaagacaaagtcaaaggaagatcaagagcagggacccactttgactcagcccggagacggagtcgagcagtcctttatcacatctctgggcacctgcaaagaagagaaaagaacaaattgaaaataaata

SEQ ID NO: 194125 - DNA, 447 bp, Homo sapiens
tcgactctagtagtatcccggctagattctttgcccttcttggcactttcctttcgaatcatccttctggacaaactttgatggagaatttcacaccacgctggaaaaatgccggttatgaaaggattactggcgccgcaaaacaccttcctggacaccatcgccacccgttttgacggaacacatagcaacttcatccttgccaatgcccaggtggctaagggtttccccatagtctactgttccgatggcttctgcgagcttgctggatttgcccgaactgaagtcatgcagaagagttgtagctgcaagttcttatttggggttgaaaccaatgagcaactgatgcttcaaatagaaaagtcactggaggagaaaacagaattcaaaggagaaattatgttctacaagaaaaacggggtctctttctttcgtgctcactggaga

SEQ ID NO: 194126 - DNA, 607 bp, Homo sapiens
  misc_feature (57)..(57): n is a, c, g, or t
  misc_feature (61)..(61): n is a, c, g, or t
  misc_feature (67)..(68): n is a, c, g, or t
  misc_feature (85)..(85): n is a, c, g, or t
  misc_feature (100)..(100): n is a, c, g, or t
  misc_feature (135)..(135): n is a, c, g, or t
taccccaccactcctatagatcagtagaatgaaaaagaaaaaaaacacttaactganagcnaacaanngaacctaattatactgnatacaaataccctanccatgctgtagagaaaaaaagcaagaacgaactantccaaggaactaaaaaacacaaagtctaagcctttagactttggcagggtaaggtaagaaagtggaagaatggcaaataaatcctgaactttttaggtttgtttgttatgagacagagttcgctctgttgcccagagtctttttaaaattatcaaagaattaatcattagcccatccttatagcaaccaggattctttttcttttctcctcttctgggtttactgactgttggaagtggtgaacaaaaagcaaacatgaagtccataaagcacgtttcacatttttagccactcagataatgattctctagaagagaagattgaatttaaggaagaatatgagattgagaataaagtatagatttcaattattcgggctgatgccaatctccatttccatggataatcaaaggctgagtgagttagacataatttttgcacctaactgggaagacagcagacttaaaacact

SEQ ID NO: 194127 - DNA, 597 bp, Homo sapiens
agtgtgctgagttatctagaggatcccgtgtggcagacggggtctcattttggggcttcagtgatcttcccacctcagtctcctgagaagctgggactacaggtgtgtgccaccacacccagttaatttttttaaatttttttgttgagatggggtctcgctatgttacccagctggtctcaagctcctggcctcaactgatcctctagccttggcttcccaaagtgttgggattacaggcatgaaccactgttgcccagagtctttttaaaattatcaaagaattaatcattagcccatccttatagcaaccaggattctttttcttttctcctcttctgggtttactgactgttggaagtggtgaacaaaaagcaaacatgaagtccataaagcacgtttcacatttttagccactcagataatgattctctagaagagaagattgaatttaaggaagaatatgagattgagaataaagtatagatttcaattattcgggctgatgccaatctccatttccatggataatcaaaggctgagtgagttagacataatttttgcacctaactgggaagacagcagacttaaaacact

SEQ ID NO: 194128 - DNA, 520 bp, Homo sapiens
ctggaatgttgtggctggtatgggcttgatacattatccagcactaactccattcacactttattctgaagcgagaaagagccccggcaaggtgatctgacgtgcccacaccagacggaaggcagttcagcaccaggacaagaacttggctttcctagcattttcccagtttcagtagctaggccaaacgtgctctctattctgcaatgctggctcatgttttaccattttcacaggaaacctgatttgggaattttaaatggaaaaactgtcatttagtgttctttttcttttctaataacaatagttaatattgaccacacacatgtgccaggaagcactctaaatactttatacccatgaaccatctaatctcctcagcaggcagatatctccatttcaaagatgaagagactgagcctttagaaactttcaagggtgtttccaaggatatacagtttaggaggacaaagatttcacccaggctaatctgattctaagatattattttacattttat

SEQ ID NO: 194129 - DNA, 326 bp, Homo sapiens
gatgtatccccaacactgcatgaacttctcaagttccttcattcacaatttctctcctctcttctcacaatagtaattttactctcaacacttcgtgttattaaccatgtcaaatatgtgagtgtgtgcctacctcctaacaagcctgagagtccatggaattaaatgcaagattccaaggaatatgcctagcacagtgctttaggtttgtagctacccaataagtactgaatttttgtacttacaaaaactccctatggtgaaattcattccctcaatcaaaacatatgagaggacaattctatcaagtactgtgttgggcgata

SEQ ID NO: 194130 - DNA, 407 bp, Homo sapiens
aggttgcgatatgtgttcagtgagtaattatatctgtttgtgtgttttctcaaatgttgtgctgtgtttagcacattttaaaagagtaatttgagtcgctgtgtttattttaaattagagtaatcatccattaacctattctgtcagtgtttctcaaagttaaccagctgtatcagaaatcgcctcaggttttttatttgaaaatgcaaatatttgggcccttttcagtcatatctaaatctcttggaatgaggccttataaagagcagtaggtaaatcatatacactaaagtttcttactttagaagtgtgtaaataagaaccactgacaatagtgattacaggtgagactttggggaccagatgagttccttggcacaagttgattcatgaacaccacagtttta

SEQ ID NO: 194131 - DNA, 238 bp, Homo sapiens
aagatttctagattggatgctgagctagtgaagtataaggaccagatcaagatgagagggggtcctacaaagaatatgattacgcagaaagccttgcgagttttaaaacaaaagcggatgtatgagcagcagcaggaatcgcacccaagagtcattcaacatgaaacaagttaattacaccatccagtcattgaaggataccaagaacacggttgatgctatgaaactgggagcaaag

SEQ ID NO: 194132 - DNA, 439 bp, Homo sapiens
agtcccgaggtgacaaaaaaattagggaccagtgctctataggaaattgtgaggaactgaccgtagaatgatcctcttctcaccttgcaaccctcctctccagtcccagaggccaggacagttggcatttgtacccagtggtgtgggtttccaccagccctgctgcacctgtctggtagtccagtggaggagatgacaaaaagggacaatgtggctaacatctgcatgactgttcataagaaccataaacacgaggctgttcccactaccgcgtgaaaggatagaggggcttggtgtgtgtagggcacagcttttctgaaaggcagaaggattctttttatgattttaccacgtatcatttcctttttttttttttggtatgggaagtccacttcctatctggcttggctttttaaatgggctttttggtcacctcttt

SEQ ID NO: 194133 - DNA, 1065 bp, Homo sapiens
tgcccagcacagggcccagagcacagcaggtgcccaccacagctttgtccattggacagaagaaatgaacaagagggctggcctcatttctgcccccttcctggccctggtgcatgctacaaaaggccaggggtcactgcggctctgaaatctactcattttcttgaaacacacagaaaagatgtttctgggatggatgtgtcaaggaaaaaaaaaaaaggctgaagttgagaattccagctcagcacatgtcctccagccctcacagacatgacgagggattaaaacgccttttctcctcatttgcccaacatctcaggagaaagccaagtggcgtccccatcagggctgtcctgggcacccgctggctacgaagacaacctcctcattagcctggctttcctctgaaaatgagctcacacagactgcattgtgcgtgcctgtgtgaacgtgtgtggtgtcaggtaccccttaccgtgctccagacccattcccatatggaataaagctgacttccgagtacttacaatgggctaggcattgcacggagcaccatggactcgttcactcacaaccccatgaggtccatgttcttatcccattttctagatgatttgcctacatgtatgaaagcatgcccacatgcatgcatgtctactcgtgcataaaatgtgcttacatgtgcaacccagtctttatatatccatatgcaaacatatgtgcatgtctgtgtgtctctgtacacatatgtgtgtatgtgtgtacacatcttcctgttatgtcctctttcaaaatgggtactcttttttctttgagatggggtcttgctctgtcacccaggctggagggtagtggtgtgatcatggctcactgtagcattgatctcccaggctcaagcgaccctctggccttagcctcctgagtagctgggactacaggcacatgccaccatgcccggcctcatttaagagatttttgaaatagtaggtggaacaaaaatacagccataaaatagaagctgggaggaataggattggaattacaacatactaaaattgtttggga

SEQ ID NO: 194134 - DNA, 495 bp, Homo sapiens
ggtgagtttctcaatcttgctattgtgaaggaaaagactgaaaattgctctccgccgcccacactggccatgcagggaagggctcacgcttcatgctctggaggcacagtggttaggaacacaggtcccatggctgggctgcctgggttctcaccccacctctgccatttaccagcggtgaggctcagcttgctcaccatatagatgagggacaatgacagcacttaaccatagtgggagttttgcagcattaaagaagagaattcgagtcaagtgcctagtacagagcctggcacatggtaagtctaccataaatggtaacaattcacttgatttttattttattttagtgatagagttttgctctttttgcccaggctggagtgcaatagcacaacctgagctcactctcgtctgggcgacaggtgggaccctgtccctaaacaaagcgagcctatttggcacagctttgatgcggggtggaatctgatggcg

SEQ ID NO: 194135 - DNA, 207 bp, Homo sapiens
atagaaggttgtggcagggcggcagaggttgccagtgcagttgcagcatcatgctcatgctattccaacctgggtgagagtgagacgccatctcaaaataaataaataaataaataaataaagtaataacaatgtcagtgatgacttcatgttgagcagggcattcgttcacagcggtattgtcactgtccatctccacgcccgcac

SEQ ID NO: 194136 - DNA, 370 bp, Homo sapiens
tacctgatcatcgtgtcccaccccccaaatgttacagtgacacaagcaaggtgttcacaataattacatggggggaattttttaaaccaccaacaataacgaagaataaaatccactcactctgctgctgtttcaaaatttcaatgttagtttttgcacgcccttcccccccccaaccctgtttgtaaggaactaaaacattacatctggtgaacagcaaagatttcactacacctcaaatgcagaacacctatgaagcagaggaatggacacgaatgttcatgaacattcgtgtccctcaccagcccgacccgttcttctgccagcgcccggcctcgccccgcgcccggagctccctttcccttcctta

SEQ ID NO: 194137 - DNA, 523 bp, Homo sapiens
ctagacactgatacttaaactttttttctataaatgaattacatattaaattctaatccctatttttcccatcggaccaaggtaaatagatattctcaatatcagcttcttaagatcagacacacaaacaattagatatgatttacaaggcaatgttacatgacaaatgtatttttaaaattatttaactgaatgactttgcctttaaataaagacagtatcttcaaatatatattttccaaagtaatattactaatatgaatggaaacatatgagttcaaataaatctagcatagtaaactgcaattttctaacattaggtaaatgctcagttataggctgaaaatagctatggtactagtgagcttaaatccttgtgtggcaatataacataaatgttaaaagcataggctttggaactaaataaaatgaatttggtttcctaatctgcaaaatagatatgatagcatttgcacctcacagagttattgtgatgaaatgttattgcctggcaagtgtttag

SEQ ID NO: 194138 - DNA, 262 bp, Homo sapiens
tgcgctgagcatacgtgacaggggcagtgagcacctgggctaaggatagctattctactcctccggcattgttcttcttacagagttgagagctcctctgcactttgtgtatgccatcggccagctgatagtactttgcaactctgatcaatcaacatgcttgcagattgttacaatcttgccgttttcccatccacgataatcgcatggctgtatcttaatgccagtttactgagttgtattgccagcgctggctttctaa

SEQ ID NO: 194139 - DNA, 368 bp, Homo sapiens
agagctggtggagttcggcctcagcacagaacctgagtgaagaagctgtccaaatgggtttctcctttccctacctgcaggcttacccttcatctgacccatcctgtaaactgatactaagacagcaattcttaaatacctcttccaatgtgtcaggtacctaccaggacttcccagatcctacccgactccgtcacttcttcctctgtcccagctcctcatagccaaagtcacttcccctaccccggtcatctaccctctgtttgctcagtccatggggaatggcctcctacacctcatcctagactttggctctgcacccttcccacatctctgcccttccaaaccctcctcctccccacggcatg

SEQ ID NO: 194140 - DNA, 308 bp, Homo sapiens
taataaatgagggtgatactgacacaagataatcaggctgaacaatagtccaggtgagagttatgtaggtttaaactagggcactagcaatgggtagagagtacaggatagattccaaagggattaggaataaaagttgacagaatttatggtgtggttggttggggtgggggagcagggggctgtgtggtgagagaaaggactttctctttttctccatgaacacaaagtagttaagacatgaaacctgagatgtcatattgtaagaattatgcagaaatgggggtttgtaaaatgtgtgtatatga

SEQ ID NO: 194141 - DNA, 320 bp, Homo sapiens
aaataaacctattgtacaggatggaccaatcatgaggcattttcactctgatgttggcagtggatgtgttgacattgagaggatattcatggtggcaggctgcccccagttccaggttttggatatttggaataaggtaggctatgacaggccgggtgcaatagcttatgcctgtaatcccagcactttgggaggccaaggcaggcggatcacgaggtcaggagatcgagaccatcctggctaacatgaaaccccgtctctactaaaaatacaaaaaattagctgggcgtggtggcgggcacctgtagtcccagctactc

SEQ ID NO: 194142 - DNA, 398 bp, Homo sapiens
taaggaccagcctgagtggccagtgacaggagctgacctctgacccccagggctgggaagcagtccacgtcaaactcttacagcgcgacccttttagcacgcatagtaactcggggcatcgccagctgaagctcattaaagctgtctctttggtgcgagggccattaacctcactgctcaaaacccacgcctccccttccccgcctctcccagcccaattaatgccctgcatcctccctcccttccaagcaccctcacccacacctcagagccagcctggaggtggcagggcagccctcttcattcaaagactacaaagaccaagtgtcaagaagcccagtgtcctggggagccgctggtgctggcaacagagtagggagccccttcagccccatggt

SEQ ID NO: 194143 - DNA, 335 bp, Homo sapiens
gccttttctaaccatttctttcacatatcaaagattccttttgatatcactgttgttcttgaagcttgtcattgacaagtttctttcatgagaagatttttgacaatgaagtctctttatgtgtctgaaggaaacttatttatagaagatagttttgttgaaaatgattgtaggtttatactttttcctggaacttgaaagatggtatttgattgacagttggcttctgactgttgaggagtcaactctcattataaccatgtcagctctttgtatgcagtctctcttcctaaatcctttcaagtcttcttctctgtctttggtgtggtgtcatc

SEQ ID NO: 194144 - DNA, 475 bp, Homo sapiens
cccacccaacgtaggaaattgtccttaataacatctacagatcaacctaaagactctagatgaactccagttgaataatagcagaacattgtttttgagagatttcattcagttgctggatttcccatcaaactaaagctccatgagcagagaagccatgaccacctgtgatcatcttacccagttcctaagcacagagcaaaatcacaataaataaaggtattaaatgagtgatgaaattctaacaatatggctgaaagagaggataccatagtggttaagactatggatttggatgcccatcctgttacttactctgcaatgtcagtaccattatataacctccatatgcctcagcttcctcctctctaaagtaagcatgctaataccttcaagtcatgacattgctgtgggaattaagaatcaatacatgaaaattacttagaaccatgaccggaaattgctcagtaagtgt

SEQ ID NO: 194145 - DNA, 170 bp, Homo sapiens
gatacccaagacaaaaatcaactgtactacgggacacatcccaatttagacatttctaacaagaaacataaaaattccccaacatttatgttatagagcgttcacttcagtgaccaaagtttaattatctttccaatcacacaaggcactaccccaattctacatctgac

SEQ ID NO: 194146 - DNA, 267 bp, Homo sapiens
gtaatccatgtagaggtttttacagctttccctcccctacctctacttaaaggtcttcatgcgatcaaattaattgtaagcagctgttaaaggattgcaagcaactgttaaaggagaaaataagtttaagggtgagttctataaaataatcacttttgattcgccaaagtctatctcattggtagaaataaacagcaaaatcaaattattttttacataaaaaaattaatttcaatttcttcacaagcatgtttgacatcagttcct

SEQ ID NO: 194147 - DNA, 329 bp, Homo sapiens
cagagagtaacccaagggcctcttggaaggttcccttccttctacagtgcagagagggggaatgtggaaggtgaacgtgcaagtattagcagccacactataaacaaggaaactgaggccagggagggtgggggaaggaaataaatgttttttctgtgcttattctgtgccagccactgagctgggagatacttatttcttagtcctccccacacccttttaagggataaaacattttcccccagcctggccaaattggtgaaagcctctctctactaaaaatacaaaaattagctgggcatggtagtgtgtgcctgtaatcccagcta

SEQ ID NO: 194148 - DNA, 480 bp, Homo sapiens
tttagagacgggatcttgctatgtggacctagcttgagtgcaatggctggctattcacaggtcctatcatcgcgcattacagcctggaacccctgagctcaagtggtcctcctgcctcagcctactgagtagctggagctacagcatacaacaccatacccagctagaaagtgttttaaactgaatgaaaatgaaacttcggccaggcacagtggctcaagcccgtaatcccagcacgctgggagaccgaggccggtggatcacttgagatcaggagtttgacaacagcctgaccaacatggcaaaaccctgactccactaaaatacaaaaaattaactgagcatggtggcgggcgcctgtaatcccagctacttaagagactgaggcaagagaattgcttgaggctgggaggcagaggttgcagtgagccaagactgcaccactgcactccagcctggacgatggaacaagactgtctc

SEQ ID NO: 194149 - DNA, 513 bp, Homo sapiens
atctctttcctcaagtttgctgtgtgctggctgcattctaaagtgagttttccttatgaggggtatgaagatggaacctagcaactgtagactttgatagtccttcatgcttttaatctcagaaagaaagaaacacaccaaaccccttttccagcacccctatcaatcctcaagaagggactcttgctgccttgcttggctgatgtcaccactcctctggtgagaggcaggaacatgagaggaacagtcccacccaaaccacattgagaactgcagaaatagttcgtcagtggctataggtaccatgcttccaaaagaaggcgtaacaatgtctgggtaaggaaaacaaacaaaactgatagcaaaaaatgttattctcagagtcttattatccccattctacagatgagaaaacagaagccccacaaatcatgggttatggagaaaaaaaagcttgggagaacaaggaagtttttagcaccaggcatgacctcctcctgcctttatttacct

SEQ ID NO: 194150 - DNA, 467 bp, Homo sapiens
tcaagctcggtcccccagggtcttttcccctcaaatttgaattctattcattctttctgtcccgatcaagcctgcacactactctaacatctacaaatcagcactttcaccactgagttgtaatgattaagttctacagctttattccccaataaaactatcagttctttgggagtacagacggtgtgtgtctgtcttatccactgataatattcaacaaatatttaagtgcccactatgtaacatgcttaaatgtatgctctatattgggaggtgctcaataaatatatgagaaatgaatgccatataccaaggagtattttcctattcataatgtaatgctggcatttttcttgtttataatcactaatcacgggtagtcttgtactgttatttgaattttcttatgtgtatgtattctcgctaatgcaacagtggtgtttgaggggaaaaggcctacatatttc

SEQ ID NO: 194151 - DNA, 382 bp, Homo sapiens
actcagcttgtagtgttttatttctgcactaaacaatataattctaaaggcttctaagaacaaagaactttattacattgaactaaaagccagctgaattgtttgtgataataacaacaaaatctaaagacccttgatatgggaaatggctataaagtatacccttagtatgcagctattaaaaagaaagaggtagacctattagtactacatgggactcagtgaaaagagatgaatgaaaaaagaacggcacaatagtatggtgctattatatttatataaaacacacatacccagcatatatatgcaaatatacagaaaaaaaatcaagaaaggagacacaaaaccagtaacaacagaagatggaaaaggatttggaaaa

SEQ ID NO: 194152 - DNA, 517 bp, Homo sapiens
tcctaaattaagaacttctacttatagctccctgaacacacaaggctattttaagcctctgcaccctcatgttccttcagccttgaatgcaactttttgtaacgcaacttcgtggaaagaattcctattcatcctacaaaaccctattcaggtgttcccatctgataaagcccctcaataatgatgactttctctcactcctgaaaagaattaatctcttttcttggatatttagtaagaacttagatttaccgagctcttactatgtgccaggcactatgctaagcattttatccacattatcttattgaatcgtcaacagtacctacaagataagcactgttataatcttcttttacagataagaaaatagaggctcagattctgaccctcctgagtagctgggactacaggcgtctgccaccacgctgggctaattttttgtatttttagtagaggcggagtttcaccgtgttagccaggatggtctcgatctcctgacctcgtgatccgccca

SEQ ID NO: 194153 - DNA, 312 bp, Homo sapiens
tagatgattgtatctaattggtcaggtaaagaatcctcctgagatttagatcacataaaatgctaaaatcatagatgttcggaaggcaccttttgaggtcatccagtctcacctggcaccctggcctagcatccttgccaggaagccagtccgtccctgtctgaagcatgatggtgtcagtcctctgcaggggagttggccaatgctgaagagcagaaagagctacttccttgccccttcctctactcagtcctcctagcctctgccactcagtcctttgcatgagagacattaaaaactctccgactttcc

SEQ ID NO: 194154 - DNA, 516 bp, Homo sapiens
gctgtaggaacagtgagctctggttccaaagtaaagaccaagactggtggtgctaaaaaggcttttcatgctgtttgtatgtgtgtctggaataggcagtatggaatttgggacatttgatgttttactgagaagactattgtaatccaagcagctttctctcttgttatgctaatcattccctggaacctcttcccttctccaggttcaggcctcatctccagtggcactgggtgtaaggattcccactgtggctcttcacatgatggaactgtttgacacaactgtagagcagctgtatagcatcttcactgtaaaggaggtaagtaactccctaagctagcatgttaagtgctgacattgggagaaaatacattacaaagaacaggagctggtttttggttttccttgtggctgtgtttttgattgaagggatgtgggatggtggtgacagaagtctgagcatagtttctgaataattggaggggagatgggcattctttgggactatgtccg

SEQ ID NO: 194155 - DNA, 484 bp, Homo sapiens
gcaaatgtccatttgagtttattagaaacaattctccaaaatgattggcattttaccttgtactagcagagtctaggagtgtggctgctcccagattctcatcaaactacagtgctgacatctttagttctaggccttctagtgtggatgcactggtatcttgttaaatgcttttaactgttttggtagagatggggccttgctgtattgcatagtctggtcttgaacacctggcctcaagtgatctccagcctcaccctcccgaagtgctgggattacaggtgtgagccactgctctgggcctcattcagtgttttgcttctccctgacaactaatggagttaagctcgttttcatgtttattggccattaagtcatcttgcttttggaagtgccaattgttaactggcttgtcctcttctttttgccttacacagttaatacatgctggagattacatgtactgcaaagattttctcctagc

SEQ ID NO: 194156 - DNA, 393 bp, Homo sapiens
ttccccgcctgtgggctaatttcccacgtttccacactgtctccccttgaaggacacagaagtgaatctctgcagaagggaaaagacctctgagtgacttccatcctctcccctatgctctggcacaatggcttgtacataagccatacaaagtagcagtggcctcacagtgactagcagacacagaagagctaggagaaagctggagctgccgactccttgtgcctctggctgacctccagaggccagcaaacctctcatcttacctcctattgccttccccagccctgggctgtatgtcacactgtgtgcaccgtattaaaacgtactgaatgggccgggcacagtggctcacgcctgtaaatcccatcacttttgagaggctgaggcagg

SEQ ID NO: 194157 - DNA, 203 bp, Homo sapiens
attgcctcattcatatgaattggtttctcaatgcttaattttgctgctttggggctagaaaacaaaaaaccaggatggtctatagtccctaattctgtcttcctagaattttaaaacccagtcaatcctaaaggaactcttctatgcatgaccagtttttaaatcttggatgtaggaagatagcaatcagaacatcaaaggtt

SEQ ID NO: 194158 - DNA, 130 bp, Homo sapiens
atctcgaagtatctcaaaaagtcgctcccgttccaggtcgcggagcaaaggtcgatcacgttctcgatcaaaaggcaggaaatctagatcaaagagcaaatctaagcccaagtctgatcggggctcccat

SEQ ID NO: 194159 - DNA, 671 bp, Homo sapiens
tgtccataacccatggtgcctgctctggcacacagcgggacctggaggctgggcgggcagggcagtgtgccgttccttctcttgctgcataaccagccatgggtcatgctctatcctcaccctggccctgcagcaaggctgtgcagcacctgctcatgctcttatctcacagagagatgccatcaaactgtccccatcatcaccaggatgtgtcactacctcacaccatcctggagccaggagccaccgccagctcagtggcttctgtcagcatggtccatcactcctcacgatgctgtcgtctgcgctaggctcatccagacggttctgctccgtggcgtgtgctggggctggagtgttcacaggggctgctgagcaggtccccacgctgcctctgtgatgccttgagctcctccaggttgtctgagtttctacagccacggccacgtccaagaggggagaggcaggacccccagtcctcctaagagtttggcttggaactggtgcagagtgacttctgccctttgtgttggtcagagcagggcacaaggacagcccagcttcagaggaaggagaaatagagtccacctcttcccatgaggccagaatacatcatacaggcaggaaaggcatttagaatcctttctggagacttctatagccagcaggtt

SEQ ID NO: 194160 - DNA, 493 bp, Homo sapiens
tggcaataattatcccacagactctgtctaaaaatgcatttgccatgaaaataaatgagagcacatgtaaaaaaggaaatgcagcaatgcatgcaacggaagttagaaagattacagttttaagataaagatgttttgtctacagcaaacaaagtgttcaaatcctctattaaccaatttaacaaagagttatctttcctttgtttctgtccaaacacactaaatggattttggaaaaatctcttctcacgttcttgttgtcatttaatcaccaggtttttaacgctacttccaaaccaatttttcatgggctttgcttccaaaaagaaaacattttagcattccatattgtggataggtcattgtcactggctaagctatcagagtatctaaataaaactttatccactcatttctgtattgtctatagcaggctgaaagctgctataaaaaggaatctgaacttaaagtttcttttttttttttttttgag

SEQ ID NO: 194161 - DNA, 154 bp, Homo sapiens
agtaccattgatggccaattgatttgatggtaaaggagggatcgttgacctcgtctgttatgtaaaggatgcgtagggatgggagggcgataaggactactgattgagttggctgtgtagaggtacctgagctacgaattctgtacatcattgg

SEQ ID NO: 194162 - DNA, 491 bp, Homo sapiens
tagccccccaccccccaaaaaaatgttgtgaagagttttatactctccatacaaagttactgtaaaaacataaaatttatataggctgagtgtggtggctcatgcctgtcatcccaacactttaggaggccgaggtgggcagatctatgagttttgaccaaatgtacactgtaatgtaaccatcaccacaatcaagatgcagaacgtttccatcgctccaaaaaattcaaaaacaaatcctggtcaaatcttaagttacccttataacagattagagagtacattgattaattaagtctaacgatatcctataaactacaatctagcccaaactatattacagcttcagtctcatttcctggcacatctttccccaccatattcaaagccggttagagaaatggttaccaaatcacagttctagagccataatgtaccactcttatatttcatatgtggattctgaatatctgaatggaacagaacttgtt

SEQ ID NO: 194163 - DNA, 434 bp, Homo sapiens
aacgctgctgtgtgcaaacctaaatgtcagtcatatcgtggagtagaaaaagagaaagttgaagttctagacccagctttgccccttactagccttgggttctggagcaagccacctggtctgaaagtggctttcctgggctatgacagtgcatagtacagtctgccctgtggggctcaccaacctgcagataggagcaaacaaagccatgcacaggaagatgcaggcaatgcacggtgttagtaaaagaccatctcagaaataggagccactgttttcctaagcccaaatggactaattagcccagacagccccctcactcatacccatgttgaatcagtcccagaaacactgtcaattccaactaagcaatgtcccttgattctgcactctcctctccagctgcaggaccaatgtcttgggtttcttttacg

SEQ ID NO: 194164 - DNA, 426 bp, Homo sapiens
ctatctcccaccttgtatctcaaagtttccttcttggaagcctttcttgactccccttaaaaaaaaaaatggtgattttttccatgggtgctcccaaaacaccaaaatacacaatacatttctgtatgtatgtaggtatgtatgtatgtctttattttggaggcagggtcttgctatgttgcccaggctgcagtgcagtggctattcacaggtgtgatcatagcacactgcagccttaaactcctgggctcaagcagtcctcactccatggcctccctctccagtagctggaattacagacactacggtatcacccagccctgcaatacctttattattgttttccctgctgcaagttctttgagctcggacagtcttgttgacctgtgcagcacctaagcttagcacctaggagtttctcaaaaa

SEQ ID NO: 194165 - DNA, 773 bp, Homo sapiens
gctcactgcaagctccgcctcctgggttcacgccattctcctgcttcagcctcccgagtagctgggactacaggcaaccaccaccacacccggctaattttttgtattattattattatttttagtagagacggggtttcaccgtgttagccaagatggtctcgatctcctgacctcgtgatctgcccacctcagcctcccaaaatgctgggattacaggtgtgagccaccatgctggccttttttttttttttaaatacagacacagtctcattatgttgcccaggctggtctcaaactcttgagctcgagcaatcctcccgtcttggcctcccaaagtgttaggattacaggtgtgagctaccactccttgaccccaagacaatatcttaactgtaaaaattaaactctaccatattttaaaaagctgagatagtataaatgtttataataaaacataaaaccaacatttctcacaagtctttgtaactagtagagactgtagttgttctgtccagatataagtgtggtatatcaacttggcacttagcaacattgatatttaatttgttaaatttttgttaggaagaggtgttttcagatctcaggtgtcttgggaaggaatatttttatatttatatctccagcttcattcctagcttttctttggaacactaaaattgtccagctggacttgttgggcctgggtgggattgggagaattcaggagagcacagttcttgggccagaacagttggtcagctgattgactc

SEQ ID NO: 194166 - DNA, 471 bp, Homo sapiens
taggtgacagagttgccttgtctcaaaaagcaaataaagaaattaaaataaataaaaaataaaataagcaagccagagaggagtagtctaccttattatgaattctttcaggacaacccccaagtcagtcaaaccttcctatccctgctctttttttgtctgcttgtgccttttcaatgtacttaacatgccaggtgtggtagctcatgcctgtaatcctagcactttgggaggctgaggtgggcagattgcttgagctcaggagttcgagaccatcctggacaacatggcaaaaccccatctctactaaaaatacaaaaactagctgggcgtggtggtgggtgcctgtagtcccagctactcgggaggctgaggtggaagtatcacctgagcccgggaggttgaggctgcagtgagccgtgttcaggccactgcactccagcctgggtgacagagggaggccctgtttca

SEQ ID NO: 194167 - DNA, 369 bp, Homo sapiens
ttggaggtagattctagcaggatccccggtcagacaaatggtcatgcaccaattttaggaagccttttatgactctcccaagtagactgagtcactgttattcagtgctcccagcctatgctcacctccattatagacagtaattaccactctgtaattgcttgtttatataattacagggcttttgatccctgacacaagcaaaatgtctggcaccaaaagttggcactaaatgaatcacagaaaacaaagacgtgataggaatggggcagtaagtgggaatgaggaaaagggaagaagactggcagcctagaagggaacactgcaaaagtctgaaaaagtctcaagtccagactcacatctctatgt

SEQ ID NO: 194168 - DNA, 251 bp, Homo sapiens
tctcaattcatctgagttattaataaagaattcacaaagtttcccagagacattcacattttttcaattatgaaaacggaaaaaaatacaaccaccttagaaacttttgggtgcatttagctaaagaaaattttggaagccaatattatacatctaaagtgtcataagtagctttattctagggctgcagtctagtcactttaaaaatgtgtccagccaggcaccgtggctcacgtctgtaatcccagtat

SEQ ID NO: 194169 - DNA, 348 bp, Homo sapiens
atcccagctacctgggaggctgaggcagagaattgcttaaacctgggaggcggaggttgcagtgagccaagactgcgccactgcactccagcctgggtgacagagtgagactccatcttcaaaaaaaaaaaacaaaaatgaaccccagattaagtgacttgtctcaatggcacattactaggcactagcatagctaatactagaatatacattatctgactcttagtctgaatctgtgtacactgtactatgatataacagaagggtttttcatagcttgacattttgatcaatctatgtattataattaggaataattggatatgataatgctttacatacatttgt

SEQ ID NO: 194170 - DNA, 774 bp, Homo sapiens
catgtaggcttagaaaacttaatttttaatgccccttctatctttcatcaggctaaagcttttggatttatggttattcattctagctataaatatattaatagtattttgggctggtcagatatggggcatgacctttgacatcctgcttggctatgcctgggaatttgacatccttcaatttaggtggaattcccttgttttgtttcctgtgatagtgtggggaaatacacattttggctccttcggcagaggaagacaggaaaaaagtaaaattggaatgcactaagaaagtattaatgattttatttctgctgtgtatagttgaatgcacatgctttttatggaagcctgagcctatgaaaatagtgcacaataataagaaaatgctaacaatcatatttagtttttgcattttttaatttggatttattttttgactagtttgacatttttgggtttttgaactgtttgcatctaagtatacatggtggaaagaactttttgtgatgcctttactagtattatcagtacagagtatcaacagttgggaagagctacaaaagggaactcttagccggtgtgtattttgacctgaggaagggagtgttctgttgctaccaactaaaagtttatgagtgtgcttctgtttcctgaatgtaatcagcacctccatcaataattatccctgtaggggaacacaatatggctttcctctactgtaggttctttgactgagccaataattaaattgacataaggcagactaacaag

SEQ ID NO: 194171 - DNA, 462 bp, Homo sapiens
gccctaagcccactgtgtgggcgtcccatctcgtacagtggccgtctccagcctccactgggcccaaataggtaaaaagaaagcctggggaaggaagagccaggaaacctcgggagagtggaatttcaggaatggcaggtcagaactggttccagcatgggtccctttgccttgtgcttagctgagggatttttgttattaattttttttttcctgttcaacactcctaacctcttttgaatttcagttctctttttttatcctgaaggattattttattgtacttttgagggttttttttttttttttgccttgcacaaagtactgactcatgttgctaatggctgtggctgtatgctagttatatgtctcattatcctaccccttaagattgatcatttctgtgttggtttctatttcaaaccagaataggccaggtgggtcaattcatgtatttctgaa

SEQ ID NO: 194172 - DNA, 472 bp, Homo sapiens
ttttttttcccatgccccctgaggctctgttctttatatacaactttaatatacaattaagttgcagttgttacttacaacctacttgttgaatgttgacccaaatatgtttctttggtatctttaacacttggcttataatggctgtgttacaacttactcagataactgctaataaacattactggaatgtactggaggaagcttttcccactatatagtcagctgttgcttttttcttaaaagatgaaacaaaagactaattaacagacaaacataacaggccaggcgtggtggctcacacctgtaatcccagcactttggaggccgaggtgggtggactgcctgaggtcaggagtttgaggccagcctggctaacattctgaaacccatctctactaaaaatacaaaaagtagctgggagtggtggcgcatgcctatagtcctagctactcaggaggctgaggcagga

SEQ ID NO: 194173 - DNA, 637 bp, Homo sapiens
gtaatgtgttgccttaggacgatgttaggtgttatgactgctaggacatcactaggtgacaggaattttccagctccaatgtaatcttatgggatcaccatcatacatgcagtccatcattgaccaaaatgacatgactgcagttggatgcaatattggcatccaattatttggccagctttggtgattgttatggactgaatgtttgtcttcccacaaaattcatatgttgaagccctaacgacacccagagaggcctctaaggaagtatagtagttaagattaaatgatggcataagggtgggccctaatccaacaggattgatgtctttctaagaagagaggaccagagcctcttgctgtctgtggacaggcactgaggaaaggccatggagagaaggcacccacatgcaagccaggaagaacgtcctcaccagaaactgagttggccaaaaccttgatcttggatgtcaaagccttgaattgcgagaaaataaatttctgttgtttaggtcaccagtctatgctattttctaatgacagcctgtgcagacgacaatgattaataggatgaggtgaatgcaaaggaaagctttctagtctgggagactaaagggacaagtggtgccacttactg

SEQ ID NO: 194174 - DNA, 249 bp, Homo sapiens
taatgcacagggtggaatgaagagtgaagaggttggagaaaagactagttagaacctttaactaagctgcatgtggaaaggaaggaacaaattaaattacaagagatttttttttcccaaaggagcatgtacctgaacttggtttccaactgaagagatgtggggaggctatgaagaaggagttgacaaacatacctttaagattttgagtggtagtagtacctgcagcagtgtaataggtttaggagg

SEQ ID NO: 194175 - DNA, 548 bp, Homo sapiens
tctctctaaccagcaaaccatcttaattatgggcagtatttttctacttccttagcaattaaatggcatttggcaaacagttggtaacacacgattgcagtggattaagcaggaattgagcagggaagtgggatttttgtatgttcttcctattaaaatttatttaaaataaaaatcacatcaaggtacctacattgcctattgctagataagtggagtagaaagacaatatgcagtggagagaatcagtaaaactaagagttggtccttcaaaaagacgtgaccaaaaatatactagagataaagtggatcaggaaaaggagataatacacataagcaattttaggaaagagaaaagagacttaggtatagataaagcagacatttaaaaaataataggatattatagacaacttgatgccaataaatttgaacatacaggtgaagcaggtacagtactagaaaaaagacatgttgctaaagctgtctcaagaaaaagtgaaaaacggagataatctcataataaatttagggtagatggggtaccg

SEQ ID NO: 194176 - DNA, 532 bp, Homo sapiens
ggtctcaagtgatccttccacctaggcctcccaaagcactgggattacagtgttagccactgtgcccagcctaaaatatgttagttttttgttgctgcaaaatacattagcacaaacttcagggtctcaaaacaacatacgtttattatctcaggataataaatgatcaggagtctggcatgacttagttaggtcttttgcttagggtctcacaagactaattgaagtgtcccaccaggatgcattctcatctagacacttgactggggaagaatccatgtccaagctcactcaggttgttggcggaattcatttccttgcagccttaggtatgaggacacccgcttcttgctggttgctggctggaagacgcctttaattctgagaggctgcccgcacttcctagaggagcttgaagctcctggccatgtggactttccccacacgaccacttacatcatgaaaccagcaaggactgctgagtaaataattatgctgagtaaaagaaactgatcaaaatacagtacatact

SEQ ID NO: 194177 - DNA, 638 bp, Homo sapiens
ataatggggcaaaaatgacacagaattaaagaaatggtttgatgatcttttccctcttcccacattccttggcaaagccatcctgcatcacagaaatagccccaaagcttcatttataaactaaatgtaagtatatgctacttcttcctgctccattaccagctggtctctgtggtagttatgctgtttggtttagatgacagtcatcacttctctgggaaggagaagaaaagtgggccaggatgaatatttgttgaagactaggtgccatcttctctctgaagtgtcaacgtacgttgacacttcaggtcaggagtttgagaccagcctggccaacatggtgaaaccccgtctctaccaaaaatacaaaattagccaggcgtggtggcgcgtgcctgtaatcccagctactcaggagactgaggcacaagagttgcttgaacccggtgggtggaggttgcagtgagccgacatcatgccactgcactccagcaggagcaacagagtgtgactctatctcaaaaaaataagaaataacacaatcaaataaaaataaacttcagaacaaatattatctgagctacagaaggacattccatatggataaggggtcattcatcatgactctgaagaatggt

SEQ ID NO: 194178 - DNA, 546 bp, Homo sapiens
taatttggagacagagtcttgctcttatagcccaggctggagtgcaatggcgcaatctcagctcactgcaacctccgcctccccgttcaagcaattctcctgggaggtggaggttgcagtgagcccagatcataccactgcacttcagcctgggcgatagagtgagacttcatctcaaaaataaaaaaataaagagttttgggaatagttcaaggacttgcttatggcaccgtggagtactagagttccaggtaacccagggtgagaagcacttatgtgtacttggtcccccaaaactaaacattgagaatatataaaatcctccttcccatgggaacatgcagaaattcccagaaagacatctcagcagcatctgggagaatgaggagatgcctccctggggtggattatatgggcgccttaattgggcttccggaccagagacgagatggtgtcagtacaaggacatattctggagcctgtgtagtactatctggctgtgggcaagtcaggctaaccttttagtcaagggatcccaagtgtgtc

SEQ ID NO: 194179 - DNA, 238 bp, Homo sapiens
cattcaggtcctgaaatatgcatttgtattctcaaaatatttataatttcttaatatgtaaaattttcattttagtaaattcagatgtcaagacaatgttagaaaaaaatggcaaattatattcagtcattctcagagcatttttatataacttcaaaggttgaacttcttcagttgatggccacaggtaatttctagccataagtaaatttccctagtgttttccaggtaagaatca

SEQ ID NO: 194180 - DNA, 448 bp, Homo sapiens
ctgtgattggcacctgtcatgaagtcctcagttaatctctaggtttcttcttcctaccttttttttttttttcagtccttgagatttatctgttgaagacactgtattgtttgtcccacagagttttccttcctaggttctaaattttacttgattttagccctgtcatgtcatttaaaatgttcctttgttgcctggatttcctataaattggcagttagatctagaggtttgatcagattcaagcttggttatttttggtaagactttatagatgcaatggtgcacctcttttgggaggcaaccagccatacccatgtgtgtgtgtgtgtgtgtgtgtgcacgtatgtgtgcatgtatataacagccgtattttaaaacatttatttaattactttctttttttttgaggcaggtttttgctcttttgcccaggctggagtgcagt

SEQ ID NO: 194181 - DNA, 150 bp, Homo sapiens
ctcaaaaaataaaaaaacaaaacttaactttggagcaaattaaaccaaattaagaaggaatggggttggcatgagctcctacttgtgtttacttgcgagtcgcaggaaaatccgggtccttggtcttgttgtttgtctgtaagacagcgt

SEQ ID NO: 194182 - DNA, 143 bp, Homo sapiens
taaccacacaaggaaagtgaatttattttcaacagttagtggactgtaaaatagggtgctaccaaattaaagagtgaacgaggaaatcaagcagaactggttcactaatagggcaataaacacataaaaataattctcaaggg

SEQ ID NO: 194183 - DNA, 415 bp, Homo sapiens
accatgcagaacctcaacgacagcctggtctcctacctggacaaggcgcgtgccctggaggaggccaacgctgacctggaggtgaagatccatgactggtaccagtggcagcggcctgctgagatcaaagactacagtccctacttcaagaccatcgaggatctgaggaacaagaacataatgggatggtgagtgcagacgacacacacggcctcagtctatgggaacatctcaaaggagttcgtctgcaaattctagtgcatctaggcagaacacaggaaggaagagaggtgcagacttacgtatggccctggggcacctgccatcccctcgagcctgtatggtccttacccgcccatccccagcttgagttctgggccttctcgccagcacatcgttgggacctggtcaactt

SEQ ID NO: 194184 - DNA, 297 bp, Homo sapiens
agaccacccaatattagaactctgtctgcttaaaagtaatagatttttccttagtatggatctgagttcaccacaaaattcatttattctggccatgtggtggctcatacttgtaatcccagtgctttgggagtctgggaagtgggggatcacttgaggtcaggagtttgagtccagcctggccaacatggtgaaaccctgtctctactaaaaactaaaaatacaaaaattagccgggcttggtggcaggcacctgtaatcccagctacttggaaggctgaggcaggagactcactt

SEQ ID NO: 194185 - DNA, 239 bp, Homo sapiens
tattgaattgtacattatctgaaaactgatttccaagcaataccgtgtaacaacctttcaagcaataatttaagccatggtgatgatgccatatgaagcttgcacttctttgcatttcatagagcctttgtgaaaacagaaacatgttttatacaagcaataatatagctggtgtggactttttaaagatactcattattctgtagcaaatgagcagcaagtaatgactcagattaaaa

SEQ ID NO: 194186 - DNA, 555 bp, Homo sapiens
taatatcacctcccaccccacgaccatgatttgtactttatttgaggagtttctgcatatttacttatttttttgccattttgatgtgcaggggtgtgagggtccaagagtagtctgcccattcttcctgtggctgtatcatcaattatatgacaattttaggttgtttctagaaaacagcgcatgaacgcttttgtacctaagtcattgcgtgcctatctgattatttcctgaggagtaaaatttcccgggagtggaaatgttggatcacaaagtttgcagattcttatttggattatttggcagtggaagtttcatgagaggtgtcagtgcagctggcagctgcgcagctgagataccctgtcatgatgtatttatgaccccggggattttgtaactccttactagaagcttaaggaaatacattgattagcggaggaagttagctcatgatactagattttcatttccatttttaggtcttctgtgaaccaggagaaggccatcttttctgttaattgcaaacaaggctcttgattcacatgctccattcat

SEQ ID NO: 194187 - DNA, 313 bp, Homo sapiens
acctaaatatttctgtggagaaaatggagtttttatcagcttgtttaggaatcatgagcaggaaagccctatggggaaaataatataggactctgtaactaatgtacagaactaactggaaaaatcagtttcagagaaaaataatttgagggcactgtgtccaggactgttttggtagcaattcagccatgaaacaaagcatatacctgcagggactctcctcttccctgccttgtctgcacagctgtttccaggttgcccatagccaaaatgtaagatttaaaattgatgccatatcaaagaaaataaagta

SEQ ID NO: 194188 - DNA, 241 bp, Homo sapiens
tacaagtatgtgccacccaacctggctaatcttttgtatttttagtggagacaggatttcaccatgttggccaggctggtctcgaactcctgacctcaggtgatcctcctgcctcggcccccccaaaatgctgggattacaggtgtgagccaccatgcccggcctctatgtagtcttttctaatcagaacataatatcatttgctcaagagtaggctttggaagtctgtcactctggtttc

SEQ ID NO: 194189 - DNA, 338 bp, Homo sapiens
tagtatcttccagtaaactcccttttctacacacaattcaggtcatctatgattatgccatctaagagatactgtgtcagtggcaccttcccgcatgggaagagatcttgcttcttgagcaggatatgacatcctcagaggcaattggacatcccttccacttcccctgtggcagcatgaacttcctctgtttctcaaggaggtagagggagaggggagcagcctgccacttctggaaattcacccacagctcttgcctggcgtgctgagcagaggccacccagtcgggctttgcaaatagaatttgactcccatgccagaccaagtgaaacagatcc

SEQ ID NO: 194190 - DNA, 476 bp, Homo sapiens
acttgggaggctgaggtggatggattgcttgagcccaggacgtcaaggatgcagtgagccatgatcatgccactgcactccagcctgggtgacagagtgagaagttgtttcaaactaattaattataaaaaaacaaaccaaaaacgcagagccaaatacaaaatcacccctgtgcggctccgtgggtgggcgtgtggggcagggagagttggggggcgtcatgagcctctaggagctgaggctggaatgtggagcaggagtttctgtggaagctcaatataacgtgatcctgaatatggggcaaccctcccccattttcccaattagtggttgagaatgaaaggtgagccaggcatgggaggctgaggcaggagaatcgcttgaacccaggaggcggaggttgcagtgagccgagatcgtgccactacactccagcctggggacagagcaagactccgtctcaaaaaaaagaaaag

SEQ ID NO: 194191 - DNA, 328 bp, Homo sapiens
aagacgggagggtttctgcagtaactccagattatattatttaattcatttcattaccataaagcaacaactcgaatatttatcgaatacagctgagacaacacacggccaactaaggagctgcaaattaatacgcgtgcgtgttagcacatacacacactcacccacgtgctcacacgcggccttctgaatttcacttctgcatgcaaaaccaccaccaccgaggtctgcacagcaccggcactttgcatattgaaaacgcggctccagcgggccccacggaacagatccttcccaggaacagaccctaggcccggctccctgggaa

SEQ ID NO: 194192 - DNA, 151 bp, Homo sapiens
tgaggaactttggcaagaagacccttacgaatatatatgcatgaagtttgatgtgtttgaagatttcatttctcctaccactgctgcccagacacttttgtttacagcctgtagtaagaggaaagaggtactgcaaaagactataggattt

SEQ ID NO: 194193 - DNA, 236 bp, Homo sapiens
gtcacctgggttctgacgattaggaaagaaatatgttaaatatctggcatagagtaagcgctccatgggcccagcatggtggcttatacctgaaatccctgctccttgggaagctgacacaggaagaccatttgagcccaggattttgagacccgcctggcccacatagtgagaacccacatctctacaaaacatacaaaaattagccaggtgtggttggcatgtgcctgtagtcc

SEQ ID NO: 194194 - DNA, 459 bp, Homo sapiens
tcttatgcagatagggtattatgtactggcaaccaaaggttccctatattccaaagctcaagtaaacaatcattacctgttcatcactctctagggttgtaatcagaatttatatatgtgcaaacatttttaataaaagaaaagacagctaaaagccctgttctattctttacttaacaaatcacattttctcaagttgaacaattcttaaaattttttcttctcacgtttctatgtcattataacactttgtgttactgttccttcttcagttaatgactactcccaatttagaaatatccatgaatttaattaatgtgtaatttagctttacatattactaattgggatggtagataaggaagtgagatgtgacagaataacttaaaaaatgcttaaatttatcatcctaattcattaagaacttaaaaaggagggtatggaccaatacggcctaaa

SEQ ID NO: 194195 - DNA, 354 bp, Homo sapiens
aaatgaacttctttctccattagcttgtcattgccattttcaaatggcttgcccataaattccaatatttttctcaaaaaaaagtggtaaactcttcagtcttttattttcttacctacttcctttgtgttccagaaagcaagtagtatattaccttcatcttcatcaagtaaagaggtacattgaggcctagatgctaagtgatttccttaatttcacataatttatcagtattgacccatccactacatctgatgatgcaacaaatatttagtgattgccaccttggtgccaggctctgttttagctgcagggaatataagataggtaatgtctctattttaatggagctca

SEQ ID NO: 194196 - DNA, 189 bp, Homo sapiens
tccagctccaatcctctaggagctacactaccaataggtcacagacctcacagacctgggctctgtcccaactgcccttatgagcttagctgagctagtaagcctatgttctcatctgtggttgtggaaagtattccctgcctggcctttgtcacagagccatgggtgtgaaaggctgagaacctgccg

SEQ ID NO: 194197 - DNA, 368 bp, Homo sapiens
tgctgctttgtcaatagagttatttaaagttatcattatgtaggcaacagttccttagtttgtaaggcaaaatgctgaatctaagaaacatgtaccacatatgtgtctgttatatctgtaagaatttacttatttaaaatcctgtttgcgttaagggtaataaaagtgaagtgatatatagatgacagatttcatgagagaaaaattttgaagtcagaatggggatgagtatcatactgaattcagtaatgtattatatataatgcttaagtaatgattaacgtatacattattgcagtaccggttaactagtgatcacataattctcatcgaaattgtttagagacataaaatattggcacagggta

SEQ ID NO: 194198 - DNA, 576 bp, Homo sapiens
cgaatcggtaccgactgcatctgtgcctcccaaagtgctgggattacaggcatgagccaccatgcccggctatttctgctcttgtagttttcttacccataagccccactagaaaataagcaacctgaaggccaggcccaggttttacttggttatgtaaattagtactcgacatatgcttggcacaaacgtagttgcttcttataggtatttatttaataaacagaaaaagagagtaggaaagtatcaatagtatatcttaacagtaggtcatggattttttgaaatgtctatttcaattccattccacagccactggttggaggggataaaaatcacgaaataggctgggcgcaatggctcacgcctgtaatcccagcactgtgggaggccaaggcaggaggattgtttgtgcccagaattcgagaccaacctggacaatatgagactctgtctctaaacaaacaaacaaacaaacaaaaattagctgggcatggtggcacacgcatgtggtcccagccacttaggaggctgaggtgagaggactgcttgagcctgggaggctgatgctgcagt

SEQ ID NO: 194199 - DNA, 246 bp, Homo sapiens
ttaagcgctgaaatataagtaatggaatataaggttgaatatatacaaatacacacacacatttaaaaacagatcaagatcaggggagctgaaaaagctagtatttgactacaacggaaatttacaatctctcagccagtgttccaagcagaaacagtagtagattcaaaacctattaactaggaaagctaggtccccttgtagaagaatcctgcaacaccatagcaaatgtgtagagtatcaatt

SEQ ID NO: 194200 - DNA, 282 bp, Homo sapiens
caaattaggaatattaataaaacactctgagccagatggatggtcaaaataaaacttcaggcctgtacttggcagcatgtgaaatataaacaagccatctgaatgccaacaaagtaccatgccagtctacctgaaacttcagcttcagttcaccatacaacatttaactaaaagaaaagtctatttttaacctccacaatggtgttctatgggatatttatccaagccctcaattctttttttttttttttttgagaaggagtctcgctctgttgcccaggc

SEQ ID NO: 194201 - DNA, 254 bp, Homo sapiens
ttgtctgtaggtgttgattatatccaattgactgatgatatgttgagttcaactatgtccttattgatttttttgtgtgctagatatgtccatttctgataaagggttattgagtctcaaactgtaatagtggattcatctgtttctccttgcatttctcttagtttgggcctcacatagtttgacactcagttgttttgtttttaagaaatagggtttcactctgttgcactccagcaagaccctatctctaa

SEQ ID NO: 194202 - DNA, 437 bp, Homo sapiens
agtaacactgacttaatcagatcatcataatccatcgatctttccaacaacagattatgatttagatattctttccctgctcaggaacattaagacacatcaagtattctatgtacaaagtgaagctcacatgctgatttgaagacagagttacttgcaaatacttcatggaagagtttacgtatcaatcattaaatattatatattaaacaaaaagaaaaaattacgctcatagtagaagggattagtttgtgacaatactatgaaataataatacgaaacttaatataattaaaactggaaaaattattcaaaacagagattaaaataaaactaggattgaaaatgatattaaaattagaatttaaaatatttcaaaaaatagttaatgtcattgtatttttacaaaactattttagataagataaatagtacag

SEQ ID NO: 194203 - DNA, 378 bp, Homo sapiens
taaggtattacggatactacctcataagcatgtagttccccttcggagcatagtagacgccataacttttccttgtgggcaaactcagagtttacctgggtgttcaggaccagttagtggtcagctgtctttagctttcattataaatgctctataagagctgggtttgattcccgggaaaagcattgatcaaaaggggagaaataatctggattgtacttcagaggctgctgtttgaaaaagacaggtgatttatgggagccaaacttcaaggaaatgttaaatctaagttcggcccaaattcattaagttaacctgattttgactgtagcactgtgtactttttttttactatttgtttaatgcttagcatgtttt

SEQ ID NO: 194204 - DNA, 511 bp, Homo sapiens
taaattccccttaaacactgctttcatggcatccctcaaattttgatgttttcattttttatttagtacaaaaggtttaaattcctcttgagatttcttctttcatccatgtgtttagaagtgtgttgcttaatcttcacatattttgggattttccaattatctttctgttattgattttttatttaattccattgtagtctgagagcagacattgtaggatttctattcttttaaatttgctaaggtgtgttttatggttcagaatgtgatctatcttggtgaatgtttcacataagcttgagataaagcttacatgcttggatattctgctgttgtggaatgaaatagtcaatagatatccattatattcagctgattaatggtgtttttgagttcaaacatgtccctattgattctctgcctcctgggttgaggggggttgaagtcttcaactataagagtggatttctactgcagttctgttagtttttgcctcacagagttttgt

SEQ ID NO: 194205 - DNA, 494 bp, Homo sapiens
gtattttctgtacttatcttgtacctacccaatttgttgattgctcttattcgttataatagtctttcagttgactcttcctaatttttttgtgccgagaatcattgatgacaaataaggataatttggtctccatttttctggtacataatacgtctttacttaccatcagttgtgtgtcacttaggaatataaatggctgaaaataactgaaagcctgcctaataagggagtaggccgacaggggctgacttttctcaagttcaggcagtctggagggaaggagtctgtggctgctgtgaggtgctcaaagagggtgtgaggactgggctcctggcttctgtttgttcatccttagcctgtggcttttgtcctcgtgaacacaagatgacctccaggaattatgtctgtttcaggcaggaagaagttgagaaggaatgaagacaaaaggcaaaaaaggcagaatgacaggtcagcaagcgctgctcagccag

SEQ ID NO: 194206 - DNA, 621 bp, Homo sapiens
cttgagttgttctcagagaacactgaaaattcctccctgaacattattagctcaggttttatttctagaattttaagaacttacaaagttgccctgccccaatcctgattcaatagctctgagtcagggaaccaggattctgtgtttttataaagctccccaggtaacaaagcttaagaactcaagactgagagctcttttcctactgaggagttaagagggcataatttgtctaaaattcagttataactggtcaattctttggtgcaaagaagactctctccacttacactttctgcttttggaaataaatcaaaacactgaataagaattataggtagggttgggtgcagtggcccatgcctgtaattcccactcagcgctttgggaggctggggctagcagatcacgaggtcaggagttcgagaccagcctggccaacatggtgaaaccccatctctattaaaaatacaaaaataagtcaggcacctgtaatcccagccactcaagaggctaaggcaggagaatcactgcaacctctgcctcgcaggtttgagcgattctcctgtctcagcctccccagtagctgggtttacaggcgcttgccaccacacctggcta

SEQ ID NO: 194207 - DNA, 395 bp, Homo sapiens
gcttgcccagtgtcactcactggggtagtggtggattcagagctaggtcacagatctcctggcttctccagatcccagttccttcccctgcaccacagcaatatttcccaaaggaacagccataatgataaccatcccatccaatctgctttgtttgggttaaaaaatgtaaaatgcatgaatccttctattagaaaaggtattcaatcatcatgtgatctcctgctttaaaaacttctcatggttctggatgctgaaagaacagagaataacagtgtctgcctggaagtcaagaccctggggactcaacctacctgcctttctggtctactccctctgtctccaatgcacaacatatactggacaactcaaggggtcctctctacaccccatgc

SEQ ID NO: 194208 - DNA, 359 bp, Homo sapiens
tgttaggccaccaacctaggaactgtggatccgggctttgtcaaacctttgagtttttcatgtttttcagtaggagacgtgaaaaaaatctgctgagggtggcttgtgtgagctaccatgagggcacattttaaagttgggaggctcctttacatcaactaactggtccaatttttagtacccactttatgtttcattgcttttgccttgagttttaaagagagtctgcatcttctaggaaagtaagaataaatcaaaattaaataagtatatatgtatgtgacgtatgtgtgcatgaatatatgtgtatagtaggcattttatgcacatcacccaatttaattctcattttaatgagg

SEQ ID NO: 194209 - DNA, 203 bp, Homo sapiens
gtgcttccaaatgacgacagcagatggacctacagaggcacgacgtgatctagccaatgccaacatgtctagcattatctagtaccatctcttccttggactctctggtttctagtcactgctgaaattcagtctttagttcaatctaaactttcacttcaacagagaaacttttcctaatcatcctactaacactagcaccc

SEQ ID NO: 194210 - DNA, 335 bp, Homo sapiens
tctgtgaaataaggcattcagatagcactatgacctattgatgaaaatttcaaaactgtatgtatgacatgtacatccagattataaagggccaccaactgcctagcacaatgggtgccaggcacccacctcagcctcccaaggcacaaagtcaggtgaaactgatgagacttcagaaccctgggaagaggaggaggatgcacttagggagcgctttctgtctgccaatgactaggctaaaggtgctacatttcttcttcgattgattttatatttaatgtaggaattcccaattatagaagacaaaactgaatcacaatggcgaagcacactta

SEQ ID NO: 194211 - DNA, 249 bp, Homo sapiens
atgggatcactgacatactcaattttagcttaagttaaaaagaaaaggtgataaaattatatttttgtttaagtacctaggtatctactatgattttagaatgccacatggtggttatcaattcattagacagaggcttgaaatgtatttgtatacatatgtagatgcatataattttaatgaattatctttttgccattaaattctatgtatagcttatctcagcagtattggtttttggtaatatat

SEQ ID NO: 194212 - DNA, 464 bp, Homo sapiens
tcttctaaaaatttctatgttttattttattatttttaatatttagtattttttacatctggaatttttttatataaaagtggaaggctcaactgcatctctttttatataaagaacgaattgtttaaacatcacatgttaaataatcttttctccaataaattaaattatattagcatcaatttaaagattttttttctctaaaccactaatctatttatttgttgccaggcctgagacgtattgctttgattataatagctgtatagtctcttttaacatttggcaagtttgatgctccctactcattaatattatttataatgttagcctggttttcctttttttttttcagtccaaataggatttagtcagaagaaagatacgtggattacatttttaaaatactgatcaaaatgaagatgctccaaccgtataaatggcagatgaaatagactttaaag

SEQ ID NO: 194213 - DNA, 428 bp, Homo sapiens
actgttatggtctaaatgtttgtgtccctccaaaatttatattttgaaacctgatccccaatgcaatagtattcagacgtggggcctttaggagatggttaggtcataacagctttgccctcatgaatgggagttagtgcccctattaaggagagtcgagagagtgtttgtcctttccatcacgtgaggacagagcaagaagtagctgtcagcagacaccagatctgctggcaccttgatcttgggtttcccaacttccagaactgtaaacaacaaatttctattgtttacaaattacccagtcttaggtattttgttgtagcagcacaaatggagtaagataagacagagaggtaacggatgttgggtaagttacaaaagcgtctcctgtgaccactttctctccacctacagtaatggttcttcta

SEQ ID NO: 194214 - DNA, 265 bp, Homo sapiens
ctggtcttgaactcctgacctcaagtgatctgcctgccttggcctcccaaagtgctgggattacaggtgtgtgccactgtgccctgcctagttgtgattttgtatccattaacaaacttttggctattccccctgctccttccccttccccaactctggtaatcactattgtactgtctacttgtgtgagctcaactcttttgctgctatatatgagtgagagcatgcggtatttatatttctgtgccaggcttatttcacctaa

SEQ ID NO: 194215 - DNA, 217 bp, Homo sapiens
gctgacctgggcttctgtctagcttgaaaaacttctagctattgactttttgcaagctccttcacatctccaagcctcattcgtgtatttattcattcgttcagtctataatgtattagcttgatgcccagttaccaactccaggcatggtgctgggcacaggagatgcagctgtgaacaaaacagacacaagtccctgcccttggcagacaatgag

SEQ ID NO: 194216 - DNA, 300 bp, Homo sapiens
ggtgatgatgatgataatgatgatgaatgatgaggatgatagatagttcttattgtgtattttctgtaagtaaatcaccatgcaaaacacttaaccaagtcactaatttagtccttgcaataacctcaacatataggttttactagcattatctccattttacaagtggctatggactgtttgtgtccccctaaaaggtttatgctgaagctctaatatccaatgtgagagaattaggaggtgaagcctttgggaggtgattaggtcatcaatgtagaattatcaagaatggaatagtgc

SEQ ID NO: 194217 - DNA, 339 bp, Homo sapiens
aaaaatgaagtagtataatttttggaaccatgattgtatattcagtatgtttttgactgaaatgttgttacataccacatgactgcaattagtaaaaataatattgaatcacaccagaagtaaaataagtcctctctaaagaaatataacatgatacagaataccttgaattcagtgtgaattaattgtcttagtgtgtgtatgtgtatgtgtgtgtgagagagagtacatgtaggcaacgaaagcagaatagacagtctcttcaaaagtcattggaacatttacaaatgactactgtatatggctataaaggtgacccataaggcaagtatcaacaaa

SEQ ID NO: 194218 - DNA, 450 bp, Homo sapiens
catttgccctgggatatgccaccatcagcagagaaaccatgcgttaactcttgaaatgccaaaatgagtaggcattaaataccttgccctatctgaccacactatttaatgtttttatcttaaatttaaaaaactgaaatctgaaactgtatgatagtcagtaggcctaaaactcccccttgactttgagaatttgaagggattcccttccatcctgaagtctactttcttgtcatttaagggtgagagaagggaagcttctgtgcctttctagaaattaacaaagaacctgttgggtcctagaccagaaatccagcacgttatcctagcatgaaactcccttttaaaaagtgaacacccaaagagatgttacaaatgaagatatagccccttcagcatctctggagaccaataccacaataaggaataataacaacctaggaataaagg

SEQ ID NO: 194219 - DNA, 254 bp, Homo sapiens
cacactcctgtccatttgtgtggacagccaatttcccatcttgccaggcagaaaaggtcaaagggagaagcctctggacctttgttacttaggcgtggaaagttagggtgttcctttcaatttagttctaagaagtaggcgtgaaacagccttaggttccctacctcctgaccctattctcctgcctcaaagggtgaacagataaaagaatagaaactgttcagtctgacaacaaataatcagcagctgaaaaa

SEQ ID NO: 194220 - DNA, 192 bp, Homo sapiens
tgatgtggccttacctgctccttgtatcttattggattgaatgagaacagatgcaaaacaagtatgtacagaaatgccaggaaaactactgtcttccaatggggttcaacagttcaaagccctccattgatggagccacttaggaggtttcagtgtcttaattcttttagattttgacagttttagaaaact

SEQ ID NO: 194221 - DNA, 314 bp, Homo sapiens
atcagctcggtaccgccagacgctgaactatgtgcaaaatacacccaactctgagataatttttaatttttttgtagagatggggtctccccatgttgcaggctggtctcaaactcctaggctcaagcagtcctcctgctgcagcctcccaaactgcaaggattataggcatgagccacaacgctcagtcttaatgttataagaaactgccaaacagttcctcaagatggttgtaccattttatattttgccagtgatgtatgagggttctacttggtccatacgtatccttgttcacatgtgatgttgtcagt

SEQ ID NO: 194222 - DNA, 331 bp, Homo sapiens
agactctactccttctgcttcagctgctgtgtgttgggcacacaggtgttgatattcgtagcagtactactgttcattcaaacagacacacatgaactgttacatgaaggatccatttcacaaatagaaccattagaggaccttttaagaaacccatctcccttatcccctttctgtagtggaacgtggagcaatgttaagattgctggacactctggaacctttaatcctcacgcctggaatcccagcactttgggaggctgaggtgggaggatcacttgagcccaggagtttgagaccagcctgggcaacttatgaagaccctgttgcc

SEQ ID NO: 194223 - DNA, 455 bp, Homo sapiens
gacgggagagaacaaggtgtggaaagtcagtagccctggctccaggactcttacacacttgaaaaggccacttaacttctgcaaccccagtatccttcctataaaatcacgttaccaacaccatatctactttttagaggactgaatgaggacacgtcagaaagaaatttctgagatgtacgaacgtacagttgtctaaatcagtaacatcatgcatcaataaaatcagtcatcaatgacaatgacaaaaaactaatcaagatcgtacagtctcttcacttacctatacctttatcaatataccagtagggcctgctattccttttctaggacaatctgggtccagacaaccgcccagtgtgtctccaagaaaatctggagtagctctaacatgggcctcatttctctctagtttgtctctgttctataaagcaggcttctctagcttggctgca

SEQ ID NO: 194224 - DNA, 954 bp, Homo sapiens
tgccaactgggttccagcaattctcctgcctcagcctccggagtagctgggattacaggcacacaccacgatgcccggctaatttttgtatttttagtagagacggggtttcaccatgttgaccaggctagtctcgaaattctgacctcaggtgatccacctgcctcagcctcccaaagtgctaggattacaggcgtgagccaccacgcctggccttgctgttcttttagtttggttttcctctgggctgttgaatgacaggaatgacccaagtgagagttgaccctaaaacagaccacgtgtctaaattctctcccacccttcctaaggcatatctgtctttctctcaagataatatggctttgtccctttcaaaggggaagaatgcaaccaccaaagcctattgaggttcctgcactttgactttcccagaaagggtcaggaaacctgccactgcttttcttcagctaatggaaaacatttgtgtccactctgcttggtgttttcttgggattcttctcagaatctttttccttaatatagttcaggcaactttgctgccaagaaataagaggattttatagaaccattgaggagtaagaaaactgggaggaaaatgaaaattcgactctatgaagaacaacagcaacttcattcctacctgataatgataacgtgattttgaacttttcaaaatgctttcagtttcattatctcacctgggtttcacaacaaacaagtattaccaggtttgcttattttacagatgaggaaactgaagcctggaggaggttaaataatttttgcccaaaattacatgctggcaaaaggtggctgtttgctttatgtcaggattcaaacacagatttggggaaatccaaagcttgtattgtttctacactactttgccaagcttattttatcttctaaaggctctatttaggaatctaattt

SEQ ID NO: 194225 - DNA, 845 bp, Homo sapiens
tgccaactgggttccagcaattctcctgcctcagcctccggagtagctgggattacaggcacacaccacgatgcccggctaatttttgtatttttagtagagacggggtttcaccatgttgaccaggctagtctcgaaattctgacctcaggtgatccacctgcctcagcctcccaaagtgctaggattacaggcgtgagccaccacgcctggccttgctgttcttttagtttggttttcctctgggctgttgaatgacaggaatgacccaagtgagagttgaccctaaaacagaccacgtgtctaaattctctcccacccttcctaaggcatatctgtctttctctcaagataatatggctttgtccctttcaaaggggaagaatgcaaccaccaaagcctattgaggttcctgcactttgactttcccagaaagggtcaggaaacctgccactgcttttcttcagctaatggaaaacatttgtgtccactctgcttggtgttttcttgggattcttctcagaatctttttccttaatatagttcaggcaactttgctgccaagaaataagaggattttatagaaccattgaggagtaagaaaactgggaggaaaatgaaaattcgactctatgaagaacaacagcaacttcattcctacctgataatgataacgtgattttgaacttttcaaaatgctttcagtttcattatctcacctgggtttcacaacaaacaagtattaccaggtttgcttattttacagatgaggaaactgaagcctggaggaggttaaataatttgtcgacgcggccgcgaatttagtagtagtagtaggcggccgc

SEQ ID NO: 194226 - DNA, 449 bp, Homo sapiens
aaagaagaatgggtctgggtcagaaccttcttctgtctcccaggccttgcaaatctagtccagtccattgtacttatcccaggagcctgattctgtcttttacattcaactctggcaagcaggaaatggctgaaaattaagcaatttccctgtgaaaactttcagtctgtttgtggagggagctaaataaaccctacaaataaagaagcaggcagagccccttgtgaagaccactgatctaacacgacttcagcctcttctctcttaaccctgtgtcccctggctagacctgcagtctttgctgagcgtctgtggctttctcaagaccagtggaaaacaaaacagcagaagtgcttctactttcatttccaaataaagtggaagccctgcatgagctcggctgtctcccatttggatgaagcccaaggatgccttaatctcagggctag

SEQ ID NO: 194227 - DNA, 545 bp, Homo sapiens
tgtaaatgctggaagctatcctccaagcctttcctttttttatagcacttgctgctaaggataattatatggtttcttatcaacagaatgtaaattctcccagtgcccatgaatacatactggcccagaggaaaacaggtgagaaatatgtcaaaagaacttgtaatacaagccttcatatacatggcaggggaaggcctggtgcctccttttcttacaaaataggaaaaatagcacctaaacctgcaggtttgttgaggctcacactgtttagaatggcattgaacaaacatctggcacaggaaatgcccattataagtcacctgtttccatttatgtctcaatctcaaatgtggtgagacgtgccacagcgattagtatggcagattacaggggctgatccccatcttttactcacaaccctgtaactgtttcttcttgataaagtaatggtgatagatagggacactacacacaaaccattcatggattctcccctaagtctgtgcaatcgtccgtatatgtattaaatctaaaagcaaaaa

SEQ ID NO: 194228 - DNA, 370 bp, Homo sapiens
gtgaggttaaacgatgtgagcaggttcagttttgccaaattgttctctaaagttacaatcccgtgagtatcacatgagagttcccagctatttctctatatctttgtgaagaattactccatgtttgtccacttaatgagtaggcaattgtacctcactgctgctttattttcattttcgcagagggcatcttttcatatatttaactgccatcagtttttttacttttgtaaatagtccattcatttgtaccaatcatctttctttggggttatctgtattttccttgggttggagcatttctctagtgttttcttttttttttttttttttttttttggaaaagggccaccagcccttgcagaatctt

SEQ ID NO: 194229 - DNA, 215 bp, Homo sapiens
acagcacatgctcaattcatgtctgtgtgtcacattttgcaagacattgcaatactgatgtgtcaatattgcaagactttcaatttttttcattattatactaatatgatctttgatgttgctattgcaatcattttggggccacaaactgcacccatataagatggaaaacctaatcaatgaatgttgtgtgctctgactgctccactgaccgg

SEQ ID NO: 194230 - DNA, 390 bp, Homo sapiens
cctccgcctcctgggtagctgggactacaggtgtgcaccactacacccagctgattttctgtattttctgtagagataggattttgccatgttgcccaggctggtctcaaacacctggactcaagtgaaccacctgccattgcttcccaagatgctgggattacaggcatgagccactgtacctgaccattttatcttgtttttaaaatttttattaattttttccctagcttcattaaggtataattggcaaataataattgcatgtacttatagtatgcaatgtgatgtatacacacacacacacacacacacacacatatacattgtgaaatgattaagtcaagccagctaacagatctatcacctcacattcttcttatatttttt

SEQ ID NO: 194231 - DNA, 122 bp, Homo sapiens
tgatgacatactggcaagtcccaggggctgctgtgtgattagagcttctcaccaggatagcttccttctaagatggcctcccactacttgctgagagaggaagacaaagtgggtttttaaaa

SEQ ID NO: 194232 - DNA, 747 bp, Homo sapiens
tttcctttgattcccttttaaccttctattgtataccttaattgtgtggtaaaggaaaggaagagtttaagtggattcaaagtttgtcgtgttaaagtgaattaaatatggtctgagaaggactttgtactctatatttgagtcctagtggacgaactgtaacctaacttaataggtagacaagatcgaaaacctgacttaggagtatgcgcctgtaacaatagctgagtcttgcccaatcccagcagccatatttcaaccattcacacactgctgagcattcagactgtgttcaaataaggcaaatgctgagctgtaaccaatctagttgtttctgtacctcacttctgatttctgtatatcactcccccttttttgtctataaatcttcttccaccatgtggctgcactggagtctttctgaatctgctgtgattctgggtgctgctggattcgtgaatcgttcattgctcaattaaactcctttaaatttaatttggctgaagtttttattttaacagtaactgtcagtaatctttttcaatgactgatataatgaacctgttaggagaaagaccaggatgggatttaggtaggttgaacttgatgtgcttgctgaacctatccaaaagaaagttggaaagtgagtctagaactcaggaaaaaagcccaggtgagagagaaatatgactttgggaatcatgcacatagcagtgattgccagaaaatgtgtggcacaaagtaaaa

SEQ ID NO: 194233 - DNA, 427 bp, Homo sapiens
tccacgtggctctgccagcccttcctttgcagctttgcgcatgttaaatgtcatgtttcgtggatttgtgttgatgataagctcccgatgcagagatggtagggaccatctctgctcacgtgtctgtccccaggcccagaagacagcctggcacacggcaggtgcctgatgagcacttgtggactggatggcattggccagtgtgcatctcccaggaactctgctgtgaactccgcttgggcagggacatgtctgttttgttcaccattgtgtccccaaaattcaaagtcttgcacctagaacactcttgttggatatttgataatgagtgagtttgctgcaaaaggaaaaaaagcaagaacaataacaattaccaccataaaataagaaaacggacccagaatagaatttgaggcaagagaccctc

SEQ ID NO: 194234 - DNA, 361 bp, Homo sapiens
tacctttaagattgttctcctgctgcgaaaacactgcgattgaacattttccttaactaaatcactaaatgcaaaaactgagacttcttttgcctacttttataggtctgaggttctactgaggcagctgagacacttcattctaatatctagtcatctggtctggtccaaccccacagaccgatggtggagggtgggagaggggtgctatttacataatcatggcagtaccactgatttcagaaccaggtttgggagacaggatggttggaatagcaacttgcctttccatttgctctcctacaagccccctaaaatgctgtgtgtatatgtggaagggagtgttgtgtgtatgtaccag

SEQ ID NO: 194235 - DNA, 409 bp, Homo sapiens
tattgtcctggttgacgagagtcaccttgcccaagatcacaccgcctcctgggtggaacctacaccccatgcctactcccttgtggcagctggaacaatgacaaaggggcatctccacccaagagattccctgtgaaatcagttgaggcctttgttatgagtgttccacaggccagctttttcttttactcaatcttgctcccctgtttaatctcactttgtctccccttatcccccaccaagttgatccttaggaacaaaatccaatcaatgtcctatcaatttcctgaacacaaatctttgtttcagagtctgcttactgggaaaccaatgagcattaaaaagctatacaacgtaatttaaaaaaaaaaaaaagcaaaaacaccttcaagaaagaaagtgagaggat

SEQ ID NO: 194236 - DNA, 370 bp, Homo sapiens
ttctagcttttaggacgatggtgtgtggggcaagttgtggcaactctagagggtgccatttatgtcagtgtccatgtgaatggccgtgcagtggacaacctgtgcagctgtacatggtggctctgcgtatgtgtgggtgagcttagtcttgcaggagaaggcactcgcttgctggggagctgtgtacattggtgaaaagtgcctgaactatggcatcagatctgggcttataccctggtgctgttacttgctgtagactttagacgaagggcctaatttctccctgccacggttgtctcatctgtgctcatctgagctcagccatggagaggattaaatgaagcaacttacgtgaagtgtaatgatcatg

SEQ ID NO: 194237 - DNA, 314 bp, Homo sapiens
atgctggaaaggaagaggaaacagtaatagttgatctttataaatatcaataggaatactctctaggaggccctgtactaagcatatatgcatcctccattgtagtttttattcccacctaatagatgaggaaattgaagctcagagagtttaagtaacttgatcagggacacaaagctgggatttgcgccaggtgtccaactccaaaggccacatttggaacactctgctgtactctaggatctgtagcatcttcaattctatagcccatatttttggactggaagccagaatttccacattgttttcccttg

SEQ ID NO: 194238 - DNA, 437 bp, Homo sapiens
atttactacaataaatgacacaatcctagcccctgcggaatgttgcccagataccaaaactgccacgtttttgtcaacgcttccttatagtataacataaatagcttggtcaacaaatgccatagatgtttggaagcagcaatgatcactgtggcctaagtctgtcaacgactccttggaggaagtgatgtttcatccaggtcttgaaggtaggtaggacttaggtaagagtgaatgccgtatctcccatctggtgcttttattccctctcagaattaccttttctcaattacacttaattactgtatgccaatatatgccgatagcacattctaagagaagctaatttttttttctagttgaagggtgttatcgagcacatcatctagtaaatctctgtcacattgcatctgccttcttcattctttttttttttt

SEQ ID NO: 194239 - DNA, 415 bp, Homo sapiens
gtgaatgagtcagtttaagttaacctagtcctatgagagcaagaaaatgattaaacattgctgtttggaagaaaatcaaagggcagcaaggtgtaagcgtagtccacataaattaaaattcttgggtgggcgtggtgactcacgcctgtaatcccagcactttgggaggccgaggcagttggatcacctgaggtcaggtgttcgagaccagcctggccaacatggcagaaccctgtctccactaaaaatacaaaaaaaatttgctgggcatggtggcacatgcctgtaatcccagctactcaggaggctgaggcaggaaaatcgcttgaacccgagaggcataggttgcagtgagccgagatcacaccactgcactccaggctgggcaacaagagcaaaactctacctcaaaaaa

SEQ ID NO: 194240 - DNA, 729 bp, Homo sapiens
gttgcccaggctggagtgcaatggcgcaatctcggctcaccgcaaccttcgcctcccgggttcaagcaattctcctgccgcagcctcctgagtagctgggattacaagcatgaaccaccataccgggctaattttttgtatttttagtagagacagtgtttctccctgttggtcaggctggtctcgaactcctgacctcaggtgatctgcctgccgcggccttccaaagtgctgggattacaggtatgtgagccacctcgccaggccagaagatagatttttatttttagtttataggttgaagcctcagcttttataaggtacatgaggagacaaaccagataaatgcttgattggttgcagagatgcagtcgccttatttggacttgccagcccgaaataattcaaaggttcagatttcagtttgaagagtttattcaagcagaaagatagcaatggcccattcaggaaaaaaaacagactccagagaaatggactcagtactctaaaattagaagttaagttctttcttatattaccaggaaaagaggtcctgatcagaccccaagagagttcttggatctcacacaggaaagaattcaagacgagtcacaaagtgcagtgagaagggagtttgttgaaagctactctgggccagcatgatggcttagatctgttttctaagcacattgggaggccgaggcaggaggatcacttctagtcagcagt

SEQ ID NO: 194241 - DNA, 267 bp, Homo sapiens
agcaaaccttagtcacatctctcattaattaaatccagtgattctgacagattgggaagcaagtttgaaaaaagctacccataggaatgcatagtgagtaagatgattcagaccattcccacatcaaacaattctatatcttcctctcttctttaaaatttctgtattgagccatcgtttcttgctcaccttcagtttgagaaaagcctttttttttttctatttgtacttctgctttctgccatctctgcctgcttcaggatcgtc

SEQ ID NO: 194242 - DNA, 606 bp, Homo sapiens
aaatttaaaactatttctggaaaggtgtttggtatttctctaatataaataaatacaaatatgtgtgtttatttctttagtctgttaaatattgaacaactcatggaactttacttttggagcatttaaaaaatatatgaattattgtgccagtctcgttttatgtcctggtgttttcagtgaagagaatagcctccatatacatcatatatatgtttgaagatggtcattcttcttattaccaattatattttctcacatgatttgtactatattaaataaagcattcataaataaatgacaaattcactccttacaaacatcctgtgtatattttagcttactatttaaatgaagaagattagagaaactaagatctgcataagggttatgaaatctaactcatgattccattgcagcatgccagatgtcacttgttcttgttctcattaaatatttattattcctgtaagctctgcctaggtcttattttttcattctaatgcatgttgaagaactaactgaagttatttttcaaaagtattttgagcatctcgttgtgagaagttttgtagactttctttaatgaatacattaatattttgg

SEQ ID NO: 194243 - DNA, 400 bp, Homo sapiens
gcatattggtggacgaggaggaaagcattatccccatttaccaatgaggaaactgaatctccaacaagctcaatcaaatttcacagaaaaaagagagaaaataaaagcagcaaatataacaaaaacataaaaaaattatatgtcatataaagaactctgcaagaaccatgctctggatgtaagaaatgagagggcaaagcattgtgacaaatgttatgttggctactgacccgagggacagaaacactggggcaaagcattttcctttcacttttattttggagtgcagagcagaagaaagctgtttcaacactaagcggataggaaaaaacgcacttaccactaagaacatgctccctaagttacctgtcacagtggcacatgtgctgtgcacatgaag

SEQ ID NO: 194244 - DNA, 438 bp, Homo sapiens
atattaaagtgataacacatatgaaaaacaaattctcttttcctgaatattaatgtgcacctggagggccaaagaaggtcaaaatcctcacgtacaaacctgcccaggtaagatctttgctccacaacctgtgatccattaaagtctgaacgtctgcatccactctttaccagggatggattcttccaaagacttttctgtattacaaagtgactaccggtgatgaaccttcctgccttttctgcttatcatttccaggttaattctctaaggtagaaaacttcttatttaaaactttaaatatccaatgaactggaatcctgaagctggtaaaactttggatttttacagatgtgatttgaagtactcgactgtgggaaacatctcaaaccacccacaatttccttctctatcagctccagttccacaaacactgac

SEQ ID NO: 194245 - DNA, 593 bp, Homo sapiens
tgcgtctttcaactgcggtttacagagctgagagcctagcctgacccgcatcctctccgtcccctttccacttgggagtctacaattgcctctttgctttgtcctgttcatggttgtatccaggatccataatgcctaatgctgtgctcggcagagtgatctagacactgcagtttctttagaaacctagtatcaaatgcccatctttcttgaataccctggaatcctctccataacgggaggtgaaatgtatacgttttatttttacaagtctcttaaactcaacctcaagaaacaaataacatacgctattcaatatgaatgtaaagtacatccttacaataaatacacccgtttggtttggattcaacaatcaattcatgctcaagtaaacaatacgtcatgcttttctaaccaggagtttgttattgcggatgctggctctgttccccacaagcatattctactaatgcacaactatatatatttaaactgcgggaaagggtcgcttaaacaagggtaacactataattacacttagaaaaatctcagaattcctttaggacactttaaactggatttaaatggatttg

SEQ ID NO: 194246 - DNA, 403 bp, Homo sapiens
acagcgctaacagacttcccaaagaaaaaggaatcaagatcttaggagagcaaacaaacgagctgtttacatgctcagcttgcatgaaaagtagaaaaatattaataccacgaaactgtattttaatacggcttaagcaaaacaagaaagcctcaaagcaggttgaactctattttctaatagaaatctatacagctattttaaaagataaacctgaaatttagaagtatttacaactcagaacacaaaaatcacaagaaaacgctatatgaagacaaaataaaaacacaaagtcccaattttcctgttttggctgcgttttaggtgtgggccattctacaagcaaagcacctgtgtggtaaacaaagcagttatccgaaattggccatgccctacacagagg

SEQ ID NO: 194247 - DNA, 125 bp, Homo sapiens
tgggctggcctcttcccccactgctggggggtgacggctccccaggcgaagaggggttggttctggccccctcacccccctcccacctcagagaggcctctcctctccagaccgcagcggggggt

SEQ ID NO: 194248 - DNA, 313 bp, Homo sapiens
gctttaccgtcaagttccgtgatctctattctatgacaccccctccaattcagtctctgctgtaccagagggtgtaattaatgtgcattactactatcattacattctctcccataacagttttgcagcccactagtcaccttaatctccctctctttaacactaactagagtgttggatcacagagatggagtttctgatggctcgactatggtttaaccccagaatgctctatcagtactaccactagtaataagagctgggctaggcgcagtggctcaagtctctaacctcaacactttgggaggctaag

SEQ ID NO: 194249 - DNA, 218 bp, Homo sapiens
  misc_feature (209)..(209): n is a, c, g, or t
tagacaggaggatatgtagatggaggggaggttgtggtatagacaggctggtgaagctctggatgggaggacggggaacggcagtggttcagggagagacagaggttctgtgacagatagaaactcagtgagggcatgggggtggggagtgaagggagttaaccctgtggctagaagagcacctgcctagccggggtaccggagctcgnaattcggta

SEQ ID NO: 194250 - DNA, 215 bp, Homo sapiens
agctagaggttcccagtagagaagggagttgtggagatggccagtggaggcacatcattcagggccctgaaagtcatggtcaggagtctggaagccactgggggccttaagatcatccacttccacaatgatgatccaccatacccatttcaactgtgcacctggcatggtctttagattctcccctaccctgctctctttattttcccttagta

SEQ ID NO: 194251 - DNA, 366 bp, Homo sapiens
catccccgttagatgctaagcagtagtgttcaggtattttgctctcccaaaaatattctggatcaccatatacaaacagtgaagattctgtctgctctggagttatatttttgggagagcaaaatacctgaacactactgcttagccatacaaaccaaagcaactatggcgtagacaatgagctttctatttcactcagttaaattctgcttatccttcaaaactcaactccgcatcccctcatctaggaggtgaaatactggatttcacatattctgaatgctgcttctctacgcccactgcacttggcgtataagcgtggcactggaagtggacctgctcccctagccttcatcatactgcgct

SEQ ID NO: 194252 - DNA, 481 bp, Homo sapiens
cacaggtcccagtcagccagtggcgagccaggactctcggggttcagcagggggtagtggacagcccaagctgcttctcttagaatggctgtggcttcacaagtgatgagaagagcatgcgcttgatttcagatccccattacaagctcataatgaatgagtcacaggagaaaggtgagacttgggccctttcgtgcctgatgggaagctcctgccaccccggggagcccctccagactgtccttgcccacctggctgcactggcctctgtatgccaacccagtgaggacaggttctgagggacctggacagatgctgctgcccctagccatggctggacgatgttatacagccaagcacagcacgtgctgctctcaggaagcccaagggctgtggtcagtgcagtggtgatggtgggcacagggtgcttcccagaccttccctcctccaagcagagctcctgaaatgggaggggactctg

SEQ ID NO: 194253 - DNA, 364 bp, Homo sapiens
ctgacgtgccatttcctgccctgacagcatctccgcttccgtcctgaaacctttatcaagaaacaactgtgcagcccacgaatccattcagtcaagatgtattgagtttctgctatgtgtactgactgcggggaaaacaggattcttgtcctcgaggaactagctggggactcgggacagagtcaaacacatgcaacatgaggcctggtatgttagatgggcagagagccgggacactgctggctgcgcagggagatgggggccggaacgtttttgaggaggatgaggctttgatttctctggtccaatcctctcagtgtcaaggtgggtaggtggggagattaaagtctagagagtggtaggt

SEQ ID NO: 194254 - DNA, 510 bp, Homo sapiens
ctttcctttctttcaactggcttttttctatgttggatttccttttcatctctcttcctatatttatattaaagaatatattatttctttatttttaaatattttgctgatctgtatcataattacactgtaaaacattgattatgttatcaatttgactgtgcagccttcacctctcctcactctatatcatttgacttttttcagctgacattaaatgatcaaataaatcatattatctgtgcatatagaaatgatctctgaggaagtgatgcttcacttgagcaatcagaaacacaagttgaattttaagtgggcttacatttttcgtgcttttccatgcttattaatgttttaagtaccaagctccttttcctaggacgtttttgaatcctttattttattcaaatataaccattttctagacttcagcaccacaaattgggttgaaagtttcagagactaatcagaaatgtcgtatcactgttgtgcactagaaaacaaagatgg

SEQ ID NO: 194255 - DNA, 288 bp, Homo sapiens
agtgttgcgtgagcaaccatctatcaggatcaaaaatggaaataaggagatttgaattatagaaaaatattatagggatccccagtggatgtttttagagtgattaggtgggatcaattttatatggttgaaattgatcacatttttcaattgctagaaacagcaaaaatgtttataagctgagtatgttttactgtatagacaagtaacctagttagatgaatataatataatgttattttatgtaaaattttagaaagaaagaaagaaaatgggactctagcagtg

SEQ ID NO: 194256 - DNA, 554 bp, Homo sapiens
gtaaatgcttggattgtttgaaaatttaaataatgggccaggcacagtggctcatgcctgtaatcccaagaatttgggatgctgagacaggcagatcacttgagtccaggagttcaagaccagcctgagcaacgtggctaaactccctctctacgaaacatactaaaaattagcccggcttgatggtgcacacctatagttccagctattcaggaggctgaggtgggaggatcgctggagcccaggaggtcaagactgcagtgaggcatgatcacaccactgcacttcagcctcgtcaacagagtgagaccttatctcaaaagaaaggaaaaaaaagaaaatctaaataataacggaaaataaattattggaaaatgtgttccttttttgctgctttgatgtctacaaagagatggcaataaactaatataatgaggacctagccatcaaattagttaaaatgtcaatagttcagagtacttaggatcaatcactgcacaaggaaaattttaatatgaaagtatctgaaagatgtttttgcaagtttaacaatg

SEQ ID NO: 194257 - DNA, 741 bp, Homo sapiens
ggcatatggaatacatcaaaaacgacagtggggaaatagcaaaaaactggaaaaaatttaaatgtctaacagaaggatggataaattgtagtgtattcattttttaaaaaatgacagtgagtaccctgataattaagaaattcacataaaagtatgaatagtgtataaacgtgacctaaaaatagcatttgtgggaacatttagtttagaagtaatttttttttactcaactgtctggcccttaatactgctattaacattaccaaagaacaccatttaggaaggtaaagaaaccatgtactttagcaaagattttattttaaaatgtagggattttatttttaaaaaagtttcaggattagtttcatttaaccgaaagatatagctacatctttagaacatctttacagaagaaccagtaaatattttctcatctgaattgtgagtttcttaaggttagggtaaatagagaaaagaagagattattacttggaaaaacagaaaaggcaagagatagtagtaatgtatagtaaagtttcagaaggaaattggacagttaaggatcactcaagctttagtgacttctgtcatttgtgctttattgcagaaatgttatacagaccatttttgggcatttgtctcattttgtttttgcgtaatcactgaagcaattaggaaaaaaaacaaaaacgcctgctttagatgaagaacccgagggaaaaaaaattaaagagcttgccc

SEQ ID NO: 194258 - DNA, 772 bp, Homo sapiens
ccacctgtctccacctcccaaagtgctggcattgtaggcatgagcgaccgtgcctggcccaggtttagcacatttaaagagatacgagggataaaggtgtagaagtggaatctccttggaattcacttagcatgtttcgtcataaatcctgaaatcaattctgctccctgctatctttgccatctcctttgctgtgcccttgcctaaggtgactgtggagaaactgtgtttccctcagtgagtgatgaatattctttggcacctattcatagtacaggtacatgttcagactaagttggtcgcttcacccttcacttgagggctgcacttaatcagacctttctccttcccggattcctgctgtccttgtaaccattcattaaatactgacctggtttgtttatacctactgtcccaagtgcaagtagacttggtctttggtgtaatacatatttgttaaataaattgattctcgtttgaatctgttattaactcatttcttattccacattttatcagtgacttacatcatgtgcaaattatccgggtgaaatttaatcattactgaaaacgttattttttttaacttgagttttaacaagctaacttgttgtcttatgtatgttcatgagaataaggaagatttaacttatggtagcttgcttggatcaagaccattaagtttcagttggccttaagttagtgtgagccagtacagtactgtgttgttcctgtcacactgatgtgagctggctgggctcagtggcttacg

SEQ ID NO: 194259 - DNA, 321 bp, Homo sapiens
cttcagaccttgtgggactcagatgatagtaggaaggggacatttggatacagtctcaaagactggaatgaggagatgggttgatgtcctgtgtcccctgcaaaatttctccgctgtgatgatacgggaagtcagagggtaaaaacaatggaaaagagagactgaggttaaggcttgggatttcacgaaaggcattaggaaaccaccagagattttaaagttgagagtagtatacacatgagaggtaaagacatagttggcagctaactagggtagtggttcccaaacctggctgtacgtttatggagctttctgttttgc

SEQ ID NO: 194260 - DNA, 155 bp, Homo sapiens
ccaagataccagccgagcctcagagggtcaagggtcagcaatggcccaatgccaggcagttggccaaagtctgaacaagtgagtagatggaaggagaaaaacccagcaggagttggcagggaccctgcagcaggaaaggactccagcccctgggg

SEQ ID NO: 194261 - DNA, 395 bp, Homo sapiens
tcctttaacggtgtgttcctggaggtcaggcttccatcctcccgttctgataatgcttagctccaggatttgttgcattatgggggttctttgatggaaagttttatttgacaatgtaattttcttggatgcttttaatgacttaaaagctggaagaacaggaaaactagttctcttgagctctttcatgtccagtaattcccagaaattataactttatgctggaaattaaacctgctatttgaaaccttattacagggtgaattaagagtttaggtttcagaggcttttctgtgtgactttccccttagtgggagggggtttggtatgcccattaagttttatcttaaaatttaatgtgaattttacattgtactcagtaacgtggctgattg

SEQ ID NO: 194262 - DNA, 599 bp, Homo sapiens
aggagaaatagtgacgaatctcagccactgacttagagaaatattttaatgatgtgctatttgtgaaatttactgtcaaatacccaggggactgagaattaaatgattattaattatcttcatattccctgcttgctggtaaacatttaaagtcttgtcaagaggaaaaaaaaaaaactgccgcttggattaatgaaaaccaatgtaaatgctttaaatacttttgctcagcacactggagctttctgtttttcagagctcctagggagtgtgagtgatgtgtgttttcaggactgcgtttctgtggactgtgcacatcagccccaagggtgtgtttctgataagatacagtgcagtttttctgatacggccggaatttttgctaagaaactttttgtgttttgtttttctggttcgaagggcagtgaattctcagaatgttgtcggccatgggtttgacattcctcttttcctagattaaaactctgtgctctgttaccttctaggaaggcgtgtgtgtgtgtatggatgtctgtgtagagtttggggtacacttatggccagctactaggcctgggctcagtaagtgctggcgcgcc

SEQ ID NO: 194263 - DNA, 579 bp, Homo sapiens
gtcagtctcaagctcaaggcatgatgggaaactctgagggagaaatgtgggccccatgggaccctaccctttgccctccgcaatccagttccccctccacccccagcccagtccagcaagcccagctacgcctacgctcctctccccaggagctggagcgccaggccttagccaaacacgtcagggcagaggccctgagctccacccttcggctggcccaagacgaggccctgcgggccaagaacctactgctgacagacaagatgaagccagagtgaggaaggaggctgagggcatgggaggagggtgagatcttggggaaagggcctgatctccccttccactccaacaccccagcacctagccatgccgccatcaactccccgctgcctcatgacagggagaagatggccactctggaccatctacacttgaagatgtgctccctccacgatcatctcagcaacctgccacttgaggggtccacgggaacaatggggggaggcagcagtgcaggaacccccccaaaacaggggggctcagcccctgaacaataaatggcctctcatgctagcatga

SEQ ID NO: 194264 - DNA, 1857 bp, Homo sapiens
gtaggtaggaagtctcagaggaaggagcccctccctgggagccagacccccacaccatggcgagcgtggtggtgaagacgatctggcagtccaaagagatccatgaggccggggacacccccacgggggtggagagctgctcccagctagtcccagaggctccccggagggtgaccagccgggccaaggggatcccgaagaaaaagaaggccgtgtcgttccacggggtggagccccagatgtcccatcagcccatgcactggtgcctgaacctcaaacggtcctcggcctgcaccaacgtgtcactgctcaacctggccgccatggagcccactgactccacggggacagactccacagtggaagacctcagcggccaactcacactggctgggccccctgcctcccctaccctaccctgggatccggatgacgcagacatcacggaaatcctgagtggggtcaacagtggattggtccgcgccaaagactccatcaccagcttgaaggaaaagaccaaccgggttaaccagcacgtgcagtctctgcagagcgagtgttctgtgctgagcgagaatctggagagaaggcggcaagaggcagaagagttggaggggtactgcattcaactcaaggagaactgctggaaggtgacccggtctgtggaagatgctgaaatcaaaaccaacgtcttgaagcagaattctgccctgctggaggagaagctgcgctacctccagcagcagctgcaggatgagacgccgcgacggcaggaggccgagctgcaggagccggaggagaagcaggagccggaggagaagcaggagccggaggagaagcagaagccggaggctggcctctcctggaacagcctgggccccgccgccacgtcccagggctgccccggcccgccagggagtcccgacaaaccctcgcggccacacggcctggtccccgcaggctggggaatggggcctcgggctggcgagggcccctacgtgagcgagcaggaattgcagaagctgttcaccggcatcgaagagctgaggagagaggtgtcctcactgaccgcccggtggcatcaggaggagggggcggtgcaggaagccctgcggctgctcgggggcctgggcggcagggtcgacggcttcctaggccagtgggagcgggcacagcgcgaacaggcacagacggcgcgggacttgcaggagctgcgaggtcgggcggatgagctgtgcaccatggtggagcggtcagcagtgtctgtggcttcactgaggagcgaactggaggggctgggcccactgaaacccattctggaggagttcgggcggcaatttcagaactctcgaagagggcctgacctctccatgaacctggatcggtcccaccaaggcaactgtgcccgctgtgccagccaggggtcgcagttgtctacggagtccctgcagcagctgctggaccgagcactgacctcactagtggacgaggtgaagcagaggggcctgactcctgcctgtcccagctgtcagaggctacacaagaagattctggagctggagcgccaggccttagccaaacacgtcagggcagaggccctgagctccacccttcggctggcccaagacgaggccctgcgggccaagaacctactgctgacagacaagatgaagccagaggagaagatggccactctggaccatctacacttgaagatgtgctccctccacgatcatctcagcaacctgccacttgaggggtccacgggaacaatggggggaggcagcagtgcaggaacccccccaaaacaggggggctcagcccctgaacaataaatggcctctcatgctagcatga

SEQ ID NO: 194265 - DNA, 1983 bp, Homo sapiens
gtaggtaggaagtctcagaggaaggagcccctccctgggagccagacccccacaccatggcgagcgtggtggtgaagacgatctggcagtccaaagagatccatgaggccggggacacccccacgggggtggagagctgctcccagctagtcccagaggctccccggagggtgaccagccgggccaaggggatcccgaagaaaaagaaggccgtgtcgttccacggggtggagccccagatgtcccatcagcccatgcactggtgcctgaacctcaaacggtcctcggcctgcaccaacgtgtcactgctcaacctggccgccatggagcccactgactccacggggacagactccacagtggaagacctcagcggccaactcacactggctgggccccctgcctcccctaccctaccctgggatccggatgacgcagacatcacggaaatcctgagtggggtcaacagtggattggtccgcgccaaagactccatcaccagcttgaaggaaaagaccaaccgggttaaccagcacgtgcagtctctgcagagcgagtgttctgtgctgagcgagaatctggagagaaggcggcaagaggcagaagagttggaggggtactgcattcaactcaaggagaactgctggaaggtgacccggtctgtggaagatgctgaaatcaaaaccaacgtcttgaagcagaattctgccctgctggaggagaagctgcgctacctccagcagcagctgcaggatgagacgccgcgacggcaggaggccgagctgcaggagccggaggagaagcaggagccggaggagaagcaggagccggaggagaagcagaagccggaggctggcctctcctggaacagcctgggccccgccgccacgtcccagggctgccccggcccgccagggagtcccgacaaaccctcgcggccacacggcctggtccccgcaggctggggaatggggcctcgggctggcgagggcccctacgtgagcgagcaggaattgcagaagctgttcaccggcatcgaagagctgaggagagaggtgtcctcactgaccgcccggtggcatcaggaggagggggcggtgcaggaagccctgcggctgctcgggggcctgggcggcagggtcgacggcttcctaggccagtgggagcgggcacagcgcgaacaggcacagacggcgcgggacttgcaggagctgcgaggtcgggcggatgagctgtgcaccatggtggagcggtcagcagtgtctgtggcttcactgaggagcgaactggaggggctgggcccactgaaacccattctggaggagttcgggcggcaatttcagaactctcgaagagggcctgacctctccatgaacctggatcggtcccaccaaggcaactgtgcccgctgtgccagccaggggtcgcagttgtctacggagtccctgcagcagctgctggaccgagcactgacctcactagtggacgaggtgaagcagaggggcctgactcctgcctgtcccagctgtcagaggctacacaagaagattctggagctggagcgccaggccttagccaaacacgtcagggcagaggccctgagctccacccttcggctggcccaagacgaggccctgcgggccaagaacctactgctgacagacaagatgaagccagagtgaggaaggaggctgagggcatgggaggagggtgagatcttggggaaagggcctgatctccccttccactccaacaccccagcacctagccatgccgccatcaactccccgctgcctcatgacagggagaagatggccactctggaccatctacacttgaagatgtgctccctccacgatcatctcagcaacctgccacttgaggggtccacgggaacaatggggggaggcagcagtgcaggaacccccccaaaacaggggggctcagcccctgaacaataaatggcctctcatgctagcatga

SEQ ID NO: 194266 - DNA, 376 bp, Homo sapiens
cagaaaccccccaaaaaaaaacgaaataaatgctgtcttccccatcggcaaaatggcatttctgtagtcctacctctccagctaactatggactagggtaaacaatcaactatgcagtctaggaacaaatttgcttaaggaaccattgtagcccagccaaaaaaaaaaaaaaaccaaatcccccaaaaaggaaggattcaagccagggcttgtttaacatatgagactattcaggacaaatggagaagggtacaatggcaagctatctcttgttcacacccctgaaagaacaagagttaggaaaattatctaagacaggggagaatgggaaaagctgtggaacaagtaaaatattaaaaacctttataaaaacccc

SEQ ID NO: 194267 - DNA, 722 bp, Homo sapiens
tacccccactcccatatatgcaacatgcacacagctacatgaatactcaatactcagggatatgcttcagcacaaacatccatacatgaatggaccacataactgctctcaaggaagataattataaccaacatattgaatgctgtgggccagtcactctgctaagcctttactagtattttacaatgattccaggacactagtaacatcaatatctatgcattaccattgatggaagtgagtcctagagagatgatgctattgtgttcaaatcacaattagtgaatagcaaacaaataatcctcacaaaaatctatatgacttagaaaaccaagtgcataactctgtgctgcattgccacttcacatacatgggtgccacacttacccatcctcccatattattaccaggcttagggatacacagcctcagacatacagatatatatatatatttgtttatatagctatacattatgacatttgtcataatgtccacacactgacaaatatacattcaaccattaatttgtttacttattcaacatatctttaatactcctctgctatgtgtcagattctggctatatagagacagaaatggctgagaatggtggctggcacctttaatctcagcactttgggaggccgaggtgggaagatcacttgagactaggagttcaaggccagcctggacaacataatgaaaccctgtctctctca

SEQ ID NO: 194268 - DNA, 391 bp, Homo sapiens
tatactcagtaacatgttaaataagtgagaactcagaattgtggaatttttcctttactaaagagttcctttcatacaacagtctctcaaggtgacaatgtgctaggttacaatgtgtaggtaacaacgttggagggttttttatgttgaaatgtctgagtggcactgaatgtcaactccattaaaaaaaattaacacagacacacccggttatttaacaggaagtgccttgcagtaacacaattcagaagccacctggctcaatttatgggctgtgaagtctttaaaacatagtttcacgcttccataggctagaattgctgagcagcttaataagaaggattttgaacatgctgttatcttagaaaaggcaagtaaagcctctcgaaat

SEQ ID NO: 194269 - DNA, 460 bp, Homo sapiens
cattctgaagaattgccaggacagctctgggttaaacagtctcatattgtgaatcagtgttcctaaatagctagccaaggatcagcctgccagcactgaatgtacggccagccctctagggcagtgctgtgtctgtgggttccaagtcagtattcactgaattaaggtaccatttagctctccctgttgactctttctagttctaaactgtgttcaacaacatcatttaaataatgacggcatttttaatagaagctgttgaaactgaggtgaaaggaaaggtgccacttaggattttaagtactctaaattttgccacattctcctaaaattataataggattgacttaaatccattagtctgtccttcactggcccttaactaacatttcagggttgaggaagtattaattaccctgttggtaggccttgtttcattataaggtttctgtgagcttgt

SEQ ID NO: 194270 - DNA, 640 bp, Homo sapiens
ctaaaattattttaggtgtcaccaatgccttcaacaatgcaaaacctgacagaccctttttcctgacctctcatttcctgacatatagcatttggtgtgttaaccatcctttccttgggaacacatttttctcttagcttctgtgataccttttttgttttttagatttgacagacatgtgctctttttcccctgaccatttctaaaattttgatggtttccatttggttattactctttacttctcatattctccttgagtgatgtccactatccatggcttcaactactacctatatgcaagcaactgttaaaacaacctgttttgctttttggtggtgatggcggtatatctctgtaaatttacaaaaatatcattgaattgtaggttttaaatattttcagcctaggcctttgcctacaaccgagataacatttgtccattacccatgtccattcagattttgcttgaatacttcaaacagcatgctgaataatctcatttttcaacccaacactgctgctttattccccaaggttccatattagaccactttcaccactctatggagagtactctgcatgagcttatcactccaattactatgtgaaggcttacaaatccaaaattttattccca

SEQ ID NO: 194271 - DNA, 257 bp, Homo sapiens
agtacacttaaaaaaacaacacacacatgttgaaagacaacctgaagatatgagaaaatgaagaagagagggacacaggtaagcagcaagcctcgtaatacacttagttaggtatttcttaaccttggcataatggatcagataattacttattagggaagagaaggggtgggctgtctattgtggggtgtttagcagcatctctgccttctattcactagatttcagtagcatctcccctttccagttgtgaaaat

SEQ ID NO: 194272 - DNA, 322 bp, Homo sapiens
aaagttgttaagatgattgtcatatgctgtggggattgagaatcaccactcccacagttgccaatgcctcccatagttgggatgctgttttgaggtttgcagccacatttaagctgcatctggggaaacatctgctatttggtctttgctattttcatggtagatatggacagtggttcgcatgtaaacttgaaaagtatgtgaagttgtggaatggggtgtctaacataatccacattcttgggttgggtaaaaacagtttgttttatgggaaaatacaaatggccttagttcaaataaacatgcttattacagtaaagtc

SEQ ID NO: 194273 - DNA, 478 bp, Homo sapiens
gtaatctcaataggcaacatgtgatgtggcttccaaaaccagatttcagttgtgttttcagaaatgagacacttaggatatgggagactatatagtccttctctgattctatttgtggtttgataagtacattctcagggttgcaatctgatgacctcaatgataagtgctgttttttttccaagagtcatgctctaagaggaacactgacccatggagctggtccagggacggaggggcaaggatgggaaggaaccctgtgtggggtgaggggcaggaaacgggctcactgtcaacaattctagggctgactcctttgcgaaggatcggtcacaatggcaccagagggtaagatgtgggccagcggagagaagaaagaacaagataatctgaccctacacagaactaggctgtagcctcctgaacgccccctcaaagcacaggtggctttaccaggtgctgcctcatagagcactaa

SEQ ID NO: 194274 - DNA, 422 bp, Homo sapiens
cattgaatttttacagcagccctatctgagtagctgctgttattatcatctgttctttactggaggaggaatctaaagctctgactcagctagactgctgactttccagtggaccttagtcaagggacttttaggcaagtcttctctgggtccaatatctaggactacagaagtaattccttccctgcctagagcattggattataaaagtgaaaacaatttacaagctgttatccatttgtttaaatggtgtctattgagaacttaaagcaaggaagaggccctggcactacagagaaaaataaagcgtaatcctgcccatggaaaaatgcaagataaatgttaggtaaacaaggctttccatttccagtaattatggactagaagactgctccccaacttcactgggaattttttttttg

SEQ ID NO: 194275 - DNA, 530 bp, Homo sapiens
atttacattttatgctggataattctgttgtgagggactgtcatgtgcattgtgagatattgagcagcatccttgtcctcgtacagttatcaggtaaaatacagagtgtgtcagttcaatttgaatttcaaataagcaacaaataattgtcattgtctgtgtatccaattatcaatgctgcaggtctgtaattggtcctccatagcacacttacattatgatgtaaactcatattatggttatcacaagtaatacttatttataaatttattcttgttgttttttcttttgtctgaaatgtaaatttaactaggcctcctatatttttatttgcttaatctgttaacattacaatagatgccagcagcatccgtccaattttaactgaaatgtctccaggcattattaaatgtcccctaggggggcaaaattgccctgtgtggagaaccactgtcctaaagggatttcatcctttgcacatggaaatctcgtggtctattctctggatattttaattttattcacacatt

SEQ ID NO: 194276 - DNA, 214 bp, Homo sapiens
gtgctctgtgttttggccaagctggtttacccactctctccccaaaaagaccccccttctaaatcagcctcccttacaagaggtggtccggcctgatgattaggatcccaactgtggtgccagaatgcacataattggaattcaaatccagcagcatcactttacacactgtgtgaactcaaacaacttacctaactcctctgtgccccagctt

SEQ ID NO: 194277 - DNA, 228 bp, Homo sapiens
ggttctaccattaaataactccagttcctccccatggaatgggattcagtggcccccggggagggcttgtgcaggctgtttccccagggagatgagtgagttgaactgttgggttattaactgaagttacttcacattttcattaaaccttggctcagcatctacctgataattttagtgttggtgcatcagtaatacctttcctggttcattgtatagaactgtcat

SEQ ID NO: 194278 - DNA, 255 bp, Homo sapiens
aaaggtggagaacttttaaacaaaattatcggatgccattgtattggactgagcttgtgcactagaccagacaaaacaaaaatgtcatcactcatgccaaatgcaacataatcaagttgaaactacgaggcagcatacagatcccaaagcaaaccattttttttcttcctgagaacaggggattccagcataataaagaagtaccttttgctctaattcttaccaaaaaaactaacctaaagtccttgtagccct

SEQ ID NO: 194279 - DNA, 231 bp, Homo sapiens
gagctacaggcatggttttgtgccctttcagagtcaatgggctatatgcataacatggaacaaaaatgccatgttagatatcgtactgattttcatcttttagtttatatgttggtttctttgtgaaaataaatttaatatcaattcaacagacattttgccattgatatattcaataaaagttttgcaacctggcatgattctttatatgttattaccaattcaacattc

SEQ ID NO: 194280 - DNA, 462 bp, Homo sapiens
taggtactaaaaaataattgtgtttgatagttggcagtcacccaaaaatatccaaaaagccatgaaacagtaaaggtaaacaagtaggaagtgaaaataatattcgtcctttgttttctttctggagtgctcaaaacaccctctcaaaccatttttctcagcatagaaccaagtgtggtcaggttaacagctaatatttacaagggaagaaacgaaccctgagatatttagtcacttgttccggtgatcacagaaaatcggcgaagaaacacatgaaactgccaacgatctctctattgataacaaggataccgtgatttttatgtaatattaatctgagaagccaggattattttgtaggtattagctttacgaagatgcccttacatacaaagaaaaggataattttaaaactttcccagaaaaatggatggcttatttttgttctttaccaaaaaaaaa

SEQ ID NO: 194281 - DNA, 406 bp, Homo sapiens
actacgtcgcatatgttaagaggaactaagtatagaagataagacttctagagtttccttaaatctctaatatgtttcacactgaattttatctaaatagttactacatgccctttaagagaaactgataaatgattcacactaaggggaaaaaaatcaggaaatattcagactttagtttctggcagagtagaaatgatacattttcacattgctttaatctctaatcaacatttaattagaaaatgaaacaaatgttctgaaacaaagaaaaatcaatgaaaagacacaaagagcattaatatgtggaatgtaatcaaaattgtagctaattgttatgctgaaaaaattagctacatgtggactgaataaaataaactctatgaaattgccgacatttgtagtt

SEQ ID NO: 194282 - DNA, 215 bp, Homo sapiens
acttaattatcatacccaacaaaattaataattccttatttattatttaatatctagtcctacatttctagggaactttataaccttttttttctctttttcttcttgagacagggtcttgctgtcactcaggtggtggcacaatcacactcactgcagcctcgacctccagggctcaagcgatcttcccttctcagcatcccaagtagctggaa

SEQ ID NO: 194283 - DNA, 430 bp, Homo sapiens
aagatatttaaatggctaataaatatctataacatataagtatatacatctgtttattcattttcttcaataatcaaacagattacaatgaagtatatttcatctatcagatcactgacaaatattaaaggcttaatactaaagtggtagacactgctggctgcagtgtgaattgatacaaccaatctgatatgtatcacagttgtgaatgtgcatagcttctaaccaagctttccatgtctagaaattaatcataaggaaacaactgaatgagctgaagaaaacatatgaagatattcactaaaagcctaaaagtaaatctaaatgttcaatgggagattcatgaatgggaagcccttcaatggaatattaggcagtcgacatataagaatatatgttggaggccgggtgcggtggctcacgcctgtca

SEQ ID NO: 194284 - DNA, 632 bp, Homo sapiens
aagatacactatttctctgtgtctcttgatattttctgctacaatagggagagctgtgtggatcgcttaatggccagtgtggttgccatatcagtttccttggactgctgtaacaaattacaacaaactgggtggattaatacaacagaaatgtattttctcacagtcctggagtctagaagcctacatcaaggtgccagcagggccatgttccttctaagaactctaagggagaatctttcctcgccccatccaggtgtggtagctcccagtggtccttggtgttcattggcttgtagcttcatcactccaatctctgactcttttgtcacgtgtgtgtctagtatgtcttggcccgtttcaacccaggccagaagtgtttctgctgttcaaaaacctcgtcagttgtccatgtaattcacaggggtctaagccatcagacaagcaggtcctttacaaaactttcctggataaccctatttctgtttctggcttctgttgagatggttgattggatccattacacacaggcctattctcttcaataaaaagtagttcagccgcacgctgcgaggttgagaattcaatttgtattgtaatttaggcactcataggatgagtctctggctttg

SEQ ID NO: 194285 - DNA, 801 bp, Homo sapiens
tgcgtgttctgaggatccctctctccacactggagtttgacagaaactaaagagaaagagttgagaagatacatgcagagtaaataagttggggcctcatcatatccggaaagtttgacaggaggttcatctggaaataatatgtggggaatattttgcatgtaaggacccagaaataagtacattagaataattcaaataaaaaataatgaaagcccaaattgaggtactgaaattaataagggaaaagaggatttttgtaagatatatttcactagtcatccagaaaggatttagcaatggatagaatttgagacaatggggagttgtgagttaaggctactttgagattttaagcccagagggcaataaaaatgatggtcctgttcacagaaatagtagtggcaatgagagagggaagaggattcgctcaattttgaaaacattgagtttgaggagccaatgagagagtgtgtggatggcatacccatcaaggagggagatccattactggagcttgacaaaaacaagagaaagagttgagaagatacatgcagaagacatgtaggcatgaatgagggaaagaatgagagtagaaaagacttggaggatggaactgtgcgctgaaatgcagagggaggcaaagcaactggctggggctgaaaaagtaagacactcgaaacaaaccttcatcaaaaccaagcaaacaattttagaaagcaagggatggtcctaaagccagtcgccagctagagcagatgaggccactgattttagaagtcaggaagtcattggtgagag

SEQ ID NO: 194286 - DNA, 500 bp, Homo sapiens
ctcctcctcccgggttcaagcgattctactgcctcagcctcccgagtagctgggactacaggcatgcaccaccacatccagcgaatttttgtatttttagcagagacgggatttcaccatgttgaccaagatggtctcgatctcttgacttcatgatccacctgccttggcctcccaaagtgctgggattacagccatgagcaaccacacctggccctggctctggcccactttttaccagtatttatttctgctaatcaatgtgacacatccctatggtgaaaacttgggagaggaaattgtggaaaacacacacacgagaaatcactcatagtcccaccttccacaggcaaacactgctactgttagcatctttcttcttcttctgtgaactctgtcctttacacagtggagactgacctctatgtttgatttcctaacatttccatgtgtcctcagtacacctggataaacatcacgtgcagaagccagataacatt

SEQ ID NO: 194287 - DNA, 339 bp, Homo sapiens
atcagtagctactatttgtgtagcactttacagttttaaaatactttccatgatttatatcatgtgagatgatgatcctattttacaccaggcaattaataatatttttcaacaatataattggcatctcaaatacatagttgttttcctgaaatatcaataaataaaaccaattttatgaggcatttatataaagtagcccccaaatgtttcataataattgatttttacatatgaagcctattatctctgtcattatattttcttcaagtgatttgttgctaatttatgtttggaatgatggggaggtctatagacagcattgaagtgggcatttta

SEQ ID NO: 194288 - DNA, 167 bp, Homo sapiens
atagcatgaggaattacaactactggatctgatattcaagtatacacacacagccagggacccatagtgcccatttcccacagaagaagaaaaaagaaggcgtgtaactgttcattccaaagctatcatctacttttagctcacatttccattgggaaattcagttt

SEQ ID NO: 194289 - DNA, 277 bp, Homo sapiens
tcttccttttctcttaggtctggtgttctctgaactaattcactccaaagtgttgctgtcaaggaagactcaaattataaggaaccactaggaccatctttattagagactggcctttactttcttaggtcttaaatagggtgtggatgggagaggttttccagttcctgtttcacaggcattaggaccaatctttgtgggcagccacccactcatgagtgtatgtctctctgtctctctctctctttctctctctctctcagtatggtgtgtgtgt

SEQ ID NO: 194290 - DNA, 311 bp, Homo sapiens
cttcttttagatgaagaagcaggtctgctcctcttggaatcagacactggaatgtaaattatttttggccgggagcagtggctcacgcctataatcccagcactttgggaggtcaaggtgggcagatcacttgaggtctggagttcgagaccagcctggccaacatggtgaaacctcatcgccactaaaaatacaaaaatcagccaggcatggtggtgtgcgcctataatcccagctactcggggggctgaagcaggagaattgccgttgcactccagcctaggcaacagagtgagactctgtctcctcaa

SEQ ID NO: 194291 - DNA, 353 bp, Homo sapiens
tttgggaggccaaagcaggagaatttcttgaggccaggagttcaggaccagcctgggcaacatagggagacttcatttccaacaacgatgacaacaaattatattagctgggcgtggtggcgtgtgtccatagtcccagctgcttgggaggctgaggtagaaagattgcttgagcccaggaagtcaggctgttagtgagctgtgattgtgttactgcactgtagcctaggtgacagaacaagacgctgtctcaaaaaaaaataatatggaaatgcttgccattctctgtacacgccatgatcttttatgcttctgtgttgtgtacatgccattctcctggccttgaatacctt

SEQ ID NO: 194292 - DNA, 441 bp, Homo sapiens
tatagcagcgtaaggactgactaatacactctgtaatagaaaagatgtttatttgggagtatagtagtgcgctgagaatagatgtgccatattaaactgtgttcatattcagggaggtaaaggggaaaaaaggattttaaaggaaataatgaagaggattccataattcttttcaaatgattatccttggctaaaaagatcaataacatggtgacaccagtctgagtttggacagccagtttttgggcagatgtcctcgtggaagtatttttctttgcaagggtgagatttttgcagtctcttacgatagtttttgttatcaggcatataagcataaaaaccattaatatacactagagatgcattgaagagcttataaaattgttaaggttttcttctttggtcagtgtctaaaatatgagtcagatatttccttggtta

SEQ ID NO: 194293 - DNA, 465 bp, Homo sapiens
cgggttgtccttttactttaatagtgtcctttgaagcaaaaagtttccagttttgaaacagtctgatttatctatttttcttcggttgtgtttctgctgtcatatctaataaccattgcctaacccaaggtcatgagatttacacttgtgttttcttctaagagttttacagttttagctcttacatttaggtatctgatccgtttggagttaatttttgtatatggtgtgaggtaaaggttcaacttcattctttgcagatgggtatctattaatagttgttcctgcactatttgttgaaaacactattctttcccccattgaatggtcctgcacccttgttgaaaatcaattgacaatagatgtatgggacctgggagctttttaaaaatacctgaatttcaccacaggcaaaatgagacagattccctcaaggtgggccctgggcaatgacatttgacaaag

SEQ ID NO: 194294 - DNA, 229 bp, Homo sapiens
tggggagcttgaggtgttgggctgctgttctttaaatctcttgtgtttgagatcaggattgattacagaggcaaaatcagggtggagactgctgtagggtcacatggaccctgctctgaggagcaatgggaaacagaggctggaaactaggaagagcctcacagattggagaagcagagcttagtcatagcagggcagcaaaagaagacagagagaaaacaaaacaaag

SEQ ID NO: 194295 - DNA, 441 bp, Homo sapiens
gactgagtctcactctgtctcccaggttggacttcagtggcacaatctcagctcactgcaaacttcacctcctgggttcaagcgattctcctgcctcagcttcccgagtaactgggattacaggcgcctgccaccacgcctggctaatttttgtatttttagtagagacgaggttttaccgtgttggccaggctggtctggaactcctgacctcaggtgatccgcccaccttggcctcccaaagagctgggattgcaggcgtgagccaccgtgtctggccatacacatccctgctgaagcccgcattacccttcccctatgctatagaagccctgggtcgggggggtgggggtaatggcacagggatccaccatcttatcttggtgccatccctgacttgccttctgttcataaacgcctattaaatgtttctttctgaga

SEQ ID NO: 194296 - DNA, 319 bp, Homo sapiens
ctcccctcccccacagctcagtatttataaggacatttaagaaaaaatacacactacacacaatggataaattaacagaagagttaaaacaaaagttcagaataactagaaatgttaaagacaaaaatatgtaaaggcttttaaaatacattaggatcaaaaagatgaggaaagaagaacaagaatcactagagtccatgattccagcaccaataggtcattaaaagcagaactattcaactcaatttttatttctaattgttctagttgaaaataaaatgaggccaaggcatggtggctcacgcctgtaatcctagca

SEQ ID NO: 194297 - DNA, 293 bp, Homo sapiens
tccttgccctccaggctgagtgccagtgtgggagcgtgctcatgagagccctgcacaagcgggttttgagcacatgctacgctctagccccgtggaagcctggactagttagaggcagagaacagctcaggacagacacctccctgcagagccaaacagagtgcagcgcctgcctcgctgggccatcctgagagctggggccttcccaggaaagagggagctcggggggcaccaccccatcctcagctcaagcccctggaagagcgggagaaactagcagcgtggaagatgtt

SEQ ID NO: 194298 - DNA, 654 bp, Homo sapiens
aacttttcatgttaaccacctataagtaacatttccttttttcttccccactggaaactcaacctatccctgcactttcccctttttttgagaatacacttcagagtcacagtaacaacactactttaaaaacaaagcaaacatacatattttagaataaagaaggcaaaacaactatttgcaaacacccaagttgaagatacttctttactgcagcttaaggttttactcaaatactatacatttaaaaatgatttatgataaaatgttattacccttaaatgtgagctctagagtagtgagtttgatcatgacttctgagggggaaatagggatgtatgatgtacctataaaactagctatgaagcaagccaagcttctagcaaagaaataaatcagcatattcctggtgcggaggggctcacatctgtaatctcagcactttgggaggccgaggcaggtggatcacgaggtaaggagttcgataccagcctggccaacatggtgaaaccccgtctctactaaaaatacaaaaattagtaacgcatggtggtgcacgcctgtaatcccagctactgagcaggctaaggcaggagaatcacttgaaccccgtagacggaggttgcagtgagccgagatcgtgccactgcaccc

SEQ ID NO: 194299 - DNA, 375 bp, Homo sapiens
tcggcggtaccgatgtatcccaacacagccaacacattgacagtgagataatggtacaatcctaacggaagggaatccagcaatacccatcaacatttaaaatgcgcagaaccttggatcctacaattccatttctagcaatgcatcctatgcacatattcacgcaaatatgcaagaattacatacaactcagcattgattaatccaaacagttgggaacaacctaaatacttagcaatggggaactggtggagaacagtgtttatcttatgccaacatctgtgtttttaaaaagaagacacataggccgaccctatgaggacaggcagagttgactttctcagagctgctgtggcaagggagtcggtgtcgtca

SEQ ID NO: 194300 - DNA, 875 bp, Homo sapiens
aagttaagaactatgtagtacagttaggcagttacaatttttacatcatctgacatccaccgaaatggaacttctgaccagccacagttcagcagccaggctaagctggctgcataactgaactcatatttataaaaagaggggaactgagatgtagcaaaaattgtttgttgttattccttgcttaataacaataatcattaggagagctaaggagataaactacactcacaataactggaatattcaatgataattatccccattttgaggctaaatagtgattcaccaaggccaaataggtaacaaataatagggtcaaaacttacttgaatcccacacgcttttctgtatatcaccctgcttcttttttacctttatggaaatttacttggaacttactatgcaaaaatatatgtggccaggcgcagtggctcatgcctgtaatcctagcactttgggaggccgaggcaggcaggttacctgagctcaggagttcgagaccagcctgggcaacacagtgaaaccctgtctctactaaaatacaaaaaattagccgggcgtggtggcgtgcacctgtagtcccagctacttgggagtctgaggcaggataattgcttgaacccgggaggcagaggttgcagcgagctgagatcatgccactgcactccagcccaggtgacagagtgagactccatctcaaaaacaaacaaacaaacaaaaaacctcatgaagagccagtttttttcaaattacaggaacttttaagtcagatcatatgtaaaatgcctgaaaaaatattaaaatgatatcagatctaataaactcagaagtgaactaaaacaataaaatgtagtggggttattcatcaagtg

SEQ ID NO: 194301 - DNA, 112 bp, Homo sapiens
agatatagttaattacactgccatgcctactattttataagaaataggatcatctcattgaagagtaagataatcaaaggaggaggagtagcactgaacaactgattcattg

SEQ ID NO: 194302 - DNA, 230 bp, Homo sapiens
ccaagcccctacaacaaaacacagcacaaaagagatcttctagtattagctacacaaataataaataccacgaagaataggaaagaaaggcttcctcaaatacaaagctctttatcactgggaagatcactcatcaagagtaagagtttgacattataaatccattccagaaacacatgggccaggcatggtgtctcatgtctgtaatcccagcactttgggaggccaag

SEQ ID NO: 194303 - DNA, 366 bp, Homo sapiens
taaaattggatcgcccaactccaaaatctgggcacttaatcactatgccacattaagtctttgtactccttttttggcaactcccaaaatctgctttctattagttacttgagggcacgtgcgtgcgcacacacacacacacacacacacctcttaactactgtagaattgaaacagtcatattcatttaatttggcccagggttttgtacatatctggtatttaataagtaggtgttgaactaaatttgagtctttaaaaaaattcctagaaaaaaataactcagtcaatttcattttcagcttttttttttttttttttttttttttgggaaaggattttgtggctgtgtccccagggtggggg

SEQ ID NO: 194304 - DNA, 315 bp, Homo sapiens
tttcattagtcagggagagatgcacactactcagctgtgattccttaccccctcatattggaagcagaatatattttactacacttgtgttgtttccagtgaaaatagacaacatgctggcatatgattatgtcagtttctccctgtggaagcccaaatgaggagagaatgcgataatgagctcctactgaatttacctgaatcctctgcaaatacccaagttttggaccccagcaattaaatgggctgtatgtcctctaaaccaaaggagcacagtccattccccatgatggtgggtgatggtgatgatggtgg

SEQ ID NO: 194305 - DNA, 331 bp, Homo sapiens
gatgggggcgccgcagggaagctgggggttctgcacctggacggcagcactggtcagggcaccacccaatgagtttgtcaaaacgtatagaactgtaccctgcaaccagcgaactacgccctaggtgaactgaaagaggaagatatacgaataaatgtgaggccaggtgcggtggctcacccctgtaatcccggcactttgggaagccaaggcaggcggatcacctgaggttaggagttcgagaccagcctagccaacatgaagaaacctggtatctactaaaaatacaaaattagccggacgtggtggctcatgccagtaatcccagcta

SEQ ID NO: 194306 - DNA, 260 bp, Homo sapiens
tgaagctctgtctcaaaaaaaaagactttttattcatacctaagttgtaagagattcacagtttaccctacattaactcaatgagaatgatgtactttcttggcacaaataaatttgaaaatacatcggctttatcctgctttctgattttgttatatgtggaggatacatttatgagaagttgagagccagcttttctaactgtgtttccaattgcattccaacttcataataggaaataattttattgttatattttg

SEQ ID NO: 194307 - DNA, 280 bp, Homo sapiens
gaatagacatattacaggagaaggaatatgttgtagataagcccaatggggaaattagtctgaaggcatggacttacagctctacaactaccacgtggaaatggctcagaagcagttggaaacctgactctgaagcttctgaagtcattagcatattggtagcactaaagaccacagacattcatgagctgggaagagtatgtaacataaaaagatatgggctaaggagaggaccccgggggacatggacacttttccatggtgcggagagcgagaagag

SEQ ID NO: 194308 - DNA, 568 bp, Homo sapiens
gcgatattttcagggtcttttcccctcaaatattttctgtccatagttggttgaatccatggatgtggaacctggacagagggctgactgcaagttatatctaagaagttatacacataacttattagttatacatccattgtaacttttcttattaaatataaacaggaagcgaaagactgtcaaagtgggtattatttaaatatacaagttaccactagcttcatcagcaaaaacttctccttgcgctccaccagtgacacacatatgctctcagcatgcatcttaagctcctacccctgaataatatgttctgtagtgttaacttgagtttctgtaattatgtcactataatacagcacattgcatatacatgaaatatcatacctttataactatgtccactttattactggatctaaatatcttttacacagaatacacacaatttttctagaactttcattttcctgcccagaagatatcaaacaaatatagcttaagtgaacccttgtttgaaaataaaccctcaactattttgaggggaaaagatcctggggtcctctag

SEQ ID NO: 194309 - DNA, 311 bp, Homo sapiens
  misc_feature (41)..(41): n is a, c, g, or t
aaatagtctgtatatctatcaattctggcttcatcccaaanatgtgggacaagggaaaagacaattttactttatcttcagcatccagttttcccctaacgtaacctttatagggttaagaaagttatcgacatagttacctaggttgctttaagttattttttttcatcaggaatagatattagattttgtcaaaaggtttttctttgtctattgagataattatatggagttttcttagactgttatgttagtttcttactatagtgaattactctaattacatttcttttttttttttttttttttga

SEQ ID NO: 194310 - DNA, 291 bp, Homo sapiens
gtttgatggagaagattttaggaaactgagtgccgagcaaagtttttaggtgttgcctaacatcagtagatagagtattgcattttgacacactttgcaaattctaattcaaggattggcaattgttttctgtaaaggaccagatggcaaatatttttggctttgcagggtgtatagttgcagcttctcaactctgctagtggagtacgaaagcagccacagacaatcaaatgggcctggctggttccgataacattttctttacaaaaacagtgggtggcatcaccagcc

SEQ ID NO: 194311 - DNA, 246 bp, Homo sapiens
tgactctgaggatcctccagtgcgatatctaggagaagatagaaatttagagggttgggtctggcatttggagctacttttttcctggaagaatatgacaattctagaaaatgtggctgaaaggctgaggagtatttttaaaagctttgcaaaacaagggggacaaaaaacttgagtcaaggttggggccctggtaaaccttcttcatttgggtagggactctaaaagtctatgccctagtggtaa

SEQ ID NO: 194312 - DNA, 343 bp, Homo sapiens
ttcagaaaaataaatttaagaaaactggaatccttgctatttttcccttcttgggcacttgttactatccccttccaaaaacaaatcagttggtgagtggatttgtagaaacctaatcaaagcttagaaggtatgtcagattacgaaacccagctgaaaccttttgagcctctaaaccatgaagcaactaaccatttgtacttgccttagaatagcagtgtcatgccagctctggattacctacctgctactaccaaacagaaaaaaaaaaaaaaaattcttatttaagccactgttcatttggctttctattaaaacagtagatctgtatctgaatacatcg

SEQ ID NO: 194313 - DNA, 315 bp, Homo sapiens
ataggggggagagaatatgagcacgtctctcacctccactgcgcccatcccagtccaggctaccattgtctcctgcccggaccctggccgagctctccgcatctacttctccacttgttcacccctcctgctcccccacctagtctccatatgaggatcaaagagatctcattaaagcctgtaatcccagcactttgggagtccgaggcaggagaatcacttgaattcaggagtttgagactagcctgggcaacatagtgagacccttgtttctatcaaaaaattttaagaattagcctggtgtggtggcatgca

SEQ ID NO: 194314 - DNA, 466 bp, Homo sapiens
gcctatcaggacaacatgcagacagcacagcaaacaggagttgtgaacttattttacattgtactacttagtgctatggcacttacaaggtgctacatccataactatggaaaacagagtagcaaacacaaagaaacagaaactgtagaactagagatctatggaaagagaaagcaagcattgtgatacttagcttacaggaaagaaagcagaaggtacccacagagaggcttagatataatactggcagaacaatttacagactaacattatgaaaaagaaaattttcaagggaggatacaagatctcctcctcaggacacattttctaaaaggacctctgaatgcggagggctagtctttgatacttaaattttactataaacaaggcagacttatttggattatagactcagtcttaaaaattctttttaggaggtgggcgtcatggttcatgcttgtaattc

SEQ ID NO: 194315 - DNA, 341 bp, Homo sapiens
tagttgggattacttacaagcatgtgccaccacacccagctaatttttgtatttcctgtagaaatggggtttcatcatgttggccaggctggtcttgaactcctgaccccaagtgatctgcccgtctcgtcctcacaaaatgctgggattacaggtgtgagccactgcgcctggcctttctggggtatatttggcttaagttagttggaagggctctctttattttttattctgcctcccactgaagagacagagttcgctcttgtcacccaggctggagtgctttggcgtgatcccagttcactgcacctccatctcctggattcaagtgattctcctgc

SEQ ID NO: 194316 - DNA, 553 bp, Homo sapiens
gtccttgtttctgtttgacaaaggcctcctcaaagccctagtttcaccatctccaaaatgaggacacaacaccagcttgacataattgttgagacgattaataaaatcaattcattcattcactgacgagcagctctactagatactggggccagggtgcctatcctcacgaaagtgccttgcatacatatggacaaaaaataataaaatagcagcagcagcatgctttctgaataccttttaatgccaggcaaggtgtcaaacacacattatcttctttaacagtcactcaacaagtgtcccatacaagcattctagattgcaccattttgtaatacacagtacaagaatttctcagggcatctcaaaggtattttgccaactcaatctctcctgagctccttccagtcaagccccaccaccacaagtcaccacaagtcaccacaagtgctcttagaatcaccggtggcctcacttttgcagatccaagagtgaatccctagacctcatctcattcctcctctcagcagcatttgacacaatgatggtgtcc

SEQ ID NO: 194317 - DNA, 507 bp, Homo sapiens
aggcgtgaaccaccacatgtggccgaactaaattggtgtttctaatttagttttcctgaagaataacagctatgcatcaatgtggaattgtgttatttggaatctcaccttattggaattggctggtaattgacagtaaaccagaagtgctcctgagcagctaatatctgcagacaaatggagtgtaaactttgctcataggttagttttcaggcttttattaacggttccttgttattatttaacatatagttgtaattcattgagttgtctgggtttttttgaaatcacagatcaggggaatggataggtactgattaagcattatgctactgaaaagaatggatgattaggggaaacaagcatattgggattacttagtgtatgtagggtatgtaggttcatatagttccagggtaaatcattctgataattgttgaaaatgttcacccagagaaatttttttttttttttggagacagggtctcgctgtgttgcctatgccta

SEQ ID NO: 194318 - DNA, 402 bp, Homo sapiens
aagatctctgagcctcagtctcctaactgtaaattaggaatcataaggcctacctcataggattactgtgaggattaaatgagactgactaatgacacaaagtgactaacgcagtgcccaacacaaagcaagctctcagtcctctaattctcccctccccacacacttttgctactctgggaacacagggaggtcaggaacggcatggtgaacttgtgtttcttgccccagaccacttgttctggggctgcctagctgtgagtggggcatccctccagctgcatgcagcctcgaagtggcctgggctggcacacacccagtctccctccctccatccaggcctcttgaatgccctgacctcacccagcactttgctctgaagatctctgagggcttcaaagg

SEQ ID NO: 194319 - DNA, 518 bp, Homo sapiens
cctcctcctacagtcaaacttttaagacataaataaaagtatatagatataaaaaaagtttaagatataaataaaagctccttgataattttaatttccctgcatcatcctaagaagcatattgtcccccaactcatcagtgaaattaaaatcatcaataatcactgtattattaatccaatggacatttctcagcctcattcaagttgacctctcagcagctccaacactactttcttgaaacattcacttttcttgagaagcaattcaacgagcagtaaaattccacagttttacaaaattccctcaattttttacagttgtctcattcacacctatttggcagcttttttgttcgcaaactcacctcttttgtctttctaaagcattcaatttagttttagtttgcttcctttacttttttagaattgttttcacaaaacttttacttcatataaaatactataaagatagcaacaaaaggccgggcgctgtggctcatgcctgtaatctcagca

SEQ ID NO: 194320 - DNA, 681 bp, Homo sapiens
aggagactgccaaggggtgagaatgatgctgcctgagtcatgtcggcaaagggagtagccgaggtcagcacaagtgccacgcaccaagcacccattgcgtgtcagatgctgtgctgggtccctggtgcaccctcttctcatttgctcccataaccatcctgagggggtggacaaggaaactggctcagagaggctaagtgctgtcttacacagctgagtaagtcacacaggtggggaacaaacccagctgtgctttgcccttgccacccagacgagctgccacttggccttcaatttctgtgactcctgagaactaggctgctgaaatattaccaaaatgcccaggccacgtgaggagtgctgtttcctcaacaccaaatgttctctcgtacttttaagcctttgcgcctgctgttcctcctgcctaaacacctttccctagtttgcctggataacagctattgaactagacacatgctttttaatccaataagcgttaaagtagactgaaatcttgataaaatacagattctgactcagcaggtccagagtggagcccaggaacgtgcattttaacaagctcccaggtgatgctgatgccgttggcctgggaacttcacagtcagcaatcagattataatagaaaatccaggttttgctcagggctcacctcctccagga

SEQ ID NO: 194321 - DNA, 625 bp, Homo sapiens
tcgtcacctaattgagttgactgcggtgaacagctgtcataaccagctttctccgctgttacctctgctggacctcaaagcacagggaagcaattgcttcaggaggcacaaaccatccactgcagagagcacctgaaggataaatgacgcagaactctggcccaccgttgcttcatgccaagtggtgtcaaaattctaattacacacaggaaaggagatccagtgagtccagattttgacaacctcatctcagaaagctagaggtgagagctgtctctttttctggtaatcccacagcacagctaaggccctaggacaaatgttctagtctaatggttggcaaagcatgcaggctgatgcctgctttgtaaataaagttttattggaacacagcgatgctcattcattctatggctgctttcatttacaatggcagagttgaatactttgagagactgtgtaacccccaaggctgaaaatatttattatctggccctttatagaaataagtttgcagaccgttgttctattccacggctgggtccagtctgggccaccctcagctgttcatctagatctgttctgcccaggaccaaagctatttgctatgtgtggccactgagcc

SEQ ID NO: 194322 - DNA, 321 bp, Homo sapiens
cctcaagcctcagtccaacgcgaagaagaaacaaactattagttattatgcttctgtcagcttctatttttcaaactaaggtatttaagtatggacttggaaatactcaaactttctgtttgtactaatctgagttagaactggtgaaaggcttaccttaaatgcttgagtggaaatggaatctaatcccaacccagaagcagctgaaaactggcggtctgcccaggctgtcagacaggctctggacacctgccaacactaaggaccctgcagttctctaagattatgtgttaattttcaattactctgcttttctgtctt

SEQ ID NO: 194323 - DNA, 154 bp, Homo sapiens
tgaatgctgtagtcagacaaagcacatctaccttctagttgcttgccagcaaagatcagtctttattggtcaggaggaattcctttcttatcctggatgttggcctttatattttctgttttatccaaggattcaacctcaagagtgatggcct

SEQ ID NO: 194324 - DNA, 150 bp, Homo sapiens
ttacacagcttccttgcctgaaatgctctctagtccctttctcctccgaacacatatattccaaatccagcttagccttcaagttatttctgagaaagacctatcctgaccttttaatataaactatatccttttgtttgcctacatata

SEQ ID NO: 194325 - DNA, 216 bp, Homo sapiens
ccttacacaatttcccttgatcttttaaaggcaggagtgattaccaaagtgagcacgtgaaagatggagattttctggtgacaatccattcatttctctctattactgctactgattttcactgactctagctaacatctaagaacttctgtctactttcagattatggcccattttcaactgtaattcccacatatcttgctcagtaaaatgttc

SEQ ID NO: 194326 - DNA, 399 bp, Homo sapiens
tgtgtaaaatatgcatcagattctgaagacttagtatgaatgaaataatgtaaaacatctcattaataattcttggctcagtgcagtggctcatgccaaatgatgttgcataacttttcacatgcttatttagatattcttctgtcagaagtctctgttgaagtcttttgcccatacttttattgtattattagcccttttgtcattgatttgtaatctgtatagattctggatataagtcctttgttagatataagaactttgagaggctagtcttgaactcttgagctcaagtgatcctcctgccttggcttcccaaagtgctgggattataggtgtgagccaccaagcccagctagaataagtcttgaaaacaggtagggaaagtcttacaacttt

SEQ ID NO: 194327 - DNA, 406 bp, Homo sapiens
ctgccctcagacttctcagtaaataggaaatttctgaagtcccaatgaattgaagacttaaaaggaatggaaaaggtttgaaatgactgctttgggaaattgaatggaaagagtggtaaaactgttgaagagcagggagaggccggtcacacttagatcatgtccatctggagtgggccctgatggttgtggactgtttatccctgagtgaggaaagatacagagtcatagagaacccagagttggagatgttcaagaaggcatcgtagaaggccaggaagggtagcagatatgctaggaagttctctcggaggtctgaagtaaggaagccggcaatgctgaaagacagctcctggtccaggaggtggaggaggaggagttgaagggttggcagttgatgttcaat

SEQ ID NO: 194328 - DNA, 296 bp, Homo sapiens
aatatgtggagtttgaggggtcattgaggatacccagagaaagacgttcagtaggagttgaagatgggggtgagacactgagaaaaccaagctgagctaaaggaatggaactgggagtcctccatgtgggagtggagcctgtgagtgaaatatcccagagaagtatactggtaaggaagagaaaattggaaagggcatgcaggcagagtgccattcaccaagggagagtggaagcattggctgttaaaggtcagactcgacccaagagagcagtgtcagatgccaatggaaaaggg

SEQ ID NO: 194329 - DNA, 334 bp, Homo sapiens
tctctatgtaggaatacattcctgtcctcattatttactaaaaacattgtttctcagtaaggtggtgtcaagataacctgaataagaatcaactgaggtgatttttttttaaatacaaatactctgaaccccatgtcagatacataatcagaatgtcatgggggtgggtcaaagaaatagtggtatctcagaagtcttaaattaaatttgtgaatgaccataagtggcagaagataagattggagataaaggtagaggttcagttcttgcagggccttaaaagacataataaagagttcaaatcctgttctaaggcagcgaaaccattggtgga

SEQ ID NO: 194330 - DNA, 567 bp, Homo sapiens
actctagagtatccccacctcctaccccacgtcctaccccacgagtctcaaaaaaaaagcatttcactgcatgtaaattttacctcaatataaaattaaaattaatcttcggaaaataaaagtacattagagaggatggctaatcaaaatttttgtagccttcaaggagaataaatttgaagcatatctgttgatttgtggaatttttacaaagacttaattgaggaagacttgaaagcattagaaagggtcccgttcctctgttccctctgtgagcccagcttgcctgaagggaacgtgggtctaatccgtgtctggaggagtgagccgaaccacaggaagaagaggtaagaaagacaaaggagaaccagggccacactcaaatccacgctcttcaaaactgtgttttacaaatttgacaaaatatttatactggaaatttttaagcggtggaacctatagacagccttttctttcagcttattttgttagttttaattttatttaatttttttacaaaatgaccaccgttgatataaacaccaatgccgtggggtaggaggttct

SEQ ID NO: 194331 - DNA, 449 bp, Homo sapiens
ttagacgctgaactatgggtgctgacttatgtcttcatagagctcaggttgaaggggcctgcaggtgtataggtcaaatattagtgacttgtttggttgcattgttagtgacaaacatgctgtgtggggaccagcatcctggaatttacaaaatagaaactggcagatgaccggcaggccttccagcatcctgagctctccctaaaaccctctctggatataaccgggactctcgcacggcatctgtcatcccccagctggaaggctgacaagagcagattcccacatggctaacagttgctccacctcagcttcctggggaaacacaaagcctggagcccactccatgagaagtgagagcaacaattcactgcggggccttccagcctcccagccttcagagaaactccattggagagtagcttgagtagatttgccgtgaatatcaa

SEQ ID NO: 194332 - DNA, 173 bp, Homo sapiens
taatgattcatactttctttttatttttctggcttctttatctgttatacatggctctcttttctctaggactgtgccctgcattctcagctgcctcagcattccctaactcctctattcatttgagggctcctacctcctggactgttcaggaaaaggccctgcagaaaaaa

SEQ ID NO: 194333 - DNA, 167 bp, Homo sapiens
caaccgctgttgagttttaattaattaaaattaaataaatttttaaaaattcagttccacaatttcaccagccacatttcaaatgcttcacagccacacatggcttctgtgttggaaagagcggccatagaacattgccatcactgtagaaagttctgttggactca

SEQ ID NO: 194334 - DNA, 409 bp, Homo sapiens
aacatcagcgcacattgatatataaaattgcaggtgatgaaaggctctgaaagaactctatgagtctctggtcttaacgctctcttagattttgatggtacattgtctttttcatttcaactctgttttaaattttttattatgtaaatttttagacatacccagaattagagagaatagcataataaaacttgatggtaccattaattcagtctcaataattgtcaatattttgtcaattgtgttttagtcagtccccactcttggtttccttgtggcctgatctctatctggcagctattaactccaatttgtttcttaccaccatttctcagctcgtctccacgtatgtagaccttcatccaagtggaattgtgtgaagcctcccctggctgtgggaactacattt

SEQ ID NO: 194335 - DNA, 585 bp, Homo sapiens
cccaccccactagaaaataaatgcagcaactgaggtttctggccttaaaaagcacttagtaattatttgttgaatgaataaactatggtgtacagattctcctcaacttacaatgggggttttgtcccaataaacccatcataatttgaaaatatcataagatgaaaatgcatttaacgcacctaacctactgaacatcaaagcttagctgggcctaccttaacgtgctcagaacacatacattatcctacagctgggcaaaatcatctaacacaaagcctattttataacaaagcatgaataactcatttactgaagactgtactgaaagtgaaaacaacggctgtgggtactcaaagtacagtttccagttttcacacgataataaagttgaaaaaccataatttgaactggccactctagtcaacaaagacaccagaaaaaaccccaccaaagccacctccaaggacagctccataaggccacctccaaggacaccctccatagccacctccaaagccactaccagcccctccaccaaaagcacagatcaagccgcctccatagccccaactggactagagt

SEQ ID NO: 194336 - DNA, 222 bp, Homo sapiens
cttatataatagccaactgcttcaaatcttaaaatcttcataatcctcatccactacttactagctgtgagaacccagacacacacattagttaactttccagtggctcagttttctcatctataaagtaggaatgataataatagcatccatcttgtaggaacattatgagggctatgtgaaataatactgtaaagtacttagtccctggaactctgttag

SEQ ID NO: 194337 - DNA, 311 bp, Homo sapiens
caggtgctaaaccataaatgtaataatcatcaaagaatggccttaggaatgcttcctgacgttgtgtcctttgtcctcagttcattctaatgagattagtgaagagagagtagaatcctgattttaaggttgagcaaagaaaagcaaagagaaggtggggatgctcaccagccctgcagccccgtgactgacctgggtgccctgactccggagccagtgttctctctaggagctgttcctccgttttgtcattctcatcaaatttgaggattgttgtgaaagagagatatttgaatggctggagcacacca

SEQ ID NO: 194338 - DNA, 381 bp, Homo sapiens
gcaatgtagtggggcgatcttggctcactgcaacctccgcctcctgggttcaagcgattctcttgcttcagcctcccgagtagctgggtttacaggtgcccaccaccacacccagctaatttatttttgtatttttagtagagacagggttttgccatgttggtcaggctggtctcgaactactgacctcaagtgatccacctgccttggccccccaaagtgctgggattacaggcatgagccaccgcgcccggcctgttagagaaattctaatagcattgaacttcagaagtaaggggagtcaaagtttcagtctctccctaggagagctttagaccctatgcatatttgttttcattttcttcagctttgcataccaag

SEQ ID NO: 194339 - DNA, 583 bp, Homo sapiens
caggcctcaggatattggtttaaggaaaaatgaaaactcaaaaatcttctttcccatctggctgcttgggcattttccacctgacgctctgtgttttagctggttctgaatcaccttggaatcatgaaggagcccctagctaggaattcctggggtacaaccaggggtgggacaaagattgttggaagagatggggtgcagtctgagttggggtttctcttaccctgaaagttgtgtgtgctctttcaaatgtgtgagaaagggagttaagtcaactttctttagaaataccccccgaattgtcagatacttccttccctccgctgtggttgaagtgaggtgcaggctgactttcaagtgctcagtgacccgccagcctgggaccacgtgatcgtcctctttcctgtcttcagaaccatcttgaacccttgctctcaagcaagatctttggtgactcattctcccaacctcttcctaaattgcagactcacacaagggaagttaacatttacagcacacctactctgtgttgggcattgtgggtgctattatcctcattttatgagagagggcacaggctggt

SEQ ID NO: 194340 - DNA, 447 bp, Homo sapiens
tttgcaaaaccaaatgttcccatgttcataacatcacagtattaggtattgaagagagcctattacattaccaagtaaggcctcataaaattgttctttagtacatcacaagcattgttaaaaattttttttttccactctttaaagttttatttcactaacttcaggccaaattcccacaactgtgttctgatcaatttactatccttgcttggcttccccaaatggtagtaccaaaagatgtgtggggtagggagaagaaaccactttaagaagcactgcatttactcatcttccacaaggcaacagagttgggcatctgattgttcaacaaaacaaagctttaatagcatccaggagggcagacaggcaaaccacgctgtagacactcttctatttgtcaaaatcagaccagagaaaacctactccacacagatataatagata

SEQ ID NO: 194341 - DNA, 619 bp, Homo sapiens
  misc_feature (567)..(567): n is a, c, g, or t
cctgtcatgcagttaacatctgctatagatgctggtaaaaacaagtgaaagataattgtaggcatgtaactggaaacaagaaaatacaaggctaatctaataaattaagttcttaagtttaatttttcaaaagggccaagcagtcgtcgcaaccacatgatctcgacaagaatcccctagcaactctcaggtggaggcagcacagggatgcggttcctggtgaggagggtcctcactcggtgaccacgctgcctgggctcacagctggagggctcacccatgagggacacgggtggacacccactgcttcacatgcctaattcacattagaaacatgtaaagccattcagtctgtgcaataaagagatcctgtatgaaatccactcattccttggagggaagctggcccggaggcacgctctggttgacgggtgacgcacagtcctccagggcctgcattgcatccatgacacagacacacgtgaacacccagcccgccggtcctagcagccagctgtgaaagctgtgtcaagtcacgggggttcctttctaacagctaaagctcanaggcatactggaccctgagggaaacaggagagctgagatgggacgggaagaa

SEQ ID NO: 194342 - DNA, 1062 bp, Homo sapiens
cagtgagactgaagggtatccacgtggaagcacctgatcaccatcacccagtttgggtgacagacctgagttctctttttttgagtctttcagctgctgttttctaacagctctttggtaattgagggcaactggacagggccactctccagtgttacctgaaggccaaggaatgaatcgggatagcttccctgcccggaagggagaaagactcttttatctttcctggttatagtctctgagttctacacgtgacaccattggcactggtagctcattcagggcgaattcacactcaggcctcttaaaccctcctttcttaggccaaattctcttacagagttagccagtgagggcaaaagatagtatctcctagatattttgacccttctactggatccatttggctggctgatgacctttgggacccacaagctttagaatacattctacatcttggacctccactgaggggaccttgtttcctttgtcttcaccatattatttcaatagaatggcctgcccttacacaggacccattgccatggtggtggatttttaaacattccctctcttgcccagggccagaatggaatagccagccctattttatctttcatgcctaaaatcaacctttttccctgaaattacccataatccacatgacaaaagaaatctaccagcctcctgttcctcttattagggttcacagctatcactctagtggaacaggaagtgtgggaaaccatggccttaccaaattataaggatgctagaggccaggtgctgtggcccacacctgtaatcccagcactttgggaggctgaggcggatagatcacctgaggtcaggagttcgagacctgcctggccaacatggtgaaaccccgtctctactaaaaatacaaaatgagcctggcatggtgatgcagacctgcaaccctagctatttgggaggctgaaataggagaattacttgaacccaggaggtggaggtttcagtgagccaagatcatgtccactgctctccagcctgggcaacaagagtgaaactccatctcca

SEQ ID NO: 194343 - DNA, 613 bp, Homo sapiens
tagtgccagtatgtattgtgggtagtctggagaaaatactgtaatattgagatctagaaaatcggtgtaaaagttgccttgttcgttttttggaccaagttttgctcttgtttcccaggctggagtgcaatggtgtaatctcagtttactgcaacctccgcctcccaagttcaagcgattctcctgcctcagcctcccaagtagctgggattacaggcatgagtcactgcgcccagcctggtctactgttcttttccacctgcagtggacagtgctggtggcgcacccaggtgccttcagattcctcttgccagttctgtgcacccagcccccagcttgtgtgcttggtgtattaatcatgcctttgtattttctgaacttctgctgctttgacaagtgcgggcctcgatgactctggagggactgaccctcccagggatagccaaatgctagagatagttaactactcacctttcctatgtaaaccagccaatccagagcccacaccccatccacacctttatgagcacaggctccctgagccaggcaccaaaaactcaggacagcctctatgctccagagcctgctgaaattcaaactaggtaatctcaaa

SEQ ID NO: 194344 - DNA, 299 bp, Homo sapiens
aatcatagctgacatttgttgagtggtgcttcccatgtgctaggcactgttgtgtgtgtttatatatattaacccaattaatctcaacaatactgtgggttaggtactattatcatccctgttttacagatgagacttctgaggcacagaaacgttaagtaacttgtccaaggtcctatacctaataaagatagggctgggatttaagactagattctggttccagagcctgtacacttataataccatatccaaactttctcttctatccccataaaccatcctcatcccatagtcac

SEQ ID NO: 194345 - DNA, 512 bp, Homo sapiens
cccgcctcagccgccccaaagcatctggcacatattagggcttgtaagttccattaatgagtgagtaaattattcaggaagatttgggaatacaaaaatgaatcaaacgtgctccatgccctgagttgcttcatatagcagcaaagaccaatttatatgaaaataattttaagtctgtgagaaacgcagcagtagaattatatggagggtagagaggtgacagtaataaggaggtgattaattctctgggggtggtggtagacacataagcatttaaataatgtaaatgttttgaaaatgtgacagtttttaacccattaactgttgtggtaggcttactttcgcttgtccagagaaaatggaaatgaagattatttgaatacagtgtgcttgtgactctgtagaaacttgtctttgatagacatctatgtaagctgaattaagcagagggcaaatctctgtcatttgttcctctatgtttatgttgtataatttggtgtcatttcaatcat

SEQ ID NO: 194346 - DNA, 342 bp, Homo sapiens
tgaataattttgtgccttcatttcctcactgaaatcctaagtttatgtgcatgggagtgggggtgggcacagccactgcagcccaggcagaggggactgcgagtgcaaaggcccaggggcagtgctgagcaaggcacgttccaggaacagaacccagcctgtctcagaagctgctgacccagatgagctgacgtctgagtctgattggtgaagtggtaagtgcagggcacatactgggagttatcttgaccaggtggtctacactctgcaggggtgagacctggctgaagcttcaccacaggggtcagagcctgccctgtgacaaagcaagtaaaggccagg

SEQ ID NO: 194347 - DNA, 316 bp, Homo sapiens
ttacccatcatttactgctgctgagaagagcagatggcagcagacgatatgtaaatggcaaggggcagtgaattattcgatttttttagattaatcgtcgatgacaaaggaagtgattacaggctgtgacatttatacaaatgtataaagtacatcacacaaaaaaatagagcttaatattattatgaggatgtcaggcatatgaacactattgtcacaatacaaagcaataaattttacaataacccaaaaatctgctatctctttaccttaaaactttagtgagccccagaatctgaaaaaaggatgaacctag

SEQ ID NO: 194348 - DNA, 440 bp, Homo sapiens
ctcctaccccacgtggatggctataatcaaagagacaaacaatagtgttagggtctggagaaattggaacatttatacattgctggtgggaatgtaaaatggcacagccactctagaaaacaatttaatagtgcctgaaaatgttagttagttagcatatgacccaacaattccatgcctaggtttagacctaagacaggtgaaactgtatgttcactcaaaaacttgtacatgaatgttcatggcagcattattcacaatagccccaaagtggaaacaatgtaaatgtccatcagctaatgaagatataaacaagatgtggcatatccatacaatggaatgaagtactgatacaggctacaacatagatgaaccctgaaatcatgttaagtgaaagaagccaatcacaaaaagaccacacactgtattgtatgattctg

SEQ ID NO: 194349 - DNA, 299 bp, Homo sapiens
aatgtgctgtaggccagcgcggttaaaagatattaccaaggttaatctcttaattttgataaattctatggttaaggggaaacagggtaaagggtatataggaactatatgtactattttccaacccttccttaagtctaaactatataaaaaattatttgatagatcttaaccatatccaaaacaggtccaacctgtcaaatgcatgagccccttgaaccttctagttaaatattaatattttaaaaaattccttcctttcgctggcctacagcacatgcctgtaattccagcacttt

SEQ ID NO: 194350 - DNA, 244 bp, Homo sapiens
cagtgagagcctctcctctaccagttggctcctgagttcttttgaccatgatcccagtagttttttttatagcttctttccttctaatgttttgtacctttcgtggcccagatctacaataagacatttctccacagactcttagtttcttttgtgggaaatagaaaccacagtctgagtgcctggatgtctgggtcctagggatgcacattgcttctgggttggtcattctatctagtgaaca

SEQ ID NO: 194351 - DNA, 352 bp, Homo sapiens
ctacacttctgtaatctaatcagcggcttatgtgacaacacgcttcccaggctgaaatatatttcagtctatctctgtatccatcagacaagctcctaaacccattcccactctggcactccaaccaagtctcatccagccattccagttccccatagtgtatgagtgaagactttgcacttgtgaaaacgtgcatgggtatgtatgtgtaacctaattaaagtgtcttctgagtatctgcacctcccaaaaatgatctgccaatctgccttgagaaacgttggaagtagctcatgagatctcccagaatcctaaggaaagagatgtgttccttctccacatagctaatttg

SEQ ID NO: 194352 - DNA, 325 bp, Homo sapiens
tctcctattcccttgcttccactaccagactgtgacatctttgagaatgaccatcatatctcacatctatttcactacagtgccaaatgcaatgcccttccgagcagtcatccacacaagagatggctgaaaatgaatgggaaaatcccctaagaccacatgtccttctggataaggaatcaaaggtgtggtgctcttcacaatgaggacattacaaaaaagtcaattattcaatatatatttattgagcatcgtttatgtgctccaaagcatcttagtttgttaaattgagtcttgaaccactgtagtatcatatagtaaaaat

SEQ ID NO: 194353 - DNA, 432 bp, Homo sapiens
ctatgctctgcttcccttttaaatccaaattccaatttcaaaccatctctttgtgaatgcataagattgaatgctttcaaaatcaaccaggtcacctcttgaatgctttgctgcttagaaatttcttttgccagttaccctaaataatctctctcaagttcaaagttgcacagatctctagggcaggggcaaaatgccaccagtctctttgctaaagcatagcaaatgtgacctttgctccagttcccaagactttccttatcttcatctgagaccacctcagcctgtacttcattgtccacatcattaactgcattttggtcaaaaccattcaacaagtctctagaaagttccaaactttcccacaacttcctgtcctcttctgggccctccaatctgttccaacctctgcctgttacccagttccaaagt

SEQ ID NO: 194354 - DNA, 447 bp, Homo sapiens
aggatacgactagtcaacatacccctagtctaaccatccttccattgcttctccccttccctgtggttcaggaatgaaatagaaaggcttttttttgaataaatttctcggtcattgtcttccccaattaacttcaggccagcagatgttaaattaagtcctgactgtgtgccagatcctcttggaacggagccagctagagggtgtggagtatgtgggaacatctctgtgctttgccctcggatgacaggggctccagatgctgcctcagaatggaagggtggtgtgggtgtggagctgggctcctcacttgctctgagagattgtatattcccagagtcccccaactattcatatgtccagattgaaagactgacgaaggctaatcagctgggtttatactgtttgttgcctggaagttcattgtatttgcatgattcctgtatg

SEQ ID NO: 194355 - DNA, 475 bp, Homo sapiens
acattttagttaaattctctctgagatactcgaagtgctttaatcttttggctccatcatacccaaatacgtgcacagcagattcatatactccctgtgtttttatgtttggagtttatgatgaacaaaagttggtgttttaattatatccaaagacctctgtgttttgaccaagtccccaaactaaaaattggcaaggatttaggtagagtgaatttagagaacataggacatgtttttgtactgactttgaaaaatttgagtttgtttcattttttgccctcttccccaagggggaaaatgtatttaaaattgttgatgcttctttcccatcattgacaagacagtgtgtagaagaagagatgtagaatgatctgaatgtgtgcctgtattaatcaccaggagtttccgcaggttggggtgaaacctgaaagtgggtgtttctaactaatcctaggttatgttgatgctgggg

SEQ ID NO: 194356 - DNA, 473 bp, Homo sapiens
attgcaacgaattagtatgatcttactatgtttgcaccatttacaggtcaaggattaatgtacgttaaggaaaaaaaatcagaaacactacccatgggaattccaggataatgaggaaaaataaatgtgtgtgtatgtatgtgagcaagcacatactactcgaccatggtgtattgtcctgggatgtactggtgggcttgaactccagaagttatttaaagcaatttagagtgtttcattgctgtttatttccctaggaatatgtgtttatgtcctttatcgaattttcagtcatctatcacctacaagaagttaaaaatccctaacataaggcttggatttctatggatctctgaatgtttgtgtatgatcacaaacacatctagaatcatcaggagagtgagagcaagagagagagagagcaagagagagagagagagagagagagtcaaaagagtaagattaggaaatag

SEQ ID NO: 194357 - DNA, 355 bp, Homo sapiens
ctcggtacccttcagcagacaacagcagaagctttagattttcctgtctttttttcccagtattttccctctatcatgaaggaaatcacaggtttttctctccttcattccccacactcaactgccaagtcctgttcattttacttcttaaatatgccaaacccaaatacatacatgattttcaactacacacaaatctcatggcctttcatggtgcaatcctgtttttggcacaaaactgaaggtgtcgcgtggccctgtctccctctccagccacatctcctgaccccacctagagaagggttcatcagcaaagccctgttcacatgtggagcagggtcactcttggggaggg

SEQ ID NO: 194358 - DNA, 456 bp, Homo sapiens
gctatcttgttccttcctcaaaatatagttagtcattaaagtaatttacttttactcttggagctgattttggcttgggaagctagttaaaccacaaaattgtttacctggactagattaagatgatgacttatgacttgtcttcactagcttgaagtaaaccagatgtcctcatcatttggcttttattattgtcctaataagtctgtgtgtgggatggctaattggctcatcatagtgttaaccttctgtacatgtctgttaatatcaacatcaaacagaagcatcgggggaaagaacattaaaggcaggtacaggggaagagactgaaggttgctctgcaccagacaagcaacaggaatagaaaatgcaccagaacgcaaagccagccatggcgcatggctcagaatactagaaattaggcttttccccagtctaactgtctctactggtgtg

SEQ ID NO: 194359 - DNA, 469 bp, Homo sapiens
aatccaactttagtgggggggtgtttgccacttacagtaccttgacatcacattaagttctgtttatttccctctttctctttagatgcaaaaaataatcaataagtataaaattttgctgatatgtgtttgtgtgttcttaagctcaaaaagagttgaaagagaactgttcagcctattttttttgtcatgagtaaaagtaaagttgaagtgacttaagacagtacatcttatgttccctgtgggttttacaaggaaattctgctattagataagctttggaaaagttacaggaggtatctgaatatacagcacactgagagctgtcataaagttctggggtggggtttcttatatatgccctcataacttcagagacggcacagctctaatgaacactcacttctagttcactcacaggcattttctggatacaaacaagtcctcaaaaagaattttggtcgtctta

SEQ ID NO: 194360 - DNA, 375 bp, Homo sapiens
acccttgctggctgtgcagatgctctaatcctcttccatattctccatccaattctggcctggaatgtccattctgtggtctctgctacggatcactttcacactagccttgccagccatatggcagttctcttggccctcagtggtcaactagcttctgtgtcactcagtgggagagcccactggaccatctgaatccccttcattctacaaaggaactgggagagacgtggaacactttgtgtcacatcttgacaaaggaataccctgtgagatggtcttgttccacagtttcagagaagtggcacaagccccattcactttcagcttctctcttattttggattatgttcttctggccagtgtaaggcccaa

SEQ ID NO: 194361 - DNA, 276 bp, Homo sapiens
tttttccaggcagcaaagtgatgcggtctgctaatcactttggctattatgaaaagggtggaagcagagagaccagtcaggaggcctctgcaatactccaggtgagagatgtgggccagaatggtagcagtgaaggtggtgagaaatgtcagcattctggatatattctttctttcttttttttttttttttgagacagagtctctctctgttgcccaggttggagtgcagtggcttgatctcggctcactgcaacctccatctcaaaaaaaaaag

SEQ ID NO: 194362 - DNA, 389 bp, Homo sapiens
  misc_feature (376)..(376): n is a, c, g, or t
tgtattggtggtgctgacacatacctgtaatcccagctacttgggaggctgaggcaggagaatcgcttgaacgtgggaggtggaggttgcagtgagccgagatcgcgccattgcactctagcctgggcgacaagaacaaaactccatctcaaaaaagaaaaagaaaaagaaaaagaaatagtagcaccaagaagaaaggagcccccaccccagcaggagggagagcaggagcaggctgggtggggcacctggtggcttcctccaagttggctgtacctcaggctggagggagggggcgtgtcccttcagatgtgcatgtgggagtgctaacttcggtaccactcttctgtcctgcagtgagcaccaccaatacagngtaccgagctcga

SEQ ID NO: 194363 - DNA, 179 bp, Homo sapiens
cttacacataggatcccgcacttcaatagaagaatgctaatgcattcaggattacaaatattattttgtaattttcttaagtatggtacctaaggaaattttcttcttccaggggaaaaaaagagtatgttttaaaagtagctttaaaacataactgaaaacttactgaagtgtcaacg

SEQ ID NO: 194364 - DNA, 125 bp, Homo sapiens
ctatatagtgattggtaaacaagtatgtgaattcaagcaaacttcacttgaaagcccactcaaaagaaaagtatagacattacactaccttcattcaaaagtataaacattatactaccccttcc

SEQ ID NO: 194365 - DNA, 573 bp, Homo sapiens
gtgccacttctatctgagctaatcctgctacttatactttgaatcatatcttctcctccctactcaaataattcttatcctgtaacacatcttcaacttctttccctctctgtactacctactttttttcagggataaacttggtggtggtttatgcagtcttcctttctcccacctcttctcagtcggctccagtggaaacctactttgttattcaccaaagctattctgacaaaggcaccagcgatacccaggtcactaaactcagaggatgattttttactcctcattttaattaatctcttcactgcttggtcatagttgaccactcttttttaaaacaccttcctcttatcttggctgacactataaatgcctgttatttctccttttctggctactctatatttcctttgctagactgacccttttatccagtccttaaaggttgaagctcctttatagtcatagtggctgtgtggtttctcccctttggcaaccttgtccattctactggcttcagttatcatttgcatggtggtcatcaagttaaatttccatctcagagttgtg

SEQ ID NO: 194366 - DNA, 492 bp, Homo sapiens
attttatttttctagcttttcctttcttgctggcctcccccacagagtgagatgtgggtgagtaaaattcaggcacacttttactcttctttgctttactccaaaattacactaccaaaatatttattatatgatcctgattggctattagctagtaaccaagagccaggagagacaaaatgatgtttccgtatctgaaatcaacatttaatggatgaggttatatacattcaaattatgtgtgtgtgtatgtatattttttctttgttttctccattctataaagaaaaagtgttctggaaaagatttaaaaaccttcataacactggaaataagtaattttattgtgtgacattctgttttttataagtcagttccatagatagaagttcgccttatctgaacatatatctttggttctaatccaaaatgaaaaaaaaatgaaaatttacatctggcacaattgaaacaggagactaaatactgaactat

SEQ ID NO: 194367 - DNA, 414 bp, Homo sapiens
taggtgaaaatcattgaatagttcttctgcacttctttgaatggctgatctggctaggagacatgccctttctatttctgttttattttagagtttctgcatattttagagttctgtggtttcctttttttaaaaaaataaaaaaaactattttttgcccagattttatatttttttcatttgtttcaagagaatgtgtaattgattgttgaagcatttctgtctcctttaaaatccttgttaggcaattccagcatctgattcatctgagcatggctgtcagttgatggtcttttttagttcacttgtgttttgcttggttctcagtgtcatggctttttactgtatactgaacattttggctattatattaggagactctggatcctgttttaatcttttattttagcaggc

SEQ ID NO: 194368 - DNA, 677 bp, Homo sapiens
cagtgtgtgaaagcactaacacaatacttaggcttattaggtgttgaataatcttagcgtccttggtccttgcctgtgacttaaatgtaatgctcagtaatcataaaattacccaacgagtttgaccagttctctcccacacccccagtctggtctcagtttccttggtcaggtgcttgtttgaactgactgtgactagaactgacagattggcagacttcacaaggacctctttatatagggaatgtgtgattatgtaaacagcagattttaagtccaaatgccccaggtcactgccctggactgcaagactttgctaagaacacaggaagtagattaccaattttgaactctgaggtggttctacgctgccggcttgttttcttgtccattcccaactattcccacccctgctgccaagcaaccaacccacaaagaaagttggtagtgtcgtagaaaacacaaaacaggctagaatcaagtctcagcctcacacagtaaatattgttaaagaaatatgtttagttctgaatctaagcagagtgtttaggaatccgtgcacttaggcagtatctatctgcagagctacctctacattttaacttaggttagttgtttcccttggaatgtcttctccgtgttttcaatgttttcacctatgttgtaccattaaggtc

SEQ ID NO: 194369 - DNA, 199 bp, Homo sapiens
tcagctcggtaccctttcggcgcgagcactaacatgacacaacaagtggaaaattccacccctgaccttatttgaaaggtcacagacaagagggcagtcaaaacttttagtccaggcaacatacttagcccagcctggctctacaaaaaataaattagctgggtgtggtggcatgcacctgccagctactgaagtaaaa

SEQ ID NO: 194370 - DNA, 250 bp, Homo sapiens
gaagttgtgattttttataaaattgcagaatctattgttataggaggagctttgctttaatggtttttcagtttgtccctttacttaccatagggattccttctgttgccagtcccttgggggcagggactgtgtcttcctccctgtattctgagccctgcatagggcctggcccttgcataggtgttcaatcaatgtgtcaaatacatgagtgaatggacaagcacaccttttcttttctttctttttt

SEQ ID NO: 194371 - DNA, 287 bp, Homo sapiens
ctctgcaagccttcagtcaagttgtcagccaggtctgggtttgcatctgagagctcaactggggaaaaatccacttccaagttcacgtgatgattggtaggattcaggtcctagtgggtgaccagactgaaagcctcagtttcttgctgcctgtgggccaaaggctgccctccattccttgccacatgactctctccactgagcagctcacaacatgacagccagcttcaacgaagccagcaagggacagaatctccttgcaagagatgggcgttacaatcttctta

SEQ ID NO: 194372 - DNA, 655 bp, Homo sapiens
tatctactggtggaaatttggtgggtcagatcattactttaaaaaaaacgaattaggctgggcacagtggctcacacctataatcctaacactttggagggctgaggcgggtggatcacctgaggtcaggagttcaagaccaacctggccaatgtggtgaaaccccgtctctactaaaaatacaaaaaaaaaaaaaaaaaaaaattaactgggcatggttgcacatgcctgtaatcccagctactctggaggctgaggcaggagaattgcttgaacccaagaggtgtaggttgcagtgagccgagatcatgccactgcactctagcttggaaaacagcgagacttcaccttaaaaaaaaaaaaaagagttaaatctagtttatactactgttatgaacaaaatcgcatttttaaaatgatattcgtagagttgcaaatgtgaagaattttgtatcacttagtaaactttgcattgcatgtgatagaaaatccagctcaaaccagcctaaacaataagtgatttattatgtcacataagagagcagtccagggattggctaggctttgtttaaatttccagtgatataattagagcccagtttgttcatgtacatttcatttccttatctgagtttcattttagggcacttctctc

SEQ ID NO: 194373 - DNA, 648 bp, Homo sapiens
tctgtagctttgaaaaggtgatgtgatcccattaagatgtcatgaactacggaattctttcccccatctcttcagacatccagttctacaattttgccttgtttttttgtctgatgtccctcacatccaacctggccccccacaaggtacttctttccactcggatcacaccaattagccactgaactctacatccaactattcacactgagatgtaatcaaaggttaacttttacatgcttgattttacaaggtcaagaagaattcttaacctagtgatggctcgagtacctgaagtatttttgaaaaagtaggagggaacttacaaactcttccgttgtctgccatatccattcactcacttaaattgtttataagacaataaaacacataaaagcaacattttcaccaggccaatcacctctctccagcctcataatgattagcctacatccctgtatccagatttccctaaaattaataatggtgcatttttacattcacttcttgattttactcagctccatcctggaacattaaatctgccttggcttagctatgctagtttgcacttggcccttcctgatggccatggtccaggcttgtaaattatgtccaagttcctcagttgctgttcccgggcctggg

SEQ ID NO: 194374 - DNA, 128 bp, Homo sapiens
agcagtcatctgctggtgcaaccagtcatagccctgagtgataaaacgtgagagatttagtactcaggctctgaggtgttgttttgaccactaccatctacagattcccaactctactggatagtcag

SEQ ID NO: 194375 - DNA, 483 bp, Homo sapiens
gcatatggcaaggcaaggagaatcgtagcccagagctgccaagttcactgggctccacccccagctccaggaggggaggagaggacctgacatctgtaggtggccctgatgccccatctacagcaggaggtcaggaccacgcccctggcctctccccactcccccatcctcctccctgggtggctgcctgattatccctcaggcagggcctctcagtccttgcttgcatatggcaaggcaaagcataagctgaatgggataaatttatgactgaacccccacatttttcatgagtgaaatgcatctattacagcagattttatgcaaatacagaaaactgactcaatagtcatgttaaaattgcattcagtgttctgtgtatcttactgagctatcacaacaatattgtacttgaacttttccaaaccattttttacccagacttaaaatattgctctagtctgcctttattcttctgaagtg

SEQ ID NO: 194376 - DNA, 520 bp, Homo sapiens
tctggtaacatcgtatgggctgggttacagcacatgccgactgctaagccagtcactggggaaaaccatgtgattgctgtgatgagcttagaatgatcattcctccttcaggagctggggtgggttgagggaacgataaagatcctgataaccttgcatttctccagcgagaaagaagaaattccgtggatagggagccagccaggtttcctgcagagattcacgggaagcttttgagcaggggagtcagaagatgagcggtgagtattaggactttccagtcacggcgtgacgcagggtttggccagttcttcctgtaaaggggcaggtgggaaacgcttgtaggcccggtggtctctgtcatgtctgctgaagcctgctgtagcagtgtggaagcagtcagagatgacacgtaagcaaatggtcctgactggcctctggtaaagcgtcgattccagaagcatttaacagacctaataacctttcaaaccgcacagggtttctttcccaggtcctgttt

SEQ ID NO: 194377 - DNA, 694 bp, Homo sapiens
tgtgggcagtgtttacttcatgtctgctttgctggcgggccaagtagcaacagctgcagtcggcgtgttctctgaagcgagaaagaagaaattccgtggatagggagccagccaggtttcctgcagagattcacgggaagcttttgagcaggggagtcagaagatgagcgggctctgggatgtcttggtcttactgtttccctgccaaacccggtgccatctcgtcatgatcacccactggagaagagaggagattctcacagtagacgaggagcctgtttttcagctagctgctgcaaggagctggacatttctcccttcaaataggacctggaaggcctggaagcatctggagaagggcatggctgtgagtagagaaacagaggatacaggctaaagcaggaggaagcgagaggactcacggaaagccttgctgcactctccaaaagagctgcccttttcacgtggtatgctgtccacattggctgtgtcctgttgacagctgggaggggccgtaggcatggcgtttttcctgcagttgcaggcactctcacttgaggcgtgtctttttcggcagtaggatgttgcccggggaaggtcatagggtagtgaaacctggccggtatgcctgtgaggaggtgtgtgtgagccccctcgcctgcctcctgataccttcttggggagctgctcatca

SEQ ID NO: 194378 - DNA, 653 bp, Homo sapiens
ggaaagtttttggcggcttacaaggactgtgtccatcatgcttgggctctcttatctttcccaggatcctgaatagggcatcccccgttcatccatagggctctgggatgtcttggtcttactgtttccctgccaaacccggtgccatctcgtcatgatcacccactggagaagagaggaggtgctggagtgaaccggttcggggaagccccattcatccctggggtcccagaatgaaccgttgttaccatgtgcccctgttcttgccttcctccctgctctaatggacgtgtgttagcctgggatcagccttggtctgggtgctatcgttctgttgcacctgtggcctttgtccggactctgtccttgtctgcgtgacgtgagagtgactgtgggtgagagcgttccagcaagacaatgatgatctctgctgtctgattcccacttcccagattctcacagtagacgaggagcctgtttttcagctagctgctgcaaggagctggacatttctcccttcaaataggacctggaaggcctggaagcatctggagaagggcatggctgtgagtagagaaacagaggatacaggctaaagcaggaggaagcgagaggactcacggaaagccttgctgcactctccaaaagagctg

SEQ ID NO: 194379 - DNA, 181 bp, Homo sapiens
cttctatgtgccgctccggctccccagtgctgatggagactcaggcaggctgcgctggaccaaataggacacgtggtggtgatgacatttttggtccaatccagtagcagcctgtgaagtgctcattgcaggcagagctgagtaagctgtgaccccactctcaggcagcttctcttcgggg

SEQ ID NO: 194380 - DNA, 251 bp, Homo sapiens
ccagtgtgccctggttctgtgtgtgccttgcaaggagagaagcaggagctatttggcaccctagtaatgggaaatggagctccactgacagcagctccccagactgggtctagcctgcaggcctctgctcaaaacccatgtgcaatgcctcaggagacacagtgcagccctccagcacatgccactgtgggaagggagaattactacgaagccctgtgccttctcatttagcctcagcaatgccatgaggt

SEQ ID NO: 194381 - DNA, 539 bp, Homo sapiens
cttttcagtgaacttgaaacattaaaatgtttactgccttcacacttatggcttaaaaagttgtttggtttgtgttttctttgagatggagtctcgctttgtcacccagtctggaatcgcaccactgcactccagcctgagtgacagagtgagaccctgtctcaaaaaaaaaaaataacaaaaaaaaaacaaaacccaaaatccctaaggtgtttataattttatactgtttcctaagggattctcttgcattaaaaatgccctgctgggtgcagtagctcacacctgtaattccagcaccttgtggggctgaggtgggaggattgcttgagagcaggaggtcgagaccagcctgggcatcagagaccctatctctattaaaaaaaaaaaaaagccaggcatggggcatgcctgtggccccagttacttgggaggctgaggtgggaggatcacttgaggccaggaggttgaggctgcagtgagtcattatcacaccactgcactccagcctggacaacagagcaagaccctgtctcaaa

SEQ ID NO: 194382 - DNA, 233 bp, Homo sapiens
actggtcttaagatgcctcacaagaaaatagttccatggaactctggtgagcactgcccactactcacacccatcaagattcacaaagctcattagttttgaagaaggtcatttaactttaatccaatgctttccaaacgcacttaggcatagacccatcctctgacccaggtccccactgtattagtggtgtagggagctgtgttccagggaacacactttgagaactcctg

SEQ ID NO: 194383 - DNA, 260 bp, Homo sapiens
tgcttagtatggttttggctctgaaggctctttatgggttccaaatgaaatttagaagtttttttttccagttctgtgaagaataatgatggtattttgataaaaattacattgaatctatagattgagcagtatggtcattttcacaacaattttttttatatctgtattagcgtattttcatactgctgtaaagaagtgcccaagactggaaatatatgtgtaaatatatatatttatataatatataacatgttata

SEQ ID NO: 194384 - DNA, 529 bp, Homo sapiens
gtttgagtctattgtttctttgttggctttctgtcttgatgacctgtccagtgctgtcagtggagtattgaagtccccacttatgttgtattgctgtctatctcattttttaggtctagtagtaattgttttataaatttggtagctccagtgttaggtgcatgtataattaggattgtggcattctcccgttggactgatccttttatcattatataatgttcctccatcttttttaactgttgttgctttaaagtctgttttgtctgatataagaatactactgtactcgcttttggtgtccatttgcatggagtatctttttccacccctttaccttaagtttgtgtgagtccttatgtgttaggtcagtctcttgaagacttttgcctcacagctttcaggtggatttttttccattctgccattctgtttctcttaagtggagtctctaagccatttacattcaactttggtattgaggtgtgaggtactgtattctattcatcatactagttgctgcctgaat

SEQ ID NO: 194385 - DNA, 270 bp, Homo sapiens
tttttcctgagaagaaatacataaactttaaatagaacctcaagaacggattgccttgcagtaataaataaattaggaggaaaacactttcaagaatacattaaagacaattagagaacttacagtataaaaacttaattactggccaggcgcagtggctcacgcctgtaatcccaccactctgggaggctgaggcaggtgggttcctgaggtcaggagtttgagaccagcctggccaacatggtgaaacccccgtctcaactaaaaata

SEQ ID NO: 194386 - DNA, 299 bp, Homo sapiens
gcccacatacaattttacatacaatttcatggggttatgaaacccccagcacctacccatgaatcacaagttaagaatcctggtgtaaaaataaccaaaggtataaagttaggaaaggtgggaaaatgaaacataggaccaaaagaaaagttggaagaggatggaggagaggacaggagatgccgtagcagtgagtaactctggaagtgggtataggactacgtggctctgtacttcaaagtgctctcacttcttacatttcatttgatctttacagtaactcattcaacaaaatggat

SEQ ID NO: 194387 - DNA, 218 bp, Homo sapiens
ctcctgacctcaggtgatctttttgcctcggccttccaaagtgctgggattacaggcatgagccactgcgcccggcccaaagatattttaaagcaaatataattctaactcaaaacctccaagcccaagccccttacatttagcccttcttcctagatttcaaacaaatttaattaaatttgtccttctaacttgtctaatgtgagtactaggtgaat

SEQ ID NO: 194388 - DNA, 239 bp, Homo sapiens
ataaagggagaaagaacctagtgacatagctatactattttgtagtagagggaccattattgaaaatgtgcatcccattttaagctgtaaaccaacctgtaatagagagtgaaatatttttccctccaaaggcagaatcattaaaacctatactcttaatattccacctaatttctgaattttcctctgtgcgaagacactctttgattcttttaatatttcattgattgtgccagttt

SEQ ID NO: 194389 - DNA, 170 bp, Homo sapiens
catgctgcggtcgatctctagcaggatccccctagtgccatgtgattctgaaagtgttatttcaatgaatgtgttaatcactcttaactccatgtaaaacacttagtaacactaatatgtaaaggactttactaggagtgttgcatgtatgattgagaacagcgttgctt

SEQ ID NO: 194390 - DNA, 344 bp, Homo sapiens
tttttgtatttttttgtagttagggtctcaccacgttgcccaggttggtcttgaactcctaggctcaagtgatctgcccaccctggcctcccaaagtgttgggattacaggcatgagccattatgcctggctcttactgtatattcttatacttaatcttttgcaatttttgctggtgtttctgtagactgtattctttgcattgggatcattgggtcaagacctatatttaattataatttttatagatatgctcaagtgaaccttcaagataatcctgtcggtggggtatgagttgaacactggcattaaaaaaaataaaaataaataaataacagtaaaaa

SEQ ID NO: 194391 - DNA, 307 bp, Homo sapiens
tcccggatgcacgagctgcgagagggcgggacaggcagtgggacgaagaggtaagcggttactcactccatggctgcagcaaggagaggcggcggcggcctcggctgaagaaagaaggtgggagcggagagcgcaggcgtgaaatcttcccaaggctggcctcgaactcctgacctcaggtgatccgcccaccatggcctcccaaagtgctaggattacaggtgtgagccaccgcacctggctctagatgaatcttaaatattatgttaggtgaaggaaaccagattcaaaagggtataaactgtat

SEQ ID NO: 194392 - DNA, 422 bp, Homo sapiens
gaaactgccatttttaaaaccgtgagatctcatgagactcattcagtaccatgagaacagtgaaggaaagacctgaccccatatttcagtcacctcccactgggttcttctcatgacatgtgggaattgtgggagttacaattgaaaatgagatttgggtagggacatagccaaaccatattaactactatacaaattaactatttaaatttatttttttaatgtacattaaaaactgtaaatttcttaaggaggaaagaagaaactgtttttcattttctaggtgataagttaggaaacattaagaaacaagcttgtgatcttatcctgatctcaaatgacataaatttagaccatatttcatctgctgcctaaagtttcagcatcctagggaaagaaaagaacagatattttaaaaagaa

SEQ ID NO: 194393 - DNA, 542 bp, Homo sapiens
cccatcttggcctcccaaagtgctgggattacaggcgtgagccaccgcgcctggcctatatttgattttttaacatgtaactgagtcagtgggcttcccaacatgtgggctgcagatatcagagcaggctgtggagttaccataaggccacagattcatgtctgagaacgagtgtgtgtgtgtgtgtgtgtgtgtgtttgttacacacacatatactgagatctttcaagtttatacagttgctgctgtaattaataaggtagaaatttattctgggcctcagtttatctgtaaaatggaggggttagattagaatctagtgattagatgatctctggaaaactttcctgttctaagaaaatattagttaaaataactaggaaaatttccatcaatgacacatgattacagtgtcataactcatgtccatattgtccaacaccctaagagagtaacagtttctcacactggtacagacgtctgggtcctcacactggtacagacgtctgggcttcactaagcactactcccttgacttgatc

SEQ ID NO: 194394 - DNA, 384 bp, Homo sapiens
tagaagtgggggggcggtgtaggggggttgggggagaaacctgatgggagcgtctatggatattcctaagacgatatcctcaggtaaaatcctttaggatgggagaacctactaactttattgctgtttatactcaccaaaatgaggggaagattccaaaactccaattctgagctaagaaggaactccaacaatggcagagaccttaatgaaatgtgctattaagtttccagcgatgcaccctagtgagtcacatgactttatatctcttatccgcaccctgaagttctatttcataaataaggagtgctttaaaatgatctgaactgcctgtagagactcaattgacctctagatacagttatgttaaattttaaaagttgt

SEQ ID NO: 194395 - DNA, 306 bp, Homo sapiens
gtaaagttttctaaaatccaataataaaatatagctatggtagattattggtattatttgctttttaagctgctaatctgagacctattataatgttggcattaacctctaaatattatggtaattaagttttcctaggttttagaaacttaaaaaaaagtttgctaccaagcttcagaacaaaatttaaaagacaggaaaaaaaaaaacaaaaccaaacaaaaaacaacaactaaattatttccaggcgtaatgaatgctcaattatactgtgtgttatgccaactcatagtgctcccggtcgaa

SEQ ID NO: 194396 - DNA, 435 bp, Homo sapiens
agtattaccactggcataattttcctttggcctaaagaccttcttttacttttattttagagcagaacttccgccaacacattctcttagattttcttcatccaaaatgtctttcttctttttctttttgccttaattgttaaagggtatttttgctggatatagaattctggattgacatttctctcagtactttaaagatgttctgtagttacttgaatcgctgaaaggcttaaagttggggactggctctatcacatatacgttttatagaaaggttcattactttcatatcttcattgtggaccatagcctttatcatcacaaaattttgtctcatttatgagtttttaaattttgctttgaacctaaacttttataactcctttctatttcctacaatgtggagtttatcgcggacagcacagcctgtgg

SEQ ID NO: 194397 - DNA, 298 bp, Homo sapiens
ttagtagagacagtgttttgtcatgttggccaggctggtctcaaaactcctgacctcaggtgatccaccctccttggcctcccaaagtgctaggattacaggtgtgagccactgtgcccagccatgtatttctttttttaggataaattcctaagacgggttagagtataaacattttatagtccttggtacctgctgccaaactgccactcagaaaggctgtgtctgcccatgcttctgccgcacaggcgccaccctggaggtggggggctctattccgttggtggagatagagtat

SEQ ID NO: 194398 - DNA, 354 bp, Homo sapiens
acgccacatcaagggaccatctttagttccattttttgagaagactttttgtttggcttgaagagggtccccctgaagctgaccctcagtgctgccgtcactgctgcaacctcagcacctccatggcctgcatgtgcagacaggagaaccggacccagtcaaggtcccaccagttctgcagacaagggtctggagtccaagtaaccacacagcacaccctgctcaaattctcagggtgactcttcacatgggatataatctgtcttgaatggatcacatttgccacccagaggaagagacaatgtcaaaactgattcaggccgggtgtggtggctgacgcttgtaatcccagca

SEQ ID NO: 194399 - DNA, 589 bp, Homo sapiens
ctccatagcgggcactggaagttcctctctctctgcacgtgcggcaagagctgaaaaaggagaaagggtcactgagcaggttttctgtgtctgagccccagagttcaatctctgctgaccagacccccactgaccagaccgctgagcggtggtgctcagagtcccctaccaatggctcttctcagtccacagacctctccctcccctcatcagcacccacaggtgactgagagtcttctcgggactggaccccaactccaggacacagggaggggcagtttgtcccaggctccgggtgctgagcttcacgcttgtgccacaaggtcctctgggccatctcaaacggggcagtgatgtggcctcgcacatctggatgcactgtctgggcctattcctgggccacatagccagaggaacaggaagatgtttgtcaacccaggcaccccactctgctgggtctcccagggtccttaccatggagaccagatccagagacagcacagaggccgcagggtgaccggcccagaacccttgagactaggctggggatgacaggaggactgtccccagacaaccagaagaccctttg

SEQ ID NO: 194400 - DNA, 698 bp, Homo sapiens
atcaaaatgatagaaagatctcaaatttacaacctaacattgcaccttaagaaactagaaaaacaagaaaaaatcaaacccaaagctagcagaaacatgaaacagcaaaggtcacggaagaaatgcatgaaactgagaccaaaaaatcatacaaagaattaatgaaataaaaagttaattatttgaaaggttaaacaaaggtgatagatggctagctagattaactaagaaaaaagagcagattcaagtaagaacagtcagaaatgaaataggtgacattgcaactgataccacacaaataaaagaaatactcaaagaccactatgaacatctctatgcatacaaactaggaaccttagaggaaatgtataaattcctggaaacacacaaccttccaagaatgaaccaggaagaaatagaaactctgaacagaacaataacaagttacaaacttgaatcagtaataaataatccaccaaccacaggaagcccacgaccagacagattcacagccacattctaccagatgtacaaagcagagctagtactaatcttattgaatatgtttctaaaaatcagggagaaggggtttcttcctaactcattctattaaaccagtattaccctgataccaaaatctgacaagaacacacacacaccaaagagaaaactacaggctaatatccctgatgaatata

SEQ ID NO: 194401 - DNA, 380 bp, Homo sapiens
ggaactgtgtctcctgcagtccagccggctccactttactcccctactttgtatgcctagactaacctaccctgtcctttgaccttgttttcactgctcttgacctgttgccagttaatacaatcttactccaacaagccaccagggactagttggtttaactggctccttgccccattggctagttggacagataattctctaagcagtttgtcttcctcactgtctacaccccacgcttatgctgcatcatgccttcatttatgtctttcttctatatctttgtcctttttgacctctccaaatcccagctcaggttccactctgtcctctgagaaattggccctcctcattgtaccactactaacctttccagacct

SEQ ID NO: 194402 - DNA, 408 bp, Homo sapiens
tgaccttcagcagacacagcacgttcagcccagtgccctatttcccgcctgggattgctgtcagtcacttagtagccctctgggttatcagaccccctgatactgcagtgcttgtgttcaggcaactctcatttcacttaataatggcccaaaacacaactgttgtgaggtactattttctgattgtggaaccaccggtaactgaaaccatggaaagtgaaaacaaggataaggacggactaccataatatgttgccatcgtaacaatattaagtcttctgatccatgagcataggatgttttcccatttatttaggtctttaatttctttcaacaacgttttgtagttttcagagtatgtgttttgcacttctgttattaaatttataactaatttattctttttga

SEQ ID NO: 194403 - DNA, 100 bp, Homo sapiens
ctcaccaccacatcactaaaggttcatgtactacagttcctttcacccagtgtgccatgtccagccctcaagaaaacaattacagcacactaaatggcaa

SEQ ID NO: 194404 - DNA, 200 bp, Homo sapiens
gatgagtttggagatactgagtaaggaaggacttaaagacaagttttttaatgttgaggactacagaagtattgcctcattgtcagaaataagaaagttggaaaaataatcagaaacgccatcaaagatttgtgttagtttggcagagaagatggtgcattattgagtaggtttaggtggcactgagttataggttgtga

SEQ ID NO: 194405 - DNA, 444 bp, Homo sapiens
accgagctggtaactgggagacacaaacagcttcgtggccagcgacagaggagcatgtagtggtctgcgttggttcctggacccttcacatccactgccaaccaagttcagcccacgagtgaactcctgctgcttctctgggaaggtaggagtggatgaagttgaaaagcagcccattggaggctctagttactccagcccaggcgtcttgctgagccccaagaggtctccaaatgagaggaagaggtcctcacaatcccaagatcaagatgcccccagagagcttccctggggggaagaggtgttcccccaaacactccttcctcccaagttttaacaagcgggtgcaggggcacggctcctcaaatccaagcccaatccctcttcctcttcagaatgttaaggctcagacaacttcagtgacttctaacacagctttcctcc

SEQ ID NO: 194406 - DNA, 403 bp, Homo sapiens
tgctaccatattgacagactgagtttctctctggttaatatatttataggttgagagacttaagagccagcaatgatatggttgagaaacttgcaaaacttttatcatttattaagtttccagaagcaaatgcacacttcactgagggactggcctgagcataaatgcatttcagagccttcagtctggctgtttacccatcctattctccccttatgtaccactcaagtctatacatatttacctcctttcttttctccctttcttctttcctctggttggtgtctccttccttcattcattcaccatttcccccaccatttattcattctgtttaatgaaatgtctttttaagggagcatctgctatagcccaggccctgtgtgtgtggtgggggggatgc

SEQ ID NO: 194407 - DNA, 374 bp, Homo sapiens
gaaatagtaatacttcacggggttcttgggcttcaacatggtaataaacacctaagaaaatgcctgaaataaagggcttagaaaaacattgcctaaacttcaaagcattatgaacattttccaaatattagtatctgctacatttattcacataaattcaggaattcagtctatttataatgcattaccattacagcatctctgtagagctagcattatatccaagttagttggacgttagctaattagctaacatcatatccaagagcaaactggctggtatccttttaaaataccaatatttaaaaaataagtaatattgatatagtcactgtcatataaagattcccctaggacatcagctttttaatatg

SEQ ID NO: 194408 - DNA, 441 bp, Homo sapiens
tcaagttgtctcctcgccaaagagaaaaacataccaagaaatgccataattttatattgctccacatggccaggttgaatttttgtggtatttgtgagatactcattaataaagccactagctcaggatgaattaatgatttagtactttactccttaaagtattcttaaggccttaggctcagcaggcagaggggaaagggaaggacagcctgcatagacattaatctttaaaatacatttgagtgatccaaaatgtattttacacacacacaccacaaagagccaacgtaaaaatacaataaaaatattcataatatgaatggagtgatggtgttcttggacttgtaaaaatttctctgaatttaaaataatcttcaattagtgtatataatttttctaatcagaaagaatactttattaattgcctatagtcccagca

SEQ ID NO: 194409 - DNA, 539 bp, Homo sapiens
ttaggtgcaatatcattaagttgaatcatgcgccattcctctctacacctccaaaaaaaaagagagaaagtagttttccattcaaagatgtcttagaacactcagacccatgtataagacactgaaaagcagtggtgcccagggagctctccgttcttcccgttttctcaagaaattgagctaggaagccatgtataaagttacgtcgaagttcagtgtgaggccaggagtggtacaggcttatgtctgtaatcccaacattttgggaagccaaggcagaagggttgcttgtggtcaagaattggagaccagcctgcgcaatatgtccagactcttgtctctacaaaaaaatagaagagtaataattttaaaaaatcagacgagcttggtgtaatcccggctactactcaggaggctgaatcgagaggatggctggagcccaggagtaggaggttacagtgacctatgatgtcaccactgcacttcagtctgggtgagagagtgagactgtttctataataaaatgaattcaatgtggg

SEQ ID NO: 194410 - DNA, 365 bp, Homo sapiens
tcgccgctggccccttctgttgactgccctgaccttccttgatgactggggacagggtcttcctggatattttcgtgtgtcttcccgggccagtccagtgatgcacttgtggatagggctggtcaatgtggctgtggccagagagtggacaacagacatgtccacagcaggagcaacatggtggcttgtcttgggctgctggttcctggagctgctcagaggaccggtgggtcctttcgaggtgggcagccagcccttgccgttcaggttcccgcaggggtgcgtgaggaaccgtcggacctgctcattagtttattgactgtgtttctggtaatggcctaaaaggttaagagaagaaatggtta

SEQ ID NO: 194411 - DNA, 464 bp, Homo sapiens
accgtagaaataggtaaatttttctggagagagactggagaccgaggaacattgagaatctaaattctgacttttagagactaagggaaggaatagccgctggcaagtggaagtgagagagagtgacaagaaaagtgaagggaaaattatgacagtgaaaagtcatggaatccaaggaatgagattcaagctcagtggtgttcagagtttctgagaggacgagaaagatgaggatctaaaaccacacaatggattagaccacagaaacgttgctggtgacctttgcaagtgcccttttggtggagtagagggggcagaagccaaactcgagaaaacagaaaatgcagtcagtgaatttagagacttcttgggaggaaaggctgtaacttcccttcagctccctttccaattgcaatacgtccctcatacaataacaacaccaagtgatgaagagctgacgttga

SEQ ID NO: 194412 - DNA, 167 bp, Homo sapiens
gtagatgtattgagatctatccaggttgagaacagtagttctaacctgtgttgagagggctgtcctctaggcacaatttctgcagggcagacggagatgatgtctgattccccattgtagacctggcaccaggcaaaacatctgacacttggtatatgctcattaaa

SEQ ID NO: 194413 - DNA, 663 bp, Homo sapiens
tctcatcttctcctccatcctcactattccctcttcgctgtcacctgtctgtcactgtctcaggtggttcttactgatttgcatctgggatgcaggcactccgtgtcacctgtctgtcactgtctcgggtggttcttactgatttgcatctaggatgcaggcactccgtgtcacctgtctgtcgctgtctggggtggttcttactgatttgcagtctgggatgcaggcactccgtgtcacctgtctgtcgctgtctcgggtggttcttactgatttgcatccacataggctttgggctctatcccacctgtcgtcttcggattctctaatacgcaggagtgctcttctgttagtttactcatagtttattaaagtacagagaaaagacatccaggatgataaattttacagtccttgccggggactgccagcttccagtggtgttgcctggcaccagtgtgacccccggtgcctgccccgctgaaccttctgtaaactgtttaactgtgctggtggtttcccattctctaggcgctgagatgcgtctggagagccagagggcctgcctgaaggaatcacctgagcctgtccgtccaccaggagtggggagatgcccccatccagtcctggaggacccgcttgctccttgctgctccctgggat

SEQ ID NO: 194414 - DNA, 421 bp, Homo sapiens
  misc_feature (408)..(408): n is a, c, g, or t
accaagaatcccccaattcctgacacagcgcccctccactccagcctgggcaacggagcgaaacttacctctcaaagaaaaataaaagatatttatttgaggctagcgtcggcagtggctcacacttgtgatctcagcactctgggaggctgaggcaggcacgtggatcacttgagctcaggggttaaagaccagcctggtcaacatggctaaacctcatctctactaaaaatacgaaagttagtccagcatagtggcgcacgcctgtaatcccagctacgtgggaagctgaggctggagaatcacttgaacccaggaggcagaggctgcagtgagctgagatctggccactgtagtccagcctgggtgatgagtgaggctgtctcaaaaaaattttgggcgtacggngagggtaccgagc

SEQ ID NO: 194415 - DNA, 366 bp, Homo sapiens
agaaccgatgactaagatgtcagttccaatttatttttcctcatttaacactgtttattattttaaccaataattttcctaatgctttaaagttcttcttttgcattttgctcatgcaaatagagcgtttcagtctaattgaacaaatccatactaatcagcatgcatataattgtgacactgggaagcttagttctaaaatgagacctgttatatgacactttgcctgtagatggcaatagaaagctaattactaagtagctgtctttgtggccaagcatacaccttcatcttcctgagagccagtatactttgatttttttctcaataaaatgaaacacacatttttaaaaagattaaaacttc

SEQ ID NO: 194416 - DNA, 479 bp, Homo sapiens
aaatactattaattagagatgagagctgaagcccaaagaagttaagtgacttgtccaacgtcacacagctaggagctgggtttgaacccaggcaacctgagaccacagcccacactcttcgctaccatactgccttaggctgctcacaggggaggtgagtagagtacagtctgtcactggaaggacttcctagggaagcacatacagaagctgagtactaatggctgaaatggggagaggaaggtattctggtcataggatggtgcaacaacctacaagcatggagggatgaaacctgtcactgtcaagacagcaagtagttcctaaagccagaatgagaagggtgcatgcaaacaggagaggagaaacagctagaaagcgagacagggggcagaaaacagtacctaaaatctgggggttgggggagacattaaagtttttatttttattttttttctcctggaaatatggaagatggg

SEQ ID NO: 194417 - DNA, 708 bp, Homo sapiens
tggtaagaggatcccgtcactgttcgattaagagtctttctatgagtctatagttctatactattaactcttttaagtttctgcttcaaacactttctttgaagtaatttctttttgaatatatgtctgagagctcacaggctggctaaagaccatctctgcaccttctggaaaattctcttggtatctccctttgcacatacaacagaggagcagccctgaaatcaagttgctacgctacaacagaaaaacaaatcccccttgctccctgaccaccaaatgaaaccaaagacagcttcttggatttatgctacccttttctctaaatgacacactggaaaatctgactcagtaaataagtgagtgtgtgtttaaagaagccctcctcacaatccttctaatcttatatgtagaaatgcactttaattctgaaaacaactggttcattctaaaccaaacagacaatcaggtagagcaaaattgtgtttaagagcagtagctggggctaccttatttggaagaatttggagtgttgtttgggctgtctgcagctctttggagaacatctgataccaatttacagattccatgattcattaaaggattttggtttgttcctattcctttagtcctctgtagttatcctaaagatttccccacaaacagatttcagtattttcctgaatggagacgttatttctctgagtt

SEQ ID NO: 194418 - DNA, 241 bp, Homo sapiens
cactaagctatgacttggagacaaaggccaagtcaagccccactgtgagattcaatgattccttggtggagaaagaagcatttgatgtggagcctgacacacctgaatggatgaactaataaatgattaagaatggaggctacagctgtacacagatcagaattgtaaaaaatgagcttcgtgcttgctagagtggactagatgagatatatcttattgttatttggaaggctccaaaaag

SEQ ID NO: 194419 - DNA, 360 bp, Homo sapiens
cttagaaaaatatggaagaaaatacactaattattaacagtgttaggattatggacattaaaaaccgacttccttatgttctcttgtatttttcagatctgttacagtggccagatttttgtttttgtaattctgataatcaggaaaacagtttagttaggagaaaagtaaaaatcttataaatccatgggtccccgcaaaactctcagaatgaagagaaaaatgggaaggctcagcccaggctccttcgggcctgaggctgagaatgtggccatctcctggcggtcagggttctgtggtgtcagctccctagtgtctggccccataggccaggctgtggcagtgtgggcgcgggctgta

SEQ ID NO: 194420 - DNA, 318 bp, Homo sapiens
aaagtgctgggattacaggcgtgagccaacatgcccagccagttttgtcattttatgtattttggtgattcattctttatcttacagatacagaacacttcattttttaaggcaatttaatactccattctacacttgtatcacacactttacttaatcaccattaatgaaatatataggatgcttccaagcttttttctattatgtcatactaaatgactatccttatctatatggcatatatatgccactttgcacatataaaataatagctaaattccagcaattggaatttctgggctagacggtatgtgtaat

SEQ ID NO: 194421 - DNA, 187 bp, Homo sapiens
tgataaggggatgacccccattttgcagatcaagaaactgaaactgagagaggttatggacttcacacaaggtcactgtaagtgaggctgctgggattcaaatgcaggtttaattttaatgtccatgctacttcacaatgattgtgctctgtaggagaggccgctgcactcccagcaccttcatggt

SEQ ID NO: 194422 - DNA, 122 bp, Homo sapiens
actatgagaaggctgctaggaaagaggtcagtgctaaaataattaaaaatcagaatcttgagtcaaaattaaaaaggaacagtttaggctgggcgcggtggctcatgcctgtaacaccataa

SEQ ID NO: 194423 - DNA, 901 bp, Homo sapiens
  misc_feature (83)..(83): n is a, c, g, or t
  misc_feature (85)..(85): n is a, c, g, or t
gattaaccccctaataaaattaattaaccgctcattcatcgacctccccaccccatccaacatctccgcatgatgaaacttcngntcactccttgggcctgcctgatcctccaaatcaccacagggctattcctagccatgcactactcaccagacgcctcaaccgccttttcatcaatcgcgccacatcactcgagacgtaaattatggctgaatcatccgcctacgcttcacgccgaatggacgcctctaatattgcctttatctgcgcgtcttcctacgaacatcgggcgaggcctatattacggagtcatttctctactcagaaacctgaaacatcggtcattatcctcctgtcttgcgaatatagcaacgagcgcttcatagggctatgtcgctcccatgaggccaaatatcattctgaggggccactagtgaattacaagacttacatatccgcatcccatacattgggacagacctagttgcaatgaatgctgaggaggctactcagtagacagtcccaccctcacacgattgctttagctttcagttcatcttgcccttcattattgcagccctagcaacactccatctcctattcttgcacgaaacgggatcaaacaacccctaggaatcacctcccattccgataaaatcaccttccacccttatacaccaatcaaagacgccctcggttaattctcttccttctctcttaatgacattacactagtgctcaccagactcctaggacccagacaatatacctagctaacccttaataacctgccaattagccgatgaatttcattggctaaacatttcgatcggcctaaatgggggtctgtccttaaaaaactcactaaaaaacactcattcaaaaggtaatttgctagat

SEQ ID NO: 194424 - DNA, 368 bp, Homo sapiens
  misc_feature (83)..(83): n is a, c, g, or t
  misc_feature (85)..(85): n is a, c, g, or t
gattaaccccctaataaaattaattaaccgctcattcatcgacctccccaccccatccaacatctccgcatgatgaaacttcngntcactccttgggcctgcctgatcctccaaatcaccacagggctattcctagccatgcactactcaccagacgcctcaaccgccttttcatcaatcgcgccacatcactcgagacgtaaattatggctgaatcatcctaaccctactcctaatcacataacctattcccccgagcaatctcaattacaacatatacaccaacaaacaatgttcaaccagtaactactactaatcaacgcccataatcatacaaagcccccgcaccaataggacacgaatgttca

SEQ ID NO: 194425 - DNA, 126 bp, Homo sapiens
tatcatcagggaattgtaaattaaaacaagataccattacacacctattagaatggccaaaatccaaaatgctgacaacaataaatgctgacaagaatatacggcaacagaagctcttattcattg

SEQ ID NO: 194426 - DNA, 444 bp, Homo sapiens
actcaaaataccaccaccaccaacaaaaaaaattagctgggcatggtggcaggtgcctgtaatcccagctactcaggaggctgaggtaggagaatcgcttgaacttgggaggcggaggttgcagtgagctgagatcatgttaccgtactccagcctgggcaacagggtaagactccatctcaaaaaaaaaattgaaaaataaataaattactatttttttagtagagaaaagtttgctttaagaatgtagcaaggtattcatagcacctcctgcgtcaaataatctgataatagaaggtgttgaagctgtgctgtccagcatggaagccacttgccacatgaaactattgagcacttgaagtattactagtcaagtgttacagtactttcagaattggtctggtaggctttccagttttctctggaaagctccttagagaaaaa

SEQ ID NO: 194427 - DNA, 132 bp, Homo sapiens
gtatgagtaattcatccacataaattctgctattacttgagtatggcatagtttggcttttttacatgaaaagtgcttcagggaaggtatatggtgaagaaagagaaaatatctccatctgtcagggtcaga

SEQ ID NO: 194428 - DNA, 189 bp, Homo sapiens
ctgagtccaggaggggatggcatccaggtctccttacctatcctggagcacagaaagaagaaaaccagatgaacaggagccaaacacatcgctttccactaattatagagcagaatttaggttaacagacttcctttttaaacagctaatgcccatgggaaggtgaagtcgtgggtcacttatacctta

SEQ ID NO: 194429 - DNA, 577 bp, Homo sapiens
tgtagcctaagttaggtagaatttaaggttaatgcactggacagaataaagtggatagtatgtaatgctggcccagtaaattaactaagcagctataacagtcataaacaagtaggcaccaaacatagaagctctctataaaagcttcaaaacacaagaaaagaattcaatgagggccaggtgcagtgactcacacctgtaatcccagcactttgggatgctgaggagggcggatcacctgatttcaggagttcaagaacagcctgtccaacatggtgaaaccctgtctctactaaaaatacaaaaattagccaggcatggtggctcacacctgtagtcccagccactcgggaggctgaggcaggagaatcacttgaatccgggaggcagaggttgcagtgagccgagattgtgccactgcactgcagcctgggcgacagagcaagactctgtctcaaagaaaaaaaaaagaatttgatgaaaatacagtaatattagatttgctgcatttgttttgtagatagatagacccaaaagatacagataaaggcatagggaattggactaacaaaatcag

SEQ ID NO: 194430 - DNA, 258 bp, Homo sapiens
catcccctgcatcctacaatgcacaggctggtcccaaatgtcaactgctgaggtggagaaacccgactttagccccattctgagattttgctttaatcagtgttgactgtggcctgtggtgcagcatttatagaaagaaatcttccaggtggtgctaacccctactcacgggcatgcagaactgaaccgctggggtggctaagcacagccagaagaggggagaggggctggagacgccaggaagagatcaagcacatt

SEQ ID NO: 194431 - DNA, 502 bp, Homo sapiens
atactgcttaatcagtggttttcaacttggctgtggataggaatcatgtggtgattacaaacagttatatagattctgaggcctcattatcacaaggtgcagagagagggcagacagatgtttaaaagtcaagctcctccagtggttttgatatgtaaccagagttgaggacatgcacagaatctttgtgatgtgaactgtggtctacagactagctgcactggcatcacctggaagcctgttggaaatgcagaatctgaagctcaggccagaactattaaatcagaatctgcattttagcagaatcccaggggactggcatgatcattaaattttgagaagcactgcagtgagaggctgtgctgtgcatgttctgacaatatcaactagaggaaggtggtgccatttccgaagagaatgtaagagccttgggtttagagaaaagacaaacttggtattgtgagataatctgttcagtgtaaacatttaaaatgtaccctta

SEQ ID NO: 194432 - DNA, 556 bp, Homo sapiens
ctgtcttacatgtgacgttgtctttcacccttaccacttctctcttccccatccacatggaattttagtgtaggcttgatgtggaatacataatcattcattagaaccaaagcagccttttcccataaggacagatgcaaatgatcaagattagcttgaaacccatgtctaatgctatcaagtttccaaataaaaagccaagcaatgaggttgtttaaattttttattagcaattttaatgttaattatagagtattcctgaaaggctactctgacctatttcttgcttaacatattaagccgtcaccagaacactaaagtatacagttttatgtaggctctgaaatccttgatttttatactcatataagattgtacactaacacaaataaagaaaaacactatggccataaagtagaaatggtaaacttagcgatatcccagattttttttgaatagaacttcaagatggatttctccatggtttaactatgagttctgattttcaagtgctctataaattttgagctcattaacatattgaacgtgtgtgcgt

SEQ ID NO: 194433 - DNA, 282 bp, Homo sapiens
agatgttccgtgtcaggtagttaatcaatgataggttgataagcatgacaataatcagctagctattcttatttaaatttctgttaaatataaggaaactacttaaatgtaaaatattctcaatcaaggacaagcagtaattattttcctaaaatgtgaagtactgtaactatttaagacaaaattaggatgtaaataggatttttctataaatagtatttctcaatattttttgaaggtctgacaaaggctaaagcaaggttagaatattctttttataat

SEQ ID NO: 194434 - DNA, 438 bp, Homo sapiens
tgcaagctcggtaccccaccactcctatagatcagtagagcaaagggctttctttctttgcttgactcaaagatgttctcacaacaagtacataaatggtttcttgtacacatccttaaatatctgctgagtgcctattaagatgttctcacaacaagtacataaatggtttcttgtacacatccttaaatatctgctgagtgcctattatgtgctacacatgatgctcattactatggatgcagctctgaaagagacagccaaaatctctttgctttcatataacatttatttcagagtctaatgcattcacacctagaaactaagtttaggagattattcataagaggaaaaactcaggcgactgatcatcagaatagaataatctttgcaatgacgttctccaaacagactgagctttaagtgagggagtgtttg

SEQ ID NO: 194435 - DNA, 353 bp, Homo sapiens
cactactaggctgtttcctccacatctgactgggtcattttatgccttctggttatggctttaaattgcgtatgaccccgcataagtcttctcagctccctgggccttggttacctctttgcggcactctaaaaagcaaagcagttggacaagagtctttgtaaaggcccttcgagctcattctagattttctaagtggggagattgctgtgaggcaccaggcagatgaggtgcagggtctgttgcctgacgtgctaggacagttcaaagaaaaagcactgtgtgatctgccatggccgcttctgcacctggtgctgaccccacatccggaagcattttggatgcttccagca

SEQ ID NO: 194436 - DNA, 367 bp, Homo sapiens
ctatcacaggaagactgactaccttgcccctgaacttggagttcaatcatttcacttactttgataaacagaaaattactacagtttgcatagagatttgagatggcttccatactggggattcttcttctttccatttaccataagagtatggcctatctagtacactgttcccagaagaagaatgagaaactaatgacgtgagattgctgccacctgatccagattaaattggcaaaactctaacgtcctccaagatgtagaatttggcccatctcaaatcaccacagccatccaccaaacccagcttagaaaaataaaatccaggcccagcgcaggcgaggttgaggaaggcagattacgaggt

SEQ ID NO: 194437 - DNA, 318 bp, Homo sapiens
gttcccagtgcatcataagaagttaaaatcactgtgtgctgaaagggtaaattaggtgtttaggttcctaagtttgtgttggtatcactagtctatggaacagaaatagtttccagggttggaagtcaacaagcatccattgaaattctctacttggtggcatattcttgctggagtctgtgtaatatcaacattgctttaaataattttccttaccttattttattttgactatttgagatttttaaattaacctattgactcatcctttttcttttgttgtctcaagctcttcggtttttgtcgctgtttttattg

SEQ ID NO: 194438 - DNA, 317 bp, Homo sapiens
tccaatactttgacacacttgaccttgtacacctcaggtccccatttttcactgtttcccctcaaccacaggacagcctgtaaacatttaaacatcttctctcccagcaaacatctgccatgagtccatcccaagagcaagctccaagctccaaacatataccaccctccacggcaaatcctgttatttctctcttttttttttttttttttttttggggtctctcaacttttaacacacaaagttaaaatcgtgtgtttctcccttgtttgtgagacacccccccccccccccccttaaacatctccattatctcg

SEQ ID NO: 194439 - DNA, 572 bp, Homo sapiens
ggagagggagggcaggtagggcaaaggggctgagcgggaggcccagagggccagacatgtggcccccaaggcagggagaatgctgggagctggtttctaccctgtcatttgtgtagttgaacagccagagaagagaagcagtgccagggttaaagaccccaaagtctcccaaccctgccacttcatctcacaagggagtaacgtgcccaaaagcacactgcaaaggaccgagctgggagtgagacttgggtttctagcctcctacttgaagaatcttcaaagatggcagtgtttggcaagattagagaccatgtcagtgcttggagggaatgtttagaaaacccccaaaggggctctccagttcctgtggtggtgagacttggtctgctcaactgagactaaactggcaggggtgtttatggcacagcatgtatgaaaagcacctaattcagtgtctggcaccaaatgggctcagccacacgcgtgtgtggggagctgaccaacagattttccctgtggtaaaataggcagaaccaccaaacagtctgtgcttgtgtggccactcaagtggg

SEQ ID NO: 194440 - DNA, 428 bp, Homo sapiens
gtggacagcttcttgcctccaggtgttttcatttcagccgctcagtcctatcccttgctcccaaatattgtcttacaagagagtagtagccagcgctccacttccttcagcccagagtggccagaaatgatccctgaccaacgcagctgagacccaggagccaaagctgggaccttgagtcacagtgaggcctgcaagaactatacagaggtgacctgaggacaggacacagtgctctgacctcaggtggcagaaaggacaatgggcccgggtttgagttgactgagcttgcacggctaattcatggtgaagccaggcttgggcacgagcccagtctttttctgctgtgcctttccagacttgaggcctcactggccttgactcccacgctctgtcctgtgccttgggagaggagcaggttttgaagg

SEQ ID NO: 194441 - DNA, 136 bp, Homo sapiens
gtatgtcaacgctggggtgatatactggtaagccaggttcctgggtgtagaaagaaatacatgcagtgcagactcatcttcgcagtgtagcttgtgctgtttgttttgttcatttaaaggctgcaggaatttacct

SEQ ID NO: 194442 - DNA, 128 bp, Homo sapiens
cactatgcccagctccttatggttttaatttgtaattctctgataattattgatgttgaacattttgtcatatattttttggcaattttttttcttcttttaaaaattttgtttttagccataaggcc

SEQ ID NO: 194443 - DNA, 448 bp, Homo sapiens
atgagggactggagaaactggtaaaagggctgatggtaaatattgaatttaaagaggcccctccccaaatacttatttatttattttgcatggctaaagaagctgtatgttcttcattttaaataggtctcacaaatttccaaaaggaaaaatacagtagaaggtacaacctggggctgggcacagtgccttacacctgtaatcccagcactttggaatgctgaggcaggcagatcacttgaacctaggtgttcaagaccagcctggacatgacaaaaccccatctctacaaaaattagccaggtgcagtggcatgcgcctttagtcccagctgcttcggaggctcaaggaggagaatcacttgagcctgggaggcagaggttgcagtgagccgagatcctgccattgcacttcagcctgggtgatgggagtaaaaccctgtctcaaa

SEQ ID NO: 194444 - DNA, 262 bp, Homo sapiens
aaagtgggaaggggcgggcgagggcggaggaaggcgatcctgagccttctccgcacccccgggaccgaaggcttgggggagagggagggaggaggaggctgagtgtcctagagcggctgaggccggaggcctggtgtccccagcctaagcagagggccccgggggccgggtgggtgggggtctgtctggacgaattgttctgtgtgtgaggtctgagctctgaggcagcagtgttagcacaataaagaaacattgagacgtg

SEQ ID NO: 194445 - DNA, 355 bp, Homo sapiens
ttgtggctattcttgatgtagcttctatgaatattcttgtacaagttttttgtggacatatgttttcatttcttttggggaaatgaaaaaggggaatgctagtttaactttataagggactgctaattttccaaagtggttgtaccattttatgctgccaccagcaatgtgtgagttttccagttgctctatatcttgtaattatttaaagttgtcagtcttttcaattttggccattttaatgggtatgaaaaggtatcttgcatagttttgatttacatttttctgatgactaaatgatgttgagcaccttttcatgggcttattagccattcatacatcttttgtgaagtgt

SEQ ID NO: 194446 - DNA, 159 bp, Homo sapiens
actcccgggggagcccgggagtaccaggttgtctaaggagggggggaccaggcccaggccggacacggagcaggtcaaactccccgtgttgggcgacggtgggaccgcgcctgcgagcaacgcctgcagttccgcccgggacatccgacgagacccggt

SEQ ID NO: 194447 - DNA, 508 bp, Homo sapiens
gctgggattacaggcatgtgccaccacacctggctaattttgtatttttagtagagacagggtttcaccatattggccaggctggtctggaacccctgacctcaggtgatccgcctcggcctcccaaagtgctgggattataggcatgagccactgcgcccggcccctggccctttcttgagctgctgcaaagccagcaaaccccttactaggctcctggaagggggatgagagccccagaccattcagccttagctcagccttgaaaatagctgcttgcttcctggcccagggaaacggacatgctgcccggaggataggagagttggctgatggcgagtgagcgtgggttagtcgatgctagtgtttgtttacatgcctgggttacctggaagatcatgacacatgcagtcacttggttgttttgagaacgggccagagtgacaaagtgttcagttgccactgtggtcaagccataggaaatgagggtattcctagctgtgcctgt

SEQ ID NO: 194448 - DNA, 470 bp, Homo sapiens
aagaaaggagggggaaaaagagcctctggctgcccctaagctgtctgttaggaaaattcgctgatctcagtgtatgtcaagagagcactcggaagacaccaaaatttcaggtgccattactcctttgttttgcacttgttttcctcatagtttgtgtattcctaaagcaggcagatgatataaaccactgggagagatggcccaaagcacaggtcatgggtcagagatggaagggattctggaagtaaccattactgtctagagagtgaattcataccctggggagtcaggattctataagtagattggtggggaattgatttagaggttttatttgacacgactttggggtttgagggtcactctggtggcagtataggaaatagcttgaaggatgagtagcactaaagagttcaaacagaaaacaggacccgtgtatttggcaggaccacagtcttggctcctgatca

SEQ ID NO: 194449 - DNA, 259 bp, Homo sapiens
actctagaatgcttaaaactagagagaatgcttgcatagagataataattttgaagagaattccagagggaaggagaaatggagtttgaggaaaaggattaggattctggtgatagacatctaaataatccaatggactggaagctccacaagggcaggaactctgacagtcttgtttattgcttgtccccagttcctagtgcaatgtcttgcatgtaatgagcacttcaacatgcttatgaataaatgaaagggaagg

SEQ ID NO: 194450 - DNA, 571 bp, Homo sapiens
taattcagaatgtactgagtacaacacatatgccttctatgtgataagctcccagcattatttattcaaagaaaacttgccttgttgcaaaaatataaaaaaacttaaaaaaaaaaaacaagtaattacacaacacaccacctcctacaacaccagattccttttctttcctttgtaacctgaccagaagaaaaacaaaacattgttcaaattgctgagacccacaaagttcaattagagcataaaaaaatgctctcccaaaatatagctactagcagggaaatgagcaggctaagcctcctggtgaacctggacattgggcacaagtaacaggcacatttagacaccaacgaccagattccacatgactgaatccagaaaccctgccccttcccattcccttggagatccagggggacgccatcaattgctcactccttctccttacacatacagttaggggtgctatactatacaggggaaggcgtgaggaagtcacacatgctttggtgttcaagaagctcataaagccattagggaaagagcaacatgccagaaagcagttgtctct

SEQ ID NO: 194451 - DNA, 238 bp, Homo sapiens
agcttgcagcaagctgagattgcgccagtgcactccagcctgggcgacagagcgagactccgtctaaaaaaaaaataaaaataaaaataaaaataaagacaaagataaaaaatagtcaactgaaattgaaaacgctaatcaacatattttttctcagtttctgtgaaatgtatattacattagctatttgtctttgtactgacaccaagacatcagtcattagtaataatggaaacag

SEQ ID NO: 194452 - DNA, 457 bp, Homo sapiens
attccagggctctctcccatcaagatactatattaaagttacttttcccattccaagtgtacttattacacatatagttatatactttgaaaaactactacacaaatgcaagcatcctatacatgctgttctgtatcattacttttcagtttatagtatatcctggaactcttcccaaagcacagaaagatttactttattatttttactattattttaaaatacagagacaaggtctcactctgtcactcaggctgaagtgcagtgctgcaatcatagctcattcgaacctaaaactcctggactacagatcttcctggctcaggctcccaagtgtttggattacaggtgtgaaccattgcactcagcttgcactaggctatctcactctttttagtgtaacagagaattccatcatgtgaatgtttcattctttatttagctactctactgatgg

SEQ ID NO: 194453 - DNA, 210 bp, Homo sapiens
tgcaaaacagacttgattcttagagcttcaagatagctgctatgaaaattataatgggctgtgacaataccattttcagcccgtccagttctgcaccaaacctagtttcagaaggacaacactactgcttgagttgaggtttcagccaagtagcatcaaaggaaagcaagtttgtggtttgcagttctgctgagctgcactcagtgactc

SEQ ID NO: 194454 - DNA, 166 bp, Homo sapiens
ttaaagtttttgagccattcaatgttgatcaaaaaaaaaggtttaagatgaaaaagcacatcgttctggcatttgctttctgaagtagaagtaaaatattgtttctctattaagattgctagagcttgatgtcattggttttctggtttatgtatgtttttgttat

SEQ ID NO: 194455 - DNA, 873 bp, Homo sapiens
ttgggtagtgggctaggagcatccctgctctagtggcccctgattctgcaaccctaggactcctctgcttcctcatcagacacaaaccttgataagacagctccagtgagaaagccctgggagaaggtgaattaaggacacttcctttgtaggaggagctgatctcgctaatgggcgactttttaactaagcaggtcagaaaatcttactgaaagtaaatctgtggctcaaagagacttcggtattcttttccctagtactaactgtggaaaggagtgcccccaagcttctgactgtcatacctcattccactgccttttagggctgggtctgaagagcttacactcctgctttcagagctggttgacgggggtgctgttctagaatcctaacccagactggcaccatgaatgatgggttgccccactgccaagctccagacccagcttggcttggggcttgctgccactgcaggtcaaatgaccaccctatgtggaaagatgcagcagtgctgcctgtcccatactggccgtgacccttgagcctcagaaagggagacatggacaattttccccacaggtagtcttagctttccaaacatactctgactcaccagtcaaccagtggatgaccacagttcttgtatttatgggaggtatcaataaaccactctttgtgatcacagtcaagggagaaatcaagaagagggaagtgtaatctgtgaccagatatacccggcacctgcagaatcagatgccagcctaacagctgtcagctgtgcatgaggcaacatgcatctcttgattaggaatgtgcaccagtgacacctaggctcacctttcactgacgctttacctctgaggtgccaccagt

SEQ ID NO: 194456 - DNA, 268 bp, Homo sapiens
ttaggtgaagaaactgaagtttcaggaaatttaaatagtttgattcttcctgtttccttgccacttttccctaaattccagacgaaacccttcagtgacacccctaaaattcatctcaaacatgtctacttctctctctccagccaccaccctagtctaagccaccatcatttcttacttaaatgacttcaatatcttcgtagctggatcttctcttccatcttactctctctatactccagagagagacagagagacgcagcagcca

SEQ ID NO: 194457 - DNA, 512 bp, Homo sapiens
cttcaaacaaataaccttatactaataatcagtacaacccttctactaattaccattctaatcctaggcctaatttatgaatgaacccaaaaaggattagattgagttgaactggtaaatagtttaaattaaatgatttcgactcattagattatgatagaccatatttaccaaatgccatttatttatattaacattatattagcatataccatagcactgctgggagtactaatctatcgatcccacctaataccatctctattatgcctagaaggcatcatactatcaatatttatcataaatacactcataattttaaacatgcatttcactctaggattcataatacccattatcctcttagtatttgctgcctgcaaagccgcagtaggccttgctttcctagtctcaatctccaacgcataaggcctagactatgtacaaaatctaaatttactccaatgccaaaaattattattccaacaattatactgttacaatataactct

SEQ ID NO: 194458 - DNA, 615 bp, Homo sapiens
cctctttcttgctctcctggctctgacactctaggtcaccacaataacaactccggaaacctaaagacttgtggttcagccatctgcacttcaggcatggcagctccgcagctctctccagcctcgcagaggctggttctttgttgaaatccatatcaaatcctgcaaaggttttccttcaagccagcagtctagggttgcagaacttttctactatggatgagtggttgaaaacataaaggttcttaaaagcaagcgtttaaatcacacaaaacccccaaagaagaaacggattaaaacacctgaatttaactgatttttttttctttttggtaaagcaatggcttcaagtgctaccgtttaaactccattaaatcccacagctctggagtactttggatctaatggtgatatttacattttttatttaaacacaccctacttcagatgcagatggagatctgatttgtctttcctgaaggctgtccctccctagacggtaatttgctttgtaatgactttcatttcactaaagagcccattccccctctccggggcttggggttggagataacaaaagagctctgggaggtaataattacagtcattagttca

SEQ ID NO: 194459 - DNA, 370 bp, Homo sapiens
tttgggcaggcaagtcagacagggtcctgtgtcgcagagatcagcatggacgcacctgcagtggatgtgggcacagagaggtgacaccttcccccagggactcaggaagccatacgggctggtctgaggcagaacagtggaaagacagatgggtgggtagtggcgaccatggcaactccagacgtgacccatccccatggtttatgggccggacacgcaccccgctcagctgaggccccatcatttgtctctcttagtgtgtgtgcctatgctttgggggtagtgggtggaggagggaggggctgtgctaggcagttgacaggaaggggaatgggaccggaaggggcctaagagggggaagggttaggat

SEQ ID NO: 194460 - DNA, 413 bp, Homo sapiens
ttttgcagcatcatattggtatggaagacctcagcaagataaggcctgtagggaaaccctgaacttcatgacagagcacacaggtcacctttggaagcagccacattcagatggggagggctgatgtcagattatagaatgggaaggaatgtgggaagtcaggactgggagtgtacgtaagtctttcatctactaccatttcttccctaacccacaacagctaacatttatctaggctgtagtacatgccaggccctttgcgtacacatttaatcctcacaaccaccccacagggtgggctacagggactaagctcagtgcttgtattaccaccagattatgttcacctccgaccacatgcagagaacccctactgaaacaccgaaacgggaatgaatgtttagctattacat

SEQ ID NO: 194461 - DNA, 469 bp, Homo sapiens
tataaaaaggttaaaagaaaagaaacatttagtaacccactattaaaatccacgaaagtaaccaggaggtaaaattaggttaaaatatgcaatattgtttccaacatgatgacacattatcatttacttaatacaatatttaaaaccaattcaataagttatagatacctgataaaaaattcatcaaaaattttttctaataccacattttaaaaaacaacaggtaccagcagttcagatgaaatattttcaaaaatattttatcttgtttctttgtaataaaaatcaataatcaattccttaatgcaatgaagtaataaaaaattttcacatcatcttaaaattagctaaggacattaaaatgataagccctatgaagagtaaatctggcaatcaaaaagttatccattttaaagtttttctaatgttcctttgattacatataaacaaaacaagtcctccggttgta

SEQ ID NO: 194462 - DNA, 466 bp, Homo sapiens
aaagtcatattttgcagtcatcacagtaataactgattcagacaagaatcatcaatgaacactaaaactagtgggtgaaagacgagatgataacatagtctcaaagatcttcccacaaattgcttattaatttcaaagccaaaatagcaattttttagtggaaaaacctaggagacaccagttcacacaagttatcaacgctaacgccaacaaaacacatcatgtgtttcctattgtgatgcactgacaagtatgcattagtcatgcaatactcaatctacaaacatttaacttgaatctaatcatgaggagtcaaactcaaatttagggttgttctacaaaatagcttgttgtcttcaaaatgctcatttcatgaaagacaaaaaatggctatggaactgatccaggttgaagactaaagaaacatgacaatgaaatgcaggcatgatacattttagattggacc

SEQ ID NO: 194463 - DNA, 134 bp, Homo sapiens
gcggaaggaggagccagcatatgacatggcaagagagagagaaaaggacagaagggagaggtcccagagtcctttaaacaaccagatcttgggtgcgttaactgagtgaaaactcactcaccatcaaagggaca

SEQ ID NO: 194464 - DNA, 528 bp, Homo sapiens
actccctgtgtgaagccgaggaccgctaccgcacagagctggcccagatgcagagcctcatcaacaatgtggaggaacagctgtctgagatccgggctgacctggagcggcagaaccaggagtaccaggtgctgctggatgtgaaggcccggctgcagaatgagattgccacataccggaaccttctggagagtgaggactgcaagtacgtaccctgttgtctatgtcaacaccgtgtgcaaaaacagataacttctcttgggaatgacctaaaaggagctctggaggccaggtgggggtggcattgcagatcccatctttggagacaaacttgctaccactaggcctggtgagctaatgcctgcctaggcgtaggtgtgggcgtacaggagttttcaggtcatggcatttgttttgcggaccacgttgtgctcccagttgctgggtactcccatagagggcgtaaaatactgaatgctcagcacattcaggttttgctaattctctccaggagaagtattccaataa

SEQ ID NO: 194465 - DNA, 493 bp, Homo sapiens
actccctgtgtgaagccgaggaccgctaccgcacagagctggcccagatgcagagcctcatcaacaatgtggaggaacagctgtctgagatccgggctgacctggagcggcagaaccaggagtaccaggtgctgctggatgtgaaggcccggctgcagaatgagattgccacataccggaaccttctggagagtgaggactgcaaaaacggcaggtggaccaggacatgagtatgtttatgggcctgcagaattatgtgacacaaaagaatgtcatcggatggatcaacacctcaattaatgagggcagatacttgggctggactgtgtagcctctttgaaggcctaccacagaactctgatttcatgggtggactgtctgcggaggagtcctgacttagcaagaagcccaagtaaagaattttatgggagaagggactcttcagaggaaggcaaataacagactgaaggaaagggcgtttgaaaagaagtga

SEQ ID NO: 194466 - DNA, 297 bp, Homo sapiens
ctgtcttctggttgccttcattttcttggtgaattaggaccccgacagaggcaagagaggaggtggtgcaggtttgaagatccagggagaagttgtgaaatttgcataatctcagagagcggggagtgaaaggaacagaaagacacagagattggagtgatgcagccacaggcccggagcaccaaggattgttggcagccaccagaagctagaaggaggcacaggaggaccctccctgagaggcttcagagagagcgtggccttgctgactcctggattgtggacttccagcctcca

SEQ ID NO: 194467 - DNA, 427 bp, Homo sapiens
agatgccaacaaggccaagccagtaatataagtgatagctaacttttcatttattcagcattttctgtgcactattttaatttcaccctcataactctatacggtaggcactgctatatccccattttacagctaaggaaattgaggcacagagagataaagagacttgtccacaatcaggcagctagttaagtagcagagccaggatttgaacccagctctcctggcttccgacgacctcacacttcactgctacactacgctgccttctccaaggggcctcctcactctgatggctgctgccgccacctcccttcctgggcatctgcccctctcagcaggcagagttgttctacacctccaagtgcataacctttcatatctgtcaagtatctacttcaatgaagttatcttggccacaaagttt

SEQ ID NO: 194468 - DNA, 639 bp, Homo sapiens
catgtacaaatgttaaggcatggtttaataaagctcaatatgcataaactctgctttttgcttcacataaagatgttacagaaaaaaaacaatttcctaacctgtaagtacagaatccagtagaggttgaggaaccttttccaaaaaatccaaaatttcagattttggattttttcaaattttggaatattttcaaataaataatgagatatcttagaaatcttgagtctaaatgtgagagccaagtctaaacatgaaattcatttaactttcacatataccttatatatgcatatagtctgaaggtaattttaaacaatatttttaattaataagtttgtgcctgaaacaaagttgtgactgtattttgaatgcaactcgtcacatgaagtcatgtgtggattttccactttgataccatgctggcagccaaaaagccgtacattttgaagtgttttttggagctccaattttcagattagggacgcttaacctgtaatgtcactcaccaagggctaaagatccatcccgttatcctactagattttagcatgctattttccatctcagctttctgtcatcatcttacttcgatatgttctcattctctcatcattttgttttcaacagctcttcaac

SEQ ID NO: 194469 - DNA, 527 bp, Homo sapiens
ccagaagctgattaagtaaaatatggtcactggaagtgaactctaaacatagcctaagaggagaacttttctctcaacactaaaactcataaaaacacgtaagcaagtgtgtcggtcagtcactcccttaaacacaggtgtctggcaagatagtgagaaatcatcccacgtctaacgtccatgggcacagactcctgtttgcttcagaatccaggagatgctggcatttggccaggtaggccttcttttctctcaactcccttttaatctcatctccttcagtgatgatcattctcaaagaattatttcaagagacactatctttgagaagaagaattatttcaagttttaatttctagctcatctacaaatccacgactttttgaaatcaaagctctccaaaactctgacacctacaatgtgcttctttcctctaagtttgatggctattacctaggagacatgcatgccttccctggtagtttagagacaaagtttggaatatgatgtgctcagaaaaggggtca

SEQ ID NO: 194470 - DNA, 545 bp, Homo sapiens
gacgccccccagccactgcacctttcccttcctgcgggtggggagactgaggccctttggctaagacgggttggggagcagaaccagggcctgcctccagttggccttgtggcctcagggaactcgttcccttcccgagcctctgtttctgcatttgtataatggggctggtaggacctccgagtaaaaaggccggacacagtgggggtgctctggagaggctgtggctgggatgggcgtggggagcccgcactctgctcccattgctaccctcacagcctctgcaggggctttgagcagccagcaccttcactccagcctgtttcctgatctggcgggcacacagtgcaatgtgaaagcaggtgtgcgtgcacacccacacccgcatgcccacacatccatacagtccacaccatcacacacacacacccacacacatgcatacagttcataccatcacacacacccgcacacatccatacagtccacaccatcacacacacacccgcacacatgcatacagtgcacaccgtgtcacacacaca

SEQ ID NO: 194471 - DNA, 160 bp, Homo sapiens
aaactgcacactttcccatgtatggagagtggaggacaggtcttatgtcttactttgtcttatttgatcactttcttagagattcaagattctcctaacttatcaggtttttttctccaaaacacctttccccccaattcactaaattatatccatattt

SEQ ID NO: 194472 - DNA, 223 bp, Homo sapiens
accgtaaaatttttaaagttgaaccaaataatctgttaattctttcaagttcaatattctattgacccttttttcagaacacatccaagtcgctcacaactcccattcaaattgtaaaacaattaagatttagaattaggagactgggggcaaaagtgaaatacacagatggtcaaaagacctggactgtaatccccgccatccctttctacctgcgtgactt

SEQ ID NO: 194473 - DNA, 398 bp, Homo sapiens
cttatttcacttagcataatgtcttcagtgcttatccatgttgtagcatattgcacaatttctttcctaaggctgaacaatattccattttatgtattacaacatttttttaatccattcatccatcaatggacacttgggttgcttctacctttttgtcattgtgaataatgctgccatgaaaaagggtgtacaactacctctttgagaccctgctttcacttctttggtacatacccagaggtagaattgctggattatatgataatgctatgttagtttttttgaggaaccaccatactgcttcccatagtgactacaacatacttccaccagcaggtgcacaaggaaaggttccaatttctctacgtcttcagaaacacttgttattttatgtg

SEQ ID NO: 194474 - DNA, 488 bp, Homo sapiens
  misc_feature (402)..(402): n is a, c, g, or t
  misc_feature (410)..(410): n is a, c, g, or t
gactctagagtatccccacctgctacccctcatataaattaatctctatgacaaactggctgatgagatgcagaggatgaagggcagtgatggcaagggaggagtgtaggatggctttctatttctgacttgctgaccaagtagagggtggtgtcaacatctggggtaagtcatgaagcaagaggagcagattttggaaggagggggagtagaagaaagattctcttttaaaagttgtgattttgagatgcccttaggaaatcttgccaacaatgcccaagtagtcatttggctccagagatctagtattatagctggagacatgggtttgagttaatggatgtatgaatcgttagaatatagatgtctacctaaaccaatgggttatgggaaggacccacntgggtaangactaagtatatgagaagaggagtggttgaagatggagcactgggtcacatcagcattatggggacagatggaggagg

SEQ ID NO: 194475 - DNA, 138 bp, Homo sapiens
tgtaatgggtatggcaaaaggtagtgcccagacaggacagcatggtgaatatcacctgggaacttgggagaaatgcatattctgagccccacttcctttcttaatagactagggcccagcaacctgtgttttcacaag

SEQ ID NO: 194476 - DNA, 292 bp, Homo sapiens
aaatggaggcgagaacatattaaagaaaagatagaaataaagtttcccatagctcaatggaagacattaatctataaaccaagaagtttccttgagtgtatattgtaataagtgcaaaaaggattctcaagtatgtcatcgaaaacatgtaaatacctaaaataatgagatgctcctaaaagtttttaaagggaaacaggaggaataaaactagtacttgacttctcatcaacaacaatggagcagagctttcaaatttcgaaaggaaaactcttttcaacctagaattcta

SEQ ID NO: 194477 - DNA, 222 bp, Homo sapiens
gctgggtcttagtgaggtggaccccagctttgcctgccagctctgcaattcacttcctagatcatttgttcccctgggacacaaactactagtttgtcactggaacttctctgggcctgtctcagaatgggattaacataaaggagtggaactgttcagcagaggcagggagaaataagtaagttccctcctcctcagcttctctttccaacctccccttgc

SEQ ID NO: 194478 - DNA, 114 bp, Homo sapiens
actatgagcacttatgaaattagcttgtataatcttactgcccatccacacaacatggttatagtcaatagtattatctttctcagtgtttacctttgaactccttatacttct

SEQ ID NO: 194479 - DNA, 176 bp, Homo sapiens
tgaactgtgtccagctggcaggatttttgattgccaagatgaccagctgctttcaaggagagcagaattcaaacggtgattaatgaagtgatagggaggagactgagaaagagtacatgaaattgtactctgtaacccagggctatgctgagactagagggaggatttcttgggta

SEQ ID NO: 194480 - DNA, 204 bp, Homo sapiens
aatatcatctccaacattttcaatagcggcagttaacatttattaaccttactttgtgccaacccttgtatttcagcactttttaggctttacctttgctaatcctcacgacaacattaggaagtattattattgtccagatgaggaagctgaagttcagagacattaagtaatttgcccaaggtcacagtgctggtgagaaat

SEQ ID NO: 194481 - DNA, 238 bp, Homo sapiens
gagaaaagatgcaagacatttctaccgtgggctgagcgctgcctggagggcagggaggaaggggtgagcggaccgcgctgggatgtgggtgcctggaactgccaatctctccgttttccccttggctcctaaaggtctcttagcagcatttcctgcacgctggcaccccctgtcctcctaacgttttactgcctgcgtgtttctctgtgcttccccaccctccgacccacagggcccg

SEQ ID NO: 194482 - DNA, 419 bp, Homo sapiens
aatgggctagattccactgctgaagatgaagaaagatgcttggcaaacagtttccaaaatgctacagctttatatcaactgagactagggaatcaacaactgcgacttagaaatgcaaaagtgaatttgtataccttggataagctgaagaataacttccaggggacaataataatagatttcctgctaaacaaatcatgacacctttgtacatagcattgaaaagtgtaccgtgaaaggcaaaaaaaggaaatctcacaggtcaagaaatccttgtatagagaaaaagtaactgccttagctaacagtgagcaaaggagtcactaataataacacgatagcatgactactaatatattagtcattatttgacagcccatgggggcctcacctatttctccaaacacaatatacatagt

SEQ ID NO: 194483 - DNA, 134 bp, Homo sapiens
acaatctttcacccaatcatagggggacaagcccattaacggtggcttaacatccactgatgattttgaattatttcctgtggggattgcaaaatagctatttttccaattctatcattcttctatcagcttgg

SEQ ID NO: 194484 - DNA, 402 bp, Homo sapiens
tttgagtgtccatagagatgacgggaacacagccacctcatctgtttacatcatctgtgcctgctttcctgccacaaccagagttcagtagttgcaacagagacctatggcctctaggagtctaaaatatttactatctggtcctttacagaaaaagttagctgacacagttctagtgcaaagagcacctaatttctgcaaataaaagtagactaatcagcaagggtttgttcttttcatttttcatctagaagtgtcagagaggcaatgagagctttttctttccttaacactgggtctgtatagaaacgtaagagaaactcacaagaagtaactcggagccattcaagacagagaaacctaaagaatggagaaaaggtgagttttgctatcgtcatctga

SEQ ID NO: 194485 - DNA, 122 bp, Homo sapiens
aaaaagcttgcagaatggtctgacgtgtgagaaaaagtggtttcacttaaatttcatttcatttttcccaacaacccattgtcttaatacctgtgctctgaatgttcaaaagaatgaaaaag

SEQ ID NO: 194486 - DNA, 230 bp, Homo sapiens
cttggctgcctgcatgaggcctgtcccatcagacagtctgcagaccaaggaaatgtgagcggcagtgtccagactcatccaagactgagttgtgaccaagacagctactgtattagttaagatgtggagaaaaccacccttgaatcatgttgcagcaacatcaaggtaggacctcatgcttggtaaaatccctacctgggaaaccaagatctgaatgacagcaagaccag

SEQ ID NO: 194487 - DNA, 531 bp, Homo sapiens
cacaacaatatgcctctgagacttaactatattgttgcatatggcagtaatctattcttttgcattactgttgaatatctctttgtatgaatataccacaataattttatctacctttaccatccacaaggacataataatatccttagattttcttctaaaaggtgtgttatattttatatttcatatggaattgatatttttgtatgatggagggccaagattatctcttgttcttgtatgaatagccaagtgatccagtgttatttactgagaagacccccatttctccactgctcaggactgctacctttgtcataaatcaagtactcatgtaagtatgagtacgtttttgtgtctctattctgttttattaatctgtttgtgtctctttggtaaaaaataggatctcagctgagtgcactggctcatgcctataatctcaacatactgggaagctgaggtggaagaattgtttgaggccgggagtttgggacccacctggacaaactacagaaaccccacctctag

SEQ ID NO: 194488 - DNA, 526 bp, Homo sapiens
gtcctaccttggcctcccaaagcactgggattacaggtgtaagccaccgtgactggccccgttctatttttcactttcagtacagtgttcaatgagttacatgaggtactaaacacttcattgtaaaagaagctttgttttgcccagctgtaggctaatgtaggtgttctgagcatgtttaaggtagggtaggttaagctatgatgttcagcaggttatatgtcataaatatatcttcaacttaggatattttctacttaggatgggttttccaagatgttaaccccatccattgtgttaataagttgaggagtttatctgtgtgtgtatgcatcatggtgtcctttagcaaatacagtcttagcagtggaaattgctggcagtatgatagggacacttgaaaattgcatagataattgccaacttgaaggcagagggtggtgctctttgcatctcagagcctagcaaaggtaggtagttgctcaacaaacggactaatgttctaatgcaaatgctgaatgctcca

SEQ ID NO: 194489 - DNA, 543 bp, Homo sapiens
ttagattagatcagtgaatttttaaacttatgctctagaagccctaggattctgggtagaaatgaagctccaatgattgagtgtggggtgggcagtggggactctgggcccttcaaaccaagcagctctgctattcgcttgttaaaatttagagttttataaactgtttcacttaaagaaaggttctactgcttaacctgcctacctgttggcatcactgtcttaagtgatctagagtcagtggcttatttcccacaaggattcagtgggcaactgtggcaatagttcttggctaacctggtcactatggaagttctttccgtggaaaaagattctccatccttcaatttgagataagatttactaattgagacctcatttgtttctgattttaatctttgcatcattttagttttaataaactaactttccaacttaccagattttcgggttgacaaagaccattatttagagaaacacaggcaaaggaaagtctaaaagctttggctggaatttcaactgcttctggtcaagaatatgaat

SEQ ID NO: 194490 - DNA, 574 bp, Homo sapiens
  misc_feature (59)..(59): n is a, c, g, or t
tgtctgcagttcactagaacacatttcaccctacctggtgaaaaaatagaggcacaggncaggtggagctctccccgaagtcagccgcgctctagagacagcaaggagggcaggcacagccgatggggctgggaagtcgattccatcttccgacctgccagcatcatgatttcataacaggcacagaatgcctcagaacgcagattgagcacagtggctcatgcctgtaatcccagcacattgggagtctaaggtgggaggatcacttgagctcaggagtttgcctagcctgggcaacttagggagatcctgcctctacaaaaaataaaaaattatccaagtgtggtggttgcacacctgtagtcccaactacttcggagggttgcaggagtccaggaggtcaaggctgccgtgaggtgtgattgagccactgcactcctacctgggtgatatagtgagactctgtctctaaaataaaataaaataaaataaatgacagtggtccatatagtaccttattcagaaaaggcttgatgtacaagaaaataagttatttgtgatcaggacagagaag

SEQ ID NO: 194491 - DNA, 300 bp, Homo sapiens
gaatccggtctcagggattcgttgactgtggatggggcgggttaaggggtctcgagtcccggcgatctctttcctctgggattttttacatgaaagagtgcccacctcacgtcctgaagctcctatgtcgtacggttgggtctcaatggtccccagtgccctgccagctcgcacaggcctgccctctggtttctgatgacccctctttaaaggtgtcactctcctttgatggtcacctgtgcttaggtggctacactgccctcgtcaagcccaggcagccttgctgacgccactgttcac

SEQ ID NO: 194492 - DNA, 314 bp, Homo sapiens
gtgggaaaaggaaaagggctgttttcttacacttgataatgaaacaaaatggagtttgaagcccagcagagcccttcaggaaagctggccagggctgtgtgggaggagatcctcacgtcagtacgatgagagcaagagagagtggcaagatggattgcgtccagagctgggcgagcagcaaacaggaagggagcagtgaggggatgcaccacaccgtggcctggcaccaggccctccctggtgacattgggaaagtaggtcagtttcagagctggctgggggatgaatggtcagccaggagcaagtggtgggaa

SEQ ID NO: 194493 - DNA, 350 bp, Homo sapiens
actgctcactgacagagaccggaaaacccaacactgaccaatgttggagaggatttagggaatgaaccaaaggggttcatacaggatctatcttcctaatgactatcaacaaatatgaatgcacctaccatgttctaggcatggttccaagtactgggattcagtgagatgaggcttctgccctcatggggcttaaatgctcctctgaagaagatggaggacaaagagataaagcaacaaaaagttaacttcacagagagaactctgggggagaagctgttctaaggttggggaagagggagggggcttcgattcggggtgcctccacaaggacacttggttgtcaggga

SEQ ID NO: 194494 - DNA, 538 bp, Homo sapiens
agatatttttcagacatagaaaagttaaaagtaatatattatcagcaaacctggactatgagaacagtgtaaaagcctttcaggaagaaggaaaataaagaataatatctttgtgcagatagaaacatggatccacacaaagaaatgaagagcactggcaatagtaacaccataagtaaatatacaatacctgcccttattacttaaatatcttttaaagataattggctgtttagaaataatagcagtgtcatgtgagttctgcagcatgagtaaaagtaaaatatatgacaacaataacctagagtaaatggaaatatagtttagtttgtaaggttcttagactgtgtgtaaagtcgtataatgcctattaaaagttggctattacaagttatctttaagttaaaacatctgtatggtgtaatccctaaagcaaatgctagagtaacaaaaacagtgataatattacaatattatcccccaccatacccaaatattaatcacatacacagaatagttagcagtgtattactttcca

SEQ ID NO: 194495 - DNA, 279 bp, Homo sapiens
ttctccattcgatctcagagatttctacttttgagcctttgctgctttttctgctgtgctgttttctctcgttagatctatgctttcatacatctctcccttgaatccttctataatcatcccaactagccgactcttagaaatttatctttacattagagcaattaggtcatttactctttcattcaaaaattatcttgttcaacaattcccacatggcagccgcaggtgctggttatgctggtgattcaggtatttaagggcatatcttcgtctctc

SEQ ID NO: 194496 - DNA, 582 bp, Homo sapiens
tgctgagattacaggcgtgagccaccgctccaggccctgtataccttctttttctataatcgatattactatttttttgtttgtttctttttggctccagtttggtattatgcctattcttgcattttagacagatttattgagataatacttacatactgtacaattcactcaaaagagtttttttttaatgtatccacagaattgtgcaactattttcacaatctatactagaacatttgcatctcccctaaggaagccctgtacccattagcagtcagtccccatttcctctctctcatctaccccttctcagccttaagtatctgctgatctactttctatttctatacgtttgcctattttggacatttcttgtaaatgaaattatacaatgtgtggtggtttgtcactggcttctttcacttagcatatttttaagggtcatcgatgttgaagcatgtgcctgtacttcatgtttttaaattgccaagtaatatgctattgtatatgtttacctttctgacaactactctcttgtgtttccaagcagctgcacgattttacatttttactaacaac

SEQ ID NO: 194497 - DNA, 571 bp, Homo sapiens
ttcagacatcagaagagactttaaacatttccttccacaagggttctgtaactacctgttaatcttccctcagattccccaactcaccaaaacagtaagcagccaaaagtgaaatttcttaaaaaccaaataaaaatatcttcccaaaaggtcagctctgttactttaaaaagcctaactgcaactattacaatgcatgggtttgcaaccactgcaaatctgtatgctcaacttttactactctaaaatctgcttgaagtcattaactcaagcgtgcccacttccaggttgtggtacagctgcatgatcagggctcactgcagcctctacctcataggttcaaacgatccttctgcctcaacctgagtagctgggacaccactggcgtgagccacagtgcccagctcccacctaaagattttcagttccaaaaacttgagactagtttctgagtaattaatctccaagacactttaaaatatgacatacaaccataattaagtttctattttcataacatcgcacctccaggaaaagagctctgacttctaagcaaaaagataaaacaaaa

SEQ ID NO: 194498 - DNA, 958 bp, Homo sapiens
  misc_feature (732)..(732): n is a, c, g, or t
tgagacggagtcttactctgtcgcccaggctggagtgcagtggtgcgatctcactgcaacctctgcctcccgggttcaagcgattctcctgcctcagcctcccgaggagctggattataggcacgcaccaccacgcccgactaattttgtattttttagtagagacgggggtttcgccatgttggccaggctggtctcgaactcctgacctcaggtgatccgccctcttcggcctctcaaagtgctgagattacaggcctgagccaccgcgcccagcctacggccgggaactttttaaggctaaccctgccatccgcgtcaccgccggttccggacgccccgagggaaggcgggtggtggagcgttggaagaaggcagaggattgtgtgtgcagaattgggaaagaaaaaacgtggtgcgaatgaatatgcacgcgaggcctcagtcctgtgaactcgctgatctggagaagcccttgtctgcactgtccgcccgattgccagggcgtctgtgattgggaaggtgaggaaagcgctgcaggaagagttctctgcaggatgctgggtgagatcaaagggagagcttctgccacacctcctacttggtgtgtgcgggggccggcacaaagaccatctctgctctgcttcccctgtctagccaggtcagtcttctctctgacgcggaatacagagctggacaactctgcctcggcctctccatccgtaataagantagaaccacccccacttctgatctccccctctatggatccagaatatttgttttctggtcctctcatatggacttggccgtcctgattcctcccaccttactttcaaaaaaacaagactctctttttggttcacctcagggctacggaactgtggggcccacgcccggaacgtgtggctggctaaggcacaggttcgggccgggaacgttgtgctggaatggcctg

SEQ ID NO: 194499 - DNA, 532 bp, Homo sapiens
agacggggtctcactatgttggctggcctggtcttgaactcctgacctcaagtgatccgcccaccttggcctcccaaagtgctaggattacaggcgtgagccactgcgcccagccgagccaggcactttttctaagcactggagatctggcagaaacaaaaccgagctttggctctcatgtgacttacatcccagtgggggagaaaggcaacaaatgaacaagatatacaacaagatgcatgtataaaatacacagttcaggcaacaacagtgctcaggagaagacagttcacctgacagagaaggagagaggtggggagagggcaacaccttccatataatagttagaaaaggcctctgatacagttgcatgagaatggagactcactgaggtgagggatggggccatgtgggtatctgggggtgaacattccagacagagggagtggcaaatgtcaatcagtgagattggtgtatctgaggaatggcaaccagaatgcagtacagggtgtaagggagaaggtggcaggga

SEQ ID NO: 194500 - DNA, 481 bp, Homo sapiens
  misc_feature (15)..(15): n is a, c, g, or t
ctatccccttcccgnacgcccaaatgggcaaacgtttcctttaacaggcttgctgtcacctcatcagttatttaaggtagttcatttcacagcagggggcaaaaagagagaaaggaaaaatttatcatttgctcaaacttgattggtctgaggaaaagcgtggctgtctagaagatgcctaattgctgctgtgatcctgtactgattctctattttgtcccaggcttcttattgaaacgttaatcaggattaggtctcacctcttgatgaatgattttgtaaaaacttgatatttctcatctcagttaggaatgtctgtatgcaagtataacgccactgcaactgaatgggaagataactaatgcccttaatttcacagagggctgtgatttggtacatacagtacaaatcaggggaaatcagaatgaaattaattttctttttttgcaaaggcactacctctgttatataatgagtcact

SEQ ID NO: 194501 - DNA, 376 bp, Homo sapiens
tcaaatgataattcttagttttttgagaaatttccatagcggtttctatagtggctttcctagttgacattcccaccaacagtgggagtccttttctctgcatcctcgccaggatctgttatttttttgtctttttaacaatagccatactgactggggtaagatatctcattgtggttttgatttgtatttctctgatgattaatgatgttgagtattttttattcacctattgactgtacatcttcttttgataattgtctattcatgtcctttgccagtttttaataggattttttttttcctgttaagtaccttatgtactctggatatagtcccctgtcagatgagtgatttgcagatattttttcccatt

SEQ ID NO: 194502 - DNA, 180 bp, Homo sapiens
tcatcacattcctaatggtcaaggatcaagtggccagaaggtggcgccaatagcattatttaactcttcaacaggccttttgcatgcagaatgtcgatgaacattttttcaatccagaaaggttctttgagaacatcgagctctaatgtctcaaagtcacacatagataaaggaactgat

SEQ ID NO: 194503 - DNA, 439 bp, Homo sapiens
gcctaccacgatgctgattcagaatactcctctcatttgcttttctgatatgaacagcttttatgctaagatctaagtgttttagatttggttatccttgaagcctttttaaaaatctgacattcttatctaaagctcaggtagcttaaaaattattctctggattggaattaaatattttaatgatgatgatacaataaatatttgatgacattttgattatataatcagggataaaatagtaccccccgaagatgtgtaccaacacattcaagtactgaagacttgattaaaactcctattaaggaatcagaaataagatgataaaggtgaccaatggagaaatttaaggaccagaaacatatttcaaaaaacagcaagatgggatgcactgtatgattaaaaacacaaagagaatatcttgtttggaaaccaagcc

SEQ ID NO: 194504 - DNA, 342 bp, Homo sapiens
cttcgatcgagtcgtgaccgactgcaatctgtgcctctactaaaaatacaaaacaagctgggcgtggtggcgggccgtgtattcccagctactcagcaggctgaggcaggataactgcttgaaccaaggaagcggccaagattgcaccactgcactccagcccgggcgacaaagcacgattcagtctcaaaaaaagaaagaaggaatataagattattcaggattttaatcaggagactgagaggggcatgtctgtggcaccatctttaaagaaagaaaggggccgggcgtggtgactcacgcccttaatcccagcactttgggaggccaaggcaggcggat

SEQ ID NO: 194505 - DNA, 423 bp, Homo sapiens
cacacaggcctatttgtctggagatttaaagcatacaagaggcgtccctggatgcttttctaccagtcaggagctttgaactcaggcctgctgtcttgtcctggctgacacaggctctatcaggcacctttttccccatgaaaaacactgggtccatcaacgttgaaaagcagttaaggcaggtaaccacccctctgttgcagtgatgcctctggggggacagggccttattttccaccatgaagtgcctttctctgtgattttaagttgacttgagcaccagggaccatggtgtttttacggagcgagtggtctcaacgggacaattgtgtgcccctggggttatttgccaatgtctgaggacatttttagttgtcacagccctgggagaggatgctaaacatttcataatgcacaccacgg

SEQ ID NO: 194506 - DNA, 273 bp, Homo sapiens
ttacagaagaatgtgttagagaaggcaaggtgatcacttttacagtattttttattattgctctcattatttattgttagtaataattactattattgccaacaacaagctactttatttctaaaaatttacttttgcagtttgcaattcctttatctccagacctgaaggccaaattttaattgcactgtaatttccaatcaagtaaccatgacaccagctgttcttgccaggctctattctgtggtagagggggaacctgtgttctcttta

SEQ ID NO: 194507 - DNA, 495 bp, Homo sapiens
tcaggtctgtctcctttaccaaatggggggctgttccgccagcaccccagtagggaggatgagaggatgccatgatttccagggtggtgtcagaacctgtctgccagggctctgcagggaggggtttggggttgagattgggagacctagaaatcgaggggtgtcgggggcctcggctggggggcaagcacagatgaggatggaagcagctcagtgtcactcagtctgcactgggaatgggggatcccaaggccagggctctgcctggtgccaactgtgtgaccctgggcacgctgctgagcctctctgggccccagttcccttattcgtacaacgggaatgatcgaggagttaacatgtgtttaaaagcaccgaggcttggccgggcgtgctgcctcacgcctgtaatctcagcactttgggaggccgaggcgggcggatcacgaggtcaggagatcgagaccacggcgaaaccctgtctctactaaaaataca

SEQ ID NO: 194508 - DNA, 619 bp, Homo sapiens
caggagcatagaaattggttgttagctttattgtcagcactgctattactagaaagggaagataagaaagatgaatggaaacaaaagaattttagagaaatgttgagaatttaaaggaaaatcataatgaagtcctagagtctgcctcctgaaattttacactgaatataatggagttgaatgtaattctgaaatctttttcatttaccaactgaaaatccttcgggtagaaactttccttccagtaacctgtggttcttagccatcaagaagaacagcatatgctctttctggacttcaccccgtggagcagtttgtgtgaactggtgctaggtcccttcagtaaaggatggacctaccaaggggcttaaaagttggtcttggtataagaacatgccacttactacaatctggaaatggcctgcctattagatcagcactgtagcatctcaaaacaggatttggaccagtatgctagacttttctttttcattagagatgatgtaaatattaacacaaacttttaagacaagtgttgtaaaacaagcatctccttctcttttggcatttcctttttgtccatcttagtggagttgtcagtgtacttatcagttggaaa

SEQ ID NO: 194509 - DNA, 656 bp, Homo sapiens
ttcaaatatctccctttttgtgtgataatatttattgtcatcatttttgtgttatgactttttgtttgtcatgaccggctaactgcatgaaaaatagcttactataagcttataaaaatacaaatatataggtacacaatatgatataatatatacacatgtatatagcaattgtatatgtatagagagagcaattgctacatgccaggtgctttgtatacagtatctcatttattcatagcatctttgtgaagcaggtgatattgtctcctttttatagttgagaaaatggaagctcccagaacttcattggtttgtcccatggccacacagcttgcacgtgatattgctggggccagaacccaggactgcctggctcttcagctcatgtcctcccttagccctgtgccacactgcgtgtttcacaagtccaaattgcttgataatgaaatgtaacaacagagaaggctcactggggaaaagttaagaaggtggtttggtttgttacagaacgtgaatgagaattacaggaatgcctttggaaggaagtattcttgctgcttgcacttctatttctgatgagtgtctgcatgataatagaaagtaaaacatacactgaaagacaagagctgggttcaaaagtctggggctcaggt

SEQ ID NO: 194510 - DNA, 894 bp, Homo sapiens
tctctgacaatggaataccattgtcatttaaattgtcatttaatacaggtttacttctgtttatttctacccatgttttgttcttctcatgatgtgacccagggggatttagcagttgaaggctgaagaaactagaactctcgttgaaactggacaacttactattgcaggaaaaagcactagttcaccctcccctcccctcttctctttttccttttctttcttttttgagatagagtcttgctctgtctctgaagctggagtgcagtggcactatcacagctcactgcagcctccacctcccaggctcaagggatcctcttgcctcagcctccccagtggctgggaccacaggcatgtgccacctcgcccggctaattttcaaattttttatagagataaggtctcactatgttgcccaggctggtcttgaactcctgggcccaagctatcctccctcctcagcgtcccagagtgctggaattacaggtgtaagccatcacacatggctgagcacaagtttgtaaaacccacctgtccagatggctgagctaaccattctcagaaacgaaactacaaccctagagtagatacatgaacactttgccttggcccaggatcctgaagacggtgaccatggacctgctggctagccttgcctcctctgctgcctgctgcagctcacactctcctctcctgaccctagaggttgctgaatgggtcacacactccttttagaccagtaacatactgagctgtttcagccttcccttacacttcattttctagagagccagtcatctatttggatcttacttatatctccccaaatttgttactgttgttgttttatctctctgaaactttgctatcacaagctggattctcttaaca

SEQ ID NO: 194511 - DNA, 539 bp, Homo sapiens
aatgtgcttgtccccccgccccgactttcttaggtgcagtggagtagtgcataggtggtgcatcctgagggctcccgaggggcatcacctgcccagtggggaagtgagcctgctttcagttagaggcagggcctgtgattgttgggtcacagctgggtgtcttggtggtgggaggaggaggaggagtggtagatgtttctccaggccctcatctggctcttgtaggcatagctcaagatagtggtctgtgcctggtgtcatcacttgcttttggcctcctgctgtgcagacatggtctctcagctcacctctgggattcctgtgtcgtcttcccattgagggcttcaggatgtctctatgtcctgagtcacccctttatgaaacaacctagattactttcatccctgtgttgtctttcttatccttccatctccttttgtcctccacttcccccaaagggaatttagtctgaattttaagcctttgggaaaggaaaaaaaaagtagtaatgtaattttctttatggttactgaagtgac

SEQ ID NO: 194512 - DNA, 432 bp, Homo sapiens
actgggtgatttgtggtgtgctgacttcagtggcttctccgacaccgtgccagaaattatctaataagtttattcatcctggcgagcttcctcttccccttgttaatttctgaattttaaatgttttgatgtgaaaaatgtagggaggccaggtatggtgcctgatgcctgtaataccagcacttcgggaggctaaggtgcgtagatggtttgagcttagggatttgataccagcctgggcaacatagcgaaaccctgactctacaaaaaatacgaaaactaaccgcatgtggtggtgcacgcctgtagtcccagctactggggagtctgaggtggaggataacttgagccagggaggttgaggctgcagtgagccatgatcacggcactgcactccagcctaggtgacagagcaagaccccgtctcaaaaa

SEQ ID NO: 194513 - DNA, 663 bp, Homo sapiens
agaggattcccaaagatctttgagcatcacccacattcccagatggccaactgatgtccagtccctcctgcactgcttccacaggcatcagcgctcctcactcctctctgggttcttaggggttattatagcaggtagagcccagtgataaaaatagcaacgatgacctaaagaaagttcaaagtaggaagcagaggtaaaaggcaagatcctgggagccaaacacattgcatgtgttctggcaatttctggagagtctacaaaactgacttccaatgcttgacctccactgcctatagaccatgtctgatcggagttcttctgacagcaggcactaccccttccttgcttctccagtccaaatgcaagcatatcctatcttttgaagcatttgcctttccactccaaggtttaaggaactgcaagacaaatagtataaaaagatgaaagttgctgggaggaagtcagcactgctaagtggttctttacagggcagtaaaccccaggtcttccctgtctctggagggatcaacaggattgccttcccaaccctgtctgcactcagtttctccccagccagcacagggtatctgcctcccaaaggaagaaaatcggctgcctaaacctccctctgcttctacacatatttaacacactctgtca

SEQ ID NO: 194514 - DNA, 678 bp, Homo sapiens
aaagctttcccctcaaatagctcgggtaagtatccacaattgagaaccaaggtaattaaatgcaacataagcatcagaaaggcatggtttgtgatttgcttttttgttatatattatcaagtacatacagtactggaaaagtctattagctaaatgaataaatgaaaaaggcttaacagcatcttttaattatgggctttctttagctgaatgttaacccaaagctatagtgctcaaatacaaacttcagtaaaatgctcaaattgcaagtggccaagcccaatcaaaatctcaagagtggaaccaagatgggtgctgagagatcccagacctacagagaggcagagaaattgctaaatatcaaagaactgggagaaaagcagacgtaggtagaactatatattgttgaggacagaatccatgcacttatggctcaacttcctcaaaagactcacataaaggggggaatacttcctaatatacctattaattctgaatgaagtcagaagatttcaaatctatttactactcttactggcgtgatcttaaaagaaagcttcacacagcagaagtcatatttaatgggattagtcattttcctcccttctttctacaaagtattttatacctgcttgacacactgagtccaaaactataacaatgtgtactaaaacactg

SEQ ID NO: 194515 - DNA, 243 bp, Homo sapiens
gtggtgctacttactgagatggagaagattgagacaacaacaggtttgctttgtttttgagtgtcttatgttcgagatgcctattagtcatcaaagtggcaatgtaagtcattcaatcagtcatgtttgtatcagagctacccctaaaatgttagaaccccaataaaataccttatttcaagtgactcgtgacagttaacaatgagtaataagtctgtgaatgattaacaacaacaacaacaa

SEQ ID NO: 194516 - DNA, 591 bp, Homo sapiens
agcaatataaatactgtgttacagaaatactgagtggtcacactgaagtcagcgacatacattgtactttattgttccctctcttgattgaaagtaattagacagtgactatattctatgattctatcattggcctgtctacagccattctcccccaagaaatttttaaaatagagtagtatataatatggagaaaatgaatcctttctaaggactgacaacacataaaaagtgcactactatgaaatatgttgacttttcccggattacaaagtctaccatgcatatggcttcctctttgactgttttcctttgagaaaacagtgagaaagaggacactaatggcacaggctatacaagcaggaaagaaaacaggagctatactctattactgcacaaatatcagtggggatttatgcctaatccctaaaaaaagactttcaccataagaagtctaatccagcagatgctgagttccctaataccagaatctatatttacacaatccaactcaacatggtctacagcatctatgatttcctcagtcatgccataacattctcaaaaaagtgtgaagcagctacttcatat

SEQ ID NO: 194517 - DNA, 217 bp, Homo sapiens
gtgaccctggaagcatattctgtgacaaaaaaagggttaatggtaacttatcgcctgttgcatctagaggctttgtaaactcgtgtggtgttggtataacacttttcacattcaacaaggttagctcattctcctgtggagaagacttgaatgaaatgaagaaggcttccaacaaagaggaatatgatttaaagatggagtggtttatgcccatctt

SEQ ID NO: 194518 - DNA, 368 bp, Homo sapiens
aactgattttcgacaagggtgacaagaccattcagtgggaaaaacatagtcttttcaacaaagggggctaggacaactggatagtcacatgcaaaagaaccttccactatacacaaaaattaacttaaaatggctcaaagacctaagtgtaacagctaaaattataaaactcctatgactcaataatcaaaagatgacccaattttttaaatgggtgaagggataggtgtggtggctcatgcctgtaatcccagcactgtgggaggcccaggtaggcaggtcgcttcagcctaagagtttaagaccagtctgtagactctatctctacaaataactaaacaaaacaattaaatgatataataaaataa

SEQ ID NO: 194519 - DNA, 250 bp, Homo sapiens
gataaactacttttgcacagtaaaacaatgcagccccctcatctgggtccctacaatcttgtcaatatataacctcgtattctctgattagatcaaatgagagatgacactgagacatggttatccccattataatgtattccatctctaagactgcattggaaacagggttaaagccaatcaagacagtaaaatgaaacaataagatttcttttatttttatttttaattttaatttttgagacggtct

SEQ ID NO: 194520 - DNA, 405 bp, Homo sapiens
ctcccgtcagacgctgaactatgcgctgcacatggaccaagtcatggaatattcaggtgaggagtctgaagtaggcacgtgatatcagtttgccttttagattggttactgcggctgctttcaggaagatggttttacttagagcaagaatggagacccgtcaagagggtaaatgcaatagtccagtagagagctgatgactgaacgaatgtggtacatcagtaggtccttaaggaattatttttacctttaggaaaaggaactatagtttcttaagttcataattgaacaatcacttaagtaattttctcctccaaattctaacaaaataaaatttaattagactcttacaatatttttaaaacattttcatttatcaatatggcacacattcctgctatttta

SEQ ID NO: 194521 - DNA, 378 bp, Homo sapiens
ttcaagcgattctcctgccttagcctcccaagtagctggattacaggcacccaccaccactcccagctaattttttgtatttttagtagagacggggtttcaccattttggccaggctgctcttgaactcctgaccttgtgatttgcctgccttggcttcccaaagtgttgggattacaggcgtgagctaccgcgcctgaccttttgattacttgctttttaaggacccttattttaagtattacttgtctatgtaactgactcctctttaccttttctcaagtagcctataggctgtgtcttattgatgttggcactccctaacatgtacataggatagtgttcagcatgtagtaaatactaaataaatcattgaac

SEQ ID NO: 194522 - DNA, 761 bp, Homo sapiens
aagtgacactgaaaatagaactgattatgacactttatgacctactgtccaggtcgtaaggcatctatacaaattatggagagtgaacctgtggaaaattactttggcaagaattcttgaaaaaagtttggtttctttaaagtacattatggaaaatattttgatttttaaaatatgttttacatgttggcaggaaaaagaaattattggatgctgtgttgagtaacatgcacccatcatggaatcaaagggctctccctctcatctgtggtcttactttttgtagaccttattaagaagctgttttgcacgcttgaggacctgtcccgaatgaaccctactccctactcaggaggggcatgagccctcgctgtgtgtgatgttttctggtgatgctcacactgttctgtgtgggcagacagcgagcagcagtattggacttggagaggccgtgtgccaggcatggtgctcagcggctttcctgtgctaccttattacactcccataaaacccattcagggtaagagttgtgttgttcttcaattgaggaagccgagcctaagcatacccaccaagtggaaaccaggattcctactccaaagcctctgcccttaggacggtgtgaggaaacctgttccttgtgatcaactcaggagccacaaagggcctggagaatatctgctcctcttctacttagagcagaggatgactgacccttggcttaatggctgttggtactgttttagagatgattatacaat

SEQ ID NO: 194523 - DNA, 373 bp, Homo sapiens
cgaagtgtcgatattatggaaggtggtttctgttgacctgcagctgcaacatgcctttgtcttaaaagccttatgcctggtgcataattatcaaaggctgggagaaaaaaggcctaatacatctaaagcttccataaggccacagaagaaagcttttccctgcatgattttgtctgatggttagtgctgcatcatcaggaagtgccgcagaaagatgtttccctgactggggatgcagtgtcctcgtggcatgacacagtggtccctcaggggccctcccagcttcctcgtgccccatctcttcttggattcagggaatttctgaatgccattcccagaagtgcctatcccaaaacatggttaagctagtgga

SEQ ID NO: 194524 - DNA, 599 bp, Homo sapiens
cttgctgacgaccgggcttggtggctcatggaaagttcaaaccccttagccccaggcctcagccttctgtggagatgggatcttacgtatgtgcaacatcaaccactttcttttaagagatgggtgttgctgtgttgcccaggctggtctcaaactccggggctcaagtgatcctcctgcctcagcctcccaaaatgttgggataacaggcgtgagccaccacgcctagccttttatctattttttggtctcttaaaaatgtaaaaaccattcctagcttataggccataaacagcaagcactgggccatagtttaccagtttctgctgttgggagcactgattccttgaatgggaaataatgagtcaatggtctgtgcaccagagacactcattatttctggttattgtttctagacctttttagtgcacacagctgagaagcagacgtttaaagagcaaagtattttcatgagtttatactgatatttccagttcacatttaaggctacaggatttactgaactttcttgatgttctacttgtaatatagggtttcttagcgatagtgggtacgagctcaatcgtaatcctgtcgtg

SEQ ID NO: 194525 - DNA, 117 bp, Homo sapiens
actcaagtggggttaagtttgtggcatgaacaatctgttaaggggagaaagcctagagcaacagagaatcatggccttaaaaataggtactagaggccgggcgtggtggctcacgcc

SEQ ID NO: 194526 - DNA, 486 bp, Homo sapiens
gcaaccagtaggaattaggcaaatagtacaaaatctgaaaaatacctaaatctgaaacacttctggtcccaagcatttcagataaggaatactcaacctgaacctagcaaatatcatttgaaaaaataatatcttaatctgtctcttcaagtaaaagtattatttaaatagtgagtgagaaaggaactacttcttttcttagaaagaaatgtgcaatggtagagcgttttcctcgttggaattttttttacatgtaatcattataagctataacttacatattataaaattctcctttttaaaatgtacagttctgtggttttttgtatatgcatagagttgtgcagcttttgccactgtctagtttaagaacatttcatcaccccaaaagagaccctgcacccattagcctcacttcccattctctcctccctccagtccctggcaactactaatcttcctgtttctttggatttgctatgaagg

SEQ ID NO: 194527 - DNA, 497 bp, Homo sapiens
ccaagcgagtgcaggtctctacgtagaccgactcatagtattatgcatggtgtctgagggtacagcgaccaaattcagcgtctggggtgcatcggcggccctcgagggcgtgcgtctgaagcctacaagaaagttcgcctatctggggcgcctggctcacgaggttggctggaagtaccaggcagtgacagccaccctggaggagaagaggaaagagaaagccaagatccactaccggaagaagaaaatgatccggatcattttcttcttccggctccctgcagtggggccaggcggggcggcggctagagtggtgtttcagcagggaccaccaggcggcgctgcagcctcagcctaggagcccggcagagcccaaaggttccgtggttactcccagtttcgccaacgcggggcctgccagcgtcccactccagtggaagcacttgtgaaaatgcagattccaaggctcaaggattctggcgctgcagatctagggt

SEQ ID NO: 194528 - DNA, 229 bp, Homo sapiens
gtcacaaaaatcaaatggggaaaatattaagatgaagagcaaataaatacagaaagaattttaaagttagtcttgtgatcaaagctaactccacactttaaaaggcttatcatccaaatatttgaagcagatatgagtaatttacaaacagtacaggttattactttttcatttttactaattcaaaaaaataacgtttgagaatgagacgaaagcattgtggttgatg

SEQ ID NO: 194529 - DNA, 469 bp, Homo sapiens
aaatttatttatcatgttatttgatttttagaacaactctaagccatggacaaagcggaagccattaccttcctttcacaaatgaggaatggaggacaaaggtttagaaacctttgtccactagacacttgacactagacacttgtctaagatcacacagataggagacttaaatttagatgtttgatgacgcagagatacagacaacaggaagaggatggaggttaaacccaaaagctcaagcaaagggctgctgagctgagcatctgtgaggctgtactacactgaagggcctgcatgagcgacggtgtggagggagaagacccataagacagttaccagagggaccagcccagacagagaaggggcaggggacagagccattcagctggagccatactgaagaggagttggaactttttccagggccatcatttatgatcagtggagtcacatgatctccttggag

SEQ ID NO: 194530 - DNA, 623 bp, Homo sapiens
actagccagaaaccatagagtgaatgttgaagaagctgacccacatatttccaaggtacctttaaaatacatcttttttaaagatgatcagttcttttggtgattcacgtagctgggcaatggtccaacttcactgtctaatgtctttttccatgaacagtttctcagcagtggtcaggtgagtagcattgaccactcaatgctccactttagtttaggacattgaaagccacaagagaatgttactaccgcctctacaaccagaacaagtgaaaaggtcttcaagagaataacatttttcaggtcctcagagagctgagattataaagtaacatattgaattaaattcatgctactccaaagagagaggaacatacaaccttttcattcccaacttgtaggccaaaagcggacataatctccaaagggggaagaacctgacaggcttcatcagcatttcaaaacttcctatcaagctaaaccaatttaaaaatgcctattagatggccaggaacaatagtttatgcctgtaataccagtactttggaaggctgaggtaggagaatcactggaggccaggagttcaagaacagcctgggcaagatagcagacctgtctctaca

SEQ ID NO: 194531 - DNA, 308 bp, Homo sapiens
atgcctggcatcttcctcaatatagaaaaagaaaaaactggctcgtgtatttttacttctggcttctgggcacttttacagagacttgtttctgtctccaatgacaaaatgtgctgaaagaaatgatggtatactttgaaataacagcttgagtctgctgagaccaaaggtaaatgttacagcaacaaactacagtaccacagacatgcaatatgtacaggaagtaattacagactgttaagaaacacagacaaacctctttaactgaataatcaacacaaaattccacacaagacacatcataacat

SEQ ID NO: 194532 - DNA, 450 bp, Homo sapiens
ggacagaggcaggaagagatgtatctatttttgctggcataaagcatggcagaggtggtgtggctctggaactggcaactgttcagcaggcagcttcctaatccagcaggcagcttcttgattgttctaaaagcagcagctctttcagcagcctactcttgtgacataattcctagaagctcagcctagatctgtttcttcaaccctcccattgattctgtgacctatatatactcattcatcaattcccttctgtttaatagctaaagaagatttcattgcttacagccaagaatcttgacctatacagaatttggcagctagaagtaaagcacagcaagtcgaaggccctaaatctggggttggcttagttgaggaggtagggctttgggcagtgagacttcttgccaacagaagtcaaggtgaggttgagacttcctgccacagaga

SEQ ID NO: 194533 - DNA, 530 bp, Homo sapiens
caagtacctggagtcccagagggagagggtaagacatggacataatatttgaagaaataatgcccccaatttagccaactattatgaaaactataaacccacagatccaagaagctcaataaatccaaaggccgagaaacaacaaagctacactagagcacatcataatcgaattgcttaaaatcagcaattaaaaacaaaaccttgaaacagagaaaagacatattactacatatagaggaacaaaaatgagattgacagcagatttcttgtcagaaacaatataagccaaaaaaccagtaaagcaacatccctaaaaaaattgtcaattagaaattcttggccaggcgtagtggctcatgcctgtaatctcagcactttgggaggccaagatgggcgatcacctgaggtcaggaattcaagactagcctggccaacatggtgaaagccaatctctactaaaaatgcaaaaattagctgagcatgatagcacatgcctgtaatcccagctactcgggaggccgtggcag

SEQ ID NO: 194534 - DNA, 472 bp, Homo sapiens
gtttgggaagatctgaattggctcaacaagtagtatgagaatgcacctgtatgtgggacttgcaagatgttggcatttgacttagtgtgttgaattttggtattccagacctgcacggagaaaggacaatgacaagatcttgatactttatcattggggatactagagaaggagaggaagtgggcgtcaaggtgtatctttgaatgatattggtaaaaggtgtttcattttaaaagttctgatcttaggtcagttacttctacggaaccagagtcatctcaatcaccgttacatggatattttattctgagtacacactattatttagaactaatgtgaggagcatgaattttaatagtctgtgtctagtgtctaatattttttctttcataaagtagaaattacgtcaaatattacaattagagtatttcctgttggcccactattctaggggagagttccctgaaagctt

SEQ ID NO: 194535 - DNA, 683 bp, Homo sapiens
agttaatatccttcatagaacgtacgaacatgataaagtcaatttctagagacatctattaaactatgtaacctttttggaataaagacattagcacacacaaagaaaaatgggttaaagttttctcatcactttattttccaaaccatgcaagtgaccaataacaaagtggactaatcacaccatttaaaaatagtcacctctaagaatgacacactcagacatccctctcccatttagagcatccgcctcattgcacttaacatgatacgatgggaacagagacagcaaagctaacgatgttcagagagaacattcacggtcaacagcccttgctaggttaagcgctgaaaacactatgattctcctcatcaatctcaatcagagatttagaactgaacagcagatgtccaccgaaccatggggattataagacactcttacccactcaagttaaagaatgccttgaccctttctgaccatgcctaatggaagagatccaaaactgcaaccctggggctacgtttatttactttctgagcacatccagatggaacctttatttttcagggtgtcattctggaataatcttatctatgtcagataacatggaggcttttggtttattaagaaacgaaattatggacatcacagagcttccacaggtgagagtatctgctcca

SEQ ID NO: 194536 - DNA, 713 bp, Homo sapiens
gaacacttcagatgttaccaagcatttgtgcacaaaccttatgggataggcagggaagttattactaattccattttgcaagtaaggaacctgaggtgcagacagcatagatatcttgcttcagaccacacagctataaagtggcagagttagaattagaaccaagttttgttttgttcagtgtctagtgacaaaatatatattaattttggaagactgggaaagtataaaaaaaaagtagaaatcatccataattctaccaaccaacaacaaacactgtaaatagtctgggaaatcatatcatacatattgaacctaaagtgctatttttaaaatctaagctgcatcattattttatgtaccatcaagaaagaaacactgccaattaaattctgacatgttacctgttgtgggatgcatctcgatttcagagatattaaaatttgggggaaaggtgtatcttaaaatcactgaaatgtattttgtatctcattgctttctatataaccattataacatgagcagattgttgtaattaggcaaaaatgaatctccttataattaatagctctgattttctattaaagttgattgattcaaaatgttgattaaaaaatacttacagttcatcttctctgaatcaactaattcttcccccatttttctgctgggagcagggggaatgctgtgttaatcaaagtgtctgtgtgctt

SEQ ID NO: 194537 - DNA, 150 bp, Homo sapiens
ggagcatcttttcatgtttcacacttttagaagtgtgttaaaatatttagcccctttttttgtcttgttgagttgaaagaattctttatataatctagatacaagcccattatcagataaagattttgctagtgttttctccccgtgggt

SEQ ID NO: 194538 - DNA, 531 bp, Homo sapiens
  misc_feature (444)..(444): n is a, c, g, or t
tgtctagaggatcccatgcgcgagcttcatcaagtcaatggaatactttgatatgaagagaggcgtgtttatgtgtcagaaacggtacccgatgggagaggtttaaaatggggccctgaccacagtttgattgccaatagtctcacagcagggtccgggctcaactccagttttaataattgcatattgccctgagctccattcagttggctctcttgttctctccagccaccttcattaaatgtccagggctatggaatttactagcgagggaaggttgctgctttttcatgcttcccctacttctgagggataggctggctataaggggaagaggggatgacctggactaagagcacgcctattgtaatgcactgtggcatcaatgctccctctattcttctggctggcagaatttcctataccctgtgggagttttttttnttcaggaaggggtgtgtggcttcctgatagttcatgtgcagattttggtgtagcttgatggaagcgtcgcgcatggggatcctctag

SEQ ID NO: 194539 - DNA, 439 bp, Homo sapiens
aattatttttaaacacagaaagaatttagcatattatttgagtgtcagtgggaatatgtctaaaaaatagactttttttggaatacagtatcagtagtctagttctcatgaaatatgacatgggtaacatggctactataggatgtggggtcaccaggtcatcataaaaaccaccattaatgaaccctaaactctgtgccttgggaagaccatacaaagaccgtctaatccaataccctgtttctaaagatgggaaagcggaggatcaaatggtgaaatgatttgatgtcatgaccttggcaagaacaagtgatacagttcagcttttactatatatttctatttatggttatcttcgtatctttagaagttttgggttttttttttatagttttgtgaaagaaaggatgggaataagatttgtgtttattttgcataa

SEQ ID NO: 194540 - DNA, 711 bp, Homo sapiens
catagcatctacttcccagggcttctgtgaagcatccaccatataacatagatgagagggtgcgtgggacatgggtcaatacacgacttccctccctcatgtgcctgattctaaacagagcagcccaaatctgccatgacaagggtgacagagaggtagctttggtgacttgacctggagcaaccatgtgtggataacatgttgcttagggcctcttctaacctcagggggtgaaagtgggaatgtaccctggggttcctccatccctcctggaccctgggacacctgccacccagggcagagacccctgtgtgccagggaccctgccctgatgtcatgcagttcattgagaacagctgctgcaggcacatcagcagacatttactccctgacactcaactctctaccctccctttcctcccatccctgtcctgtccctggcctcaggtctatggctccatcccagtcaccctgggcaggaagagctgggcagtgtgagtgacagcaggatcgtcaccaaggcacttgcttacatccaggcgccacgctgacctgctgaatgaccttgggctcagccctgcccatctctggccttgagtctgcagctgggctggataatccctggggtctgctcagtggatgggcaactcacgtgccctttcacagtggccttcatgagtcaacagcccaggaagtgatgtcaggttaggg

SEQ ID NO: 194541 - DNA, 346 bp, Homo sapiens
attgccaaagaatctaatattgaataacttaaaatattttaaaagactggggtaagaattttagcttcgttaaaactgtgaacataatttttttgtcttacccacatcacatttggatatgtaacacatatgtactttgtcagaaggttttgtttttaagtaactgaaatatcagtggaatgtttttttcagaaactcataaagaactggtgccttttcattttgatttgtaaatatgttttgtttgttatggcttcatacttcactgtatagagtttcttcataaatggaggtagacattttatctgcagtttcacattctctaatttaaagagatttattatca

SEQ ID NO: 194542 - DNA, 862 bp, Homo sapiens
gtgcctcaataaaacaagatgggaccaaggttaggggtacctggtaagcactggttcattctggaacccctagaatgaatgggggacactgccatacgcaaaggaaaaatggatgaatggggtaatgccctacccactctggtctgctgtaagttcaggaaaaagacagtagggaaattggaggggttgccttctttttctcttctctcctctgttctctctgtggacaggtaatcaagtctctgtaccacaggacacactactaggatacatcctcaagaactgggaaaagtttgactcccaaaccctaaaaaggaaaaggctaatatttttctgtaatacagcctgggttgaataaaagctctaggaccaggaatcttggccagaaaatagaagcacaaatttaaatatgatccatcaactagatttgttttgctaccaccagggaaaatggacagaaatcccctatgtgctggccttcatggccctaagaaacaaccctgacctttgttgggcttgtaaaacagatccatggccatagtcatgcagccccttcccattggttcagaaggcccctcatcaggtttacccagagctcaagccccattgccccttctacccaattatatcgaagtctcccagaagccttctcctccctacccagggccatcctctggacaccacctccttaagttatgccccattcaggaggtttagtggtcccagtggacccactggagtccagactccattcactgtgcaagacctgagccaaattaaaatggaactagggaagtttatggaggaccctgacaaatatatcaaagtgttttataaactgggcttaacatctgaactcacc

SEQ ID NO: 194543 - DNA, 372 bp, Homo sapiens
aaataatgaaatgctgtccctcccacttctcactcccactcctaaatgaatcctaaactacttctgtgagagaacaaaataatttccaagtaaaactccaaggaaggaaaaaaggatgaatattttttgagtactcaaacagcttcacttaagtttctgttagtcttcctattttacagataaagaaatggggcaaggcaggcagatcacttgaggttaagagttcaagaccagcctggccaacatggtgaaatcccatctctactaaaaatacaaaaattagccaggtgtggtggtgcgcacctgtaatcccagctacttgagaggctgaggcaggagaatcacttgaacctgggaggcacagattgcagt

SEQ ID NO: 194544 - DNA, 418 bp, Homo sapiens
caacaggcctggcatggtggctcatgcctgtaatcacagcacttagggaggctgaggcgggcagatcacttgagcccaggagtttgagaccagcctggccaacatggtgaaaccccatctctactaaaaatacaaatgtgtaggtaagcctgattcgtcctataatgtcaaatttcttgctggtatttctcagttgtattatcatttcatttattgttataattacatatgtgtgtgtgtttgtgtgtgtctatcgagggaggatatagtagatagtataatctctaccagttcagtgtaaagaagcaattttctttctctaaagggactgcacattttactaaattggctgttttctaagcctgaacactttgactaacagatgtagagaaaagggctttataatattaaatcaact

SEQ ID NO: 194545 - DNA, 555 bp, Homo sapiens
agggagaatagggttttgattctttgtcattcattggttttgtagctttgagcaagccacttaacatttctagcctctgcctcctctggcacaggaaggctgctcagaggactaaagccccttatcatctagggctactgtcatccccttgggctcgaatatggtagatagaaggctaaaggccccctcagtaaaaagaggggtgaggtgttaggggccactttctgcttgaaatcgacttgagtatacttgaactcattagagagttcactttttattccatcactgatagaacttgaattgaacatttgacgatagagacataaaaagatcttcacgagtttctccaagaagtcacatcttttagttaaagcctgtgttttgatcttgatggtgactggtactccgaaagcagttgtgtattgtagagacatcacagtgtcactgcttccctattcccttagattctccaagcttcaaataccagctcttaaagcatcaggcatttgttgaatgactgccctgtggctgttcatgctggttctgactgtattg

SEQ ID NO: 194546 - DNA, 334 bp, Homo sapiens
aaaaacaggccaacatgagcagagcaaacagaacacacactacagaaacaccgcacacaaaacgtcaagtccaaataatgtaacctaaccatggaatgctgtaaaatattagcaagtagcagattaccctgggccacagcaatcagcttcatacaggcatatttatttcgctgacctgaaaaaaggcagggctgaaaacattaatattcccaggcatcaaacataattcaaaagctccagtaataacccccaaacatatccagcagaaagaaacccgttaccatttgtgtcttggaaaggacagctacttcccatactagtcagtccctctgta

SEQ ID NO: 194547 - DNA, 251 bp, Homo sapiens
tgagtgctcagagcctttccaccctcccatcacgtttgtgccacggccccacctcccacagtttttcctgaagctgtccagctcagaaatccagaactgccgtccccagaatcattcattctctcagagtggctcacttcactccaggaaggtggccccttgtaacctggcggagcaggagagtggcagcatgggactcctgtggtcctgtcgactcaagagagcaccagcagccgaagctgaccccagcc

SEQ ID NO: 194548 - DNA, 544 bp, Homo sapiens
tctccatagtggctccacagtcctcaggtttctctatgattggctttttggagaagccagaaaagaaaaaccaagaaccccactgaggtgaacacatgattgatttcagctccacaactgagtgagacagtttttgggaggcacatcaacctgcaggtatagatgaggctgcaggttcttttccggggctgctagagtggagtcatctggggaccagtgagagaaatgcatcactcactttgtattcttatccctgtggttggggaagaaacactcaccagtccacagaatgtggtcacgtgactagggagagactcaaggcaaagggctcaaaatgccatgccccattttccgtttgtcaataatcagtgctgtcatcttcctgttcatgttgtaagttttgatcttttcaggactgcttccttgccaaaccctcgcgtccactccccaacacactttgtgctaattaatggcatttcatcgcttgattttgaaaaatgaaagtgtgaactacttgtgaaagagctcttagcaagataagaaa

SEQ ID NO: 194549 - DNA, 456 bp, Homo sapiens
aaggagaaaatgaaataaataccatatatctcatttaataaattgccatgaatagaagtaaaaatagctgctggctttctgtagttgggatacttttattaaaattattatgaatgataaagttgacaccatcactgaaatttttacctcttcaatgcattcacctttactaagcattttttctgactcagttatatagctatatttcagaatattaatgataccaaagctataaatcaggcagaggtgggcggatcacaaggtcaggagttcgagaccaacctggccaatacggtgaaactgcatctctactaaaaatacaaaaatgagccaggtgtggtggtggatgcctgtagtcccagctactcaggaggctgaggcaggagaatcgcttgaacccaggaggcggagattgcagtgagccgagttcggccactgcactccagccagggcaac

SEQ ID NO: 194550 - DNA, 690 bp, Homo sapiens
gattattataaattaaatatagacatatcataagttctgtagtgtaaaggaaaaagatgttcatgacagactgagaaaaatatgaatgggaaatatagtttgaaaattacattgggaaatgtatttattttcaaactactgtacttgtaattttgaatcaaaggctaactcccaacttctgctaatgattggatgagtcttacaaatacccttttccattttttataatagaatttttaagtgactataatgtacaaatccattcaataatcaattgaaggtcaaactacatgccagtacccgcatcaggtacagggatagaggtctcagaaagttcacagctttatgagcaagagagtgtgtacgatggcaatataatgaatcagcagtatggcagccagatgacaggagagatggtcaaggaaagcttccagggaaaataagtgaggccatagagaagtcattttttagagtaataaggaggtcagctgagggcatggcatgaaaaacatattccactagaactatttaaaatatcaagatgtcaacagcaaagtatctaagttaactcctttctcctgagacaatgcaaaggaggaggctctgctgatttcatgcactatttgcctgggatttttttgcatgattcttttaaggtgtcaagcactgggtctatgacaatgtagatga

SEQ ID NO: 194551 - DNA, 487 bp, Homo sapiens
gctgacttctatccattagaagctaatagaaccaccaccgtccccacttgtgacgaccaaaaatgtctctagccattgccaagtgccccctggaggacaaaattgtccctggttgaaaatgacagctttaaatatctggaacacatagtgtttcattaaggataggctaagccacagtaactatattaggccattcttgtgttgctataaagaaatacctgagactgggtaatttatgaagaaaagaaatgtatttggctgatggttctgcaggctttacaggaagcacagtagcatctgcttctgatgaggtctcaggaagcctccaaccatggcagaaggcgaacagggagtaggcatgacacatgtcaggagagaacgtggtggccaggtgcagtggctcacgcctggaatccagcactcggggaggccgaggtgggcggatcacgatgtcaggagttcaagaccagcctggccaacatggtga

SEQ ID NO: 194552 - DNA, 377 bp, Homo sapiens
taaaactgactctgcgtacctgtgaccaccttaaaataacctcactctcaaaagaaattttgtttctctttcccaagcaactaactgccccactgtgtccctgctgtgtgcaagtttggccctttgggagacaaaaactcttagttgtagggaaataggtttaggacctcagtgttacagggcacttaatagcagcccgggggcctgacagagttaatgtaacatccacgtcacctgaactatcaggagtttggtagaaaagaagagatgaattatattggcttccattcagagattgaaaatctgtggtaatttgaagtttccgaaaatgtaggagaatgggctgggcacggtgggtacaccgtgcttatctcaat

SEQ ID NO: 194553 - DNA, 316 bp, Homo sapiens
gttatccccaacacaggaacacaacactggttgaataataaatgaacacaaaagaataccaaattctctttgacattggcctggtgagcaacaccagctgaactgtctgcggcagtggggagtgttgggcgataagtgatgttatcgcccaacacagataaaccttgaaaacattaagctacatcaaagaagctagtcataaaatattccatttatatgaaatgacaagaacaggcaaatttatagaaacagaaagtagattggagattgccaagggctgggggtgttggggataacatcaggggtgactacttaa

SEQ ID NO: 194554 - DNA, 148 bp, Homo sapiens
ccgcttctaaaaactgaagctattcaatgaaaaccatcactatcctctcaatagcttcattttaactcactacagagttggcccccaaaaaggtttttattattcaaagggcttgaacaattactttttgggggccaactctgtagtg

SEQ ID NO: 194555 - DNA, 315 bp, Homo sapiens
caaagagatgcttggagatggaaaaggtgagctgcatctcagcaagatacagggcaaaatctactaaaacagagaggcgaagttgggaaattcatattggaacactactcaggaggctgaggtgggaggatcacttgaacccaggagttgaggttgcagtgagctatgatcatgccactccactccaacctgagtgacagagtgagaacctgtctctaaatagaatacaattgtaaaagattgtgcatgtaaacaacattttagtactatcaggtttccttggtcaacaaaccccttcttttctttttaaaaatg

SEQ ID NO: 194556 - DNA, 290 bp, Homo sapiens
tgtattggtggtgctcgcctccaaactccatcccaacactaccctgccccctaagaggggcctgagcatggggtaaaaggctcgctgacagccagagagcaggagcccacgcaagaccaccagaggatgtgcagccgctgttcctagtaggtgaggaaaaagcaggaatctggcatccacacatgtcaggaggcaaaacaggccctgtgctggtttctgcagtcctctccagcccacttccctgctcttcttgctcactggccatgacccaagaaacagcagcagcacca

SEQ ID NO: 194557 - DNA, 504 bp, Homo sapiens
ctttctgaaatctgatcaagcagaggttttatcttaaaactagaatcatagattattattattttaggactgaagagaccttaaagttaagctatagtgattagattctggtgtaataactctcttcattttccatatagagaggttaacctcgatgtagtgatttgaattaactggtaacctttttttttctttttgttatggagtctccctctgttgcccaggctgcagtgcagtagtgcaatctcggctcactacaacctccatctcttaggtacaagcgattctcgtgcctcagcctcttgagtagccaggattacaggcggacgccaccatgcccagctaatttttgtatttttagtagagacagggttttactatgtttgccaggctggtctcgaactcctgacctcagatgatctgcccacctcagcctcccaaagtgctaggattataggcgtgagccactgtacccagccaactggtaacccttaaaaaaaaaaa

SEQ ID NO: 194558 - DNA, 683 bp, Homo sapiens
tatcacatacacactccacagcacacacaacatgccaggcaagcttacacaccacacacacgtacatgtgagagcacaaatccgcacacaaacgcctgggctccttagcagtgttcctttacaagtgaaggggaaagaggcctttgttttctacctcattcgtcgtcatttgtcttgaggaaagcctccgtgtgaaggcaggggaggctgcccccaagcacagcacagctgggaacgcctttgcaagggcccctttgtcctttcagtgttcttttcagtggtttagtgatgacttcactgtacggtactttaagtataggctccttgctaagtaagtccctttgttaagaatggattttaaatcctgagtaaaatcaatgaggaaatcagggaacagcggatgaaccagacagcgcatatgctttacttctaaggaagacgttgaaagataagaatggtggattcttccttccatcagaacggatttttcacagaatcccagacaacaaagtgaaatgccattcaaatgcagccattatcataccccgtggtggcttgagccacctgcaaaccccgtcagcatgcaccggtcaaaagcttacaacgaacagggagctctttcctcgctgcttccccgctgcttccacacagccgccacacttaggagcgtggccccagatgct

SEQ ID NO: 194559 - DNA, 203 bp, Homo sapiens
aactggggcctcaatcacctttgttctggcctataaagttgtgattccacactggaagaggcaagccaaaaagaagacctcgggctgctgctcccacttccccaaactgctcagcttctaaagcagggtttcagaaagaagcatacaattgtccccactcccagctctgagccccgactccagagattttgtgggggatgggg

SEQ ID NO: 194560 - DNA, 239 bp, Homo sapiens
aaagaggcagccacaacacctggcagaggaagcctttctctggaatgaaaggaaatacgggagcaaaggcagcccttgcattccaatttctagccccttgaccacccatcttctccccttaggcccacccccaaatactctctctttacaaacatctgtctgctcaaaagtagccactaggattctgaaacttcctctttacaacaaaactaaactgttgcaacttgttgctaccattc

SEQ ID NO: 194561 - DNA, 226 bp, Homo sapiens
ccacagaaagctttattgaacaatgcttatccaggtgatgaagatctgggtaatatgtcaaaaacaagtgtgcaggaagaagtggaagggagagaaagactgtaggtaacagagttaggagccttttgtaattgatgtaggtgagaataaatttttgagccttctgatatcccaggacttcctgttcttcaacacttcactgaataccacttgtctacatgcatca

SEQ ID NO: 194562 - DNA, 369 bp, Homo sapiens
tggtgggaaagattcgggtggttgaaattgctgtgattatagtgagtgaggtcttgaaggcaggttaagttctaaagcccgaacaggacaaaaatctctgatcaaaataacccttaagagtccactcattaggaagaggcttggtgaatatgcagcaccatctcccagcagctcaacataggcaaccttcccttcaatcctggacagatatgtcattcatgtgaatgtggggactatatgaaaatgaaaaatactggcatctcagcatgtaacatgttaatcccaaggtccttgccaagagacaaggaaaaacacccactgagaacttcattcccagtcacattctgctcaaggtcataaacttgtaaa

SEQ ID NO: 194563 - DNA, 294 bp, Homo sapiens
gatggaaattgcattgaatttatagattgcttttagcagtatggttgttttcacaatattgattctacccatccatgagcatggaatatgttttcatttgtgtgtatcatctatgatttctttcagcagtattttgtagttttccttgtagaggtctttcacctcctcggttaggtatattcataactatgtttttgcagctattgtaaaaggggttgtgttcttgatttgattttcagcttggtcgctgttggtatacagaagagctactgatttgtggacattagttttgta

SEQ ID NO: 194564 - DNA, 373 bp, Homo sapiens
ggccggtaccattttggttggacgatcagagtccagttacataacatactctctgaaaaccacaaagtactttccgaatgtgagatagtagcagtgctatcataattttggttctgactatagcacaaatagcttttaaagatagatttacttgagccatatatgtgggtcctctacaaataagactattattattctggtgtctttttccatcgtttttaagttacaggataattcctcccagtaaaactagcctccaaaggttttaatggcaaaatccaagtattcaaatctataatcagccttttaagcaggaacttagaatgacatgacggttttaattgtcttgttcttcgtccaaccaatatggagt

SEQ ID NO: 194565 - DNA, 195 bp, Homo sapiens
atgttcatagccattttatttgtaatcaccaaaatgtgaaacaaacattcatcaacagatgaactaataagtagattcctgttttggcatcatatgcttttccatacagtggaatacaacagccatgtagaatgagctattgatagacacaacagcaagaatgaatctccaaacaattatgttatgtaaaagatg

SEQ ID NO: 194566 - DNA, 257 bp, Homo sapiens
ggacttcaccctatggtagctgatggggacattagagaaattgtcattcctaccagacaatttagcatttgattatctcttgccttgcactggcttctgacaatttcttatgcctgaaccttatctcaccaatcaaattgtcagccacatagcattaacaaattcttgcagcgaattctatgcagtgtttcaatgtccattattttgctgggttcttatggcaagtttcccctttcagccgtctctagcatcaggct

SEQ ID NO: 194567 - DNA, 365 bp, Homo sapiens
gctgaaaactgagatctcatcttgacacatacacatgaagctgactgtgagtctgcacagtactgacctttgagaataagcatgcatacagggtgacacattttcacatgtgctctactttaatccttatgaagcaaccttgtgagagaaatattatgatgtcctgaaattatagtatttggcctgtaagttcttcctagccaacgagttcacagttagaaccagttttacgttaaccacatctgctgaatacagaaaaaaggaaaccactacagatggaattttaagtcttcagtttataacagacaatcgagagagaatgagaatgtttcagttcatttttactccttgtagctgcctgaccc

SEQ ID NO: 194568 - DNA, 660 bp, Homo sapiens
gaagaatgtaggaggaatcaaccttatcgtatagctaccgtcatgaagactgtgttattggtgaaggaacaggcatatacataaaacaatagaacagaacagagaacctagagaaagatccatacaagcatgcccaactgatttttgacaaaaatgtgaaagcatttcaatggaagcagaatagctttttccacaaatgttgctggggcaatcacacttgcataggtaaaaagagagagataaaaaacaacctcaatctaagtcttagatcttacacaaaaattaacttaaaatggatcacggacttaaattaaaactataaaacttttagaaaaaaataggagaaaatcttcagaatctagggcaaggcaatgaactcttagagttataccaatgcatgatccataataggaaaaactggtaaattaaatttcatcgaaattgaacttttgctctgtaaaagaccccgttaagagggtgaaaagacaagctaaagacaagaagaaaatacttgtaaaccacatatctgacaaaggactagtacctaaaagatataaagaactctcaaaattcaatagtaataccaaaaaatgcaattagaaaatggtcagaagctatgaaaaggcatttctctgaagaaaatgtaatgatggtaaataa

SEQ ID NO: 194569 - DNA, 741 bp, Homo sapiens
  misc_feature (669)..(669): n is a, c, g, or t
cttgtccagcctcccaagcaaggcgaccctggcgtactgttcccgggtccctgcattctctgcccctctgctccacactgctcatcacgactgccttgctgctttgactccagaagaggcctccatgatgctcgtttttcgtttttttgttttcttttttccttaaatacacaacaggaagcacagcttgaatattcatattttattttaaagttcttgaaaacagcaaaacaaaatgaagctagctttgaagtgctgtgattacacagaaaatctccttccattcattcaaatcatgatgactgggcacctacgatgggccaccaccatttgagacaccattctagcttatccattctaggaggtgctacacagataaaaatctctgccttaatggacctcttatactttagtgtgggaagaataaacaacagataagtgaaatatgtagagtacgttagatagtgataaatgctattgaatacatacatgccgagtgaacagatgaatctactgcagactgctgttgagagctgccactcttggtgtcagtttagagtctgaaaatgtggaaggctgactactgaaatgattttcttataagcacgagtcagaagcagagggagaactcagaccttgatctttgtgacttagctatagggcctcacnattggatgagattttaaataggatcctataagtgacaaagtattgtgcttagctataatgcgttatacgcat

SEQ ID NO: 194570 - DNA, 559 bp, Homo sapiens
cttgtccagcctcccaagcaaggcgaccctggcgtactgttcccgggtccctgcattctctgcccctctgctccacactgctcatcacgactgccttgctgctttgactccagaagaggcctccatgatgctcgtttttcgtttttttgttttcttttttccttaaatacacaacaggaagcacagcttgaatattcatattttattttaaagttcttgaaaacagcaaaacaaaatgaagctagctttgaagtgctgtgattacacagaaaatctccttccattcattcaaatcatgatgactgggcacctacgatgggccaccaccatttgagacaccattctagcttatccattctaggaggtgctacacagataaaaatctctgccttaatggacctcttatactttagtgtgggaagaataaacaacagataagtgaaatatgtagagtacgttagatagtgataaatgctatggagaaatgtaaaagcagagaaaaggatgaggtatgagcagactgcatgtcaaacaaggtgagggaacacgtcactgagag

SEQ ID NO: 194571 - DNA, 306 bp, Homo sapiens
ccaagatcacaccactgcactccagcctgggcgacaaagagagactctgtctcaaaaaaaaaaaaaaggattctaaattgactcggcttgtgccatagaaatggcacagcaaagcctggatggcagccatctgtgtacagcatggtttatggaatattttaagtccactgttgagatctacagctcagaaaaaagattcctttcaaaatatgactgttcgctgacaatacggacaatgcagctggtcacccaaaagctctgacagagacgtacgcagacagtcacgctgctttcatgcctgctaac

SEQ ID NO: 194572 - DNA, 475 bp, Homo sapiens
ctgactgcagctgtgctcactgtaatcttgctttatggagcttacaacacagaggggaaggcagacaataagcaaaatcaataagcaaaatgatgacaataatacagtggtgacagtgcctgattaaacaaaaaagaaagcaaccaaattgaatgctaaccaaagaatattcatgtcactgggaagagcatggtaaaactgtctatgctttagcaggacacaaactggtcagtttatcaagctttgcttttctcttaacttctttgaacctttaatactccaaaagtttcaagttaggtgtagaataatctcaggtaaaactaaagttagaagtcctattctcagaatactaacacatcctctgctgagcaccatgatagcctgacagacttcaaacattaaggattctctaggctgggtgtggtggctcatgcctgtatcttaggaccttgggaggcacagattgcagcggaaa

SEQ ID NO: 194573 - DNA, 520 bp, Homo sapiens
gtgcatcagctgtgtcatcaactcacaccaagggtgggggttggattctcttcttccctgttgtgatagacagatgccctgtcattatgtttttatgtgaaatttcacagtgaaagaaggaagccactcttgagaatacagcaatttaaatcaggttgtaatttttaaaaagtgatttacaaaaggtctttcccaaaatactgccatcataatcatctagggtggggagaaaaatagggtgcggagggcagaatcacccctcatccttgctcttccagcagggaacactcattttcacacccttgtgcctctgcagccccaccctttgttgaggtttgtgctgggcatgtacgttccacagagtctgctggtttccagtgtgacagaaatctcatttgtgataaaccttgattttgaattgtagtacatgaaactttaaaaaaagcagacattaaaactccctgtttttttccctaggaaaaggagcattccatcttctggcatcactgtccttgggact

SEQ ID NO: 194574 - DNA, 322 bp, Homo sapiens
tccaggggaggaggacttacaaataacccactaacttgataactgactcctctttgtctaattttccatgacaccaatgttcatagggtaactctcatgatggatttgagtggatggcttttctcccatgctgctctagaaaatagtttatgctaagtagtatgcagtgtaaaaaagccatgatacccaaccttgaggagtttatatatatgtattctactgaaaaatatcacttgcacttttgcctagagatatcaaattcactatgttatttgatactctttgtaaaactatgtggaagagacacaaatttaaaaacaaa

SEQ ID NO: 194575 - DNA, 298 bp, Homo sapiens
aaagaaaaagaaagtagtttataaagagaactgtcgtagtaatatagccaacaggtgagtgtgtttgagcaatacaagtagcaggaaagatggagaaaaccaggcagataattaaaaagtgtgaactaataggacctggtgatttcatgaacggatgtgaaagaattcatggttaatgcatactcatttgcatgtcttctattatgaaactctattaaaatgcctagaagtgaatgaatataaaataaacaaacactgaagggagggaaggttatcattagctgagaataattttatc

SEQ ID NO: 194576 - DNA, 550 bp, Homo sapiens
tgtcagcctcccaaagtgctgggattatagccgtgagctaccacgtatggtccattatatgtatttttacaagaacattctgtgtgctgatttactaagtatggattgataataaatcagcttttgcctgggtgtgacttttataaagtgtcaatgttagaaataatatttacattctgctgaagagttcttgtagtacaattgtgtagataagttataaattttataaatcagaactctgtgcatacttatatgtttttgataccatttttttgatatatgcatacagactatgtattctgagtgtcaaataaactttttttaaaggctagaattaaaatttagtttatgacattgaccaaattgtccttttctggtgaatcgactattttgatacatgtgtcatagtttgcatctaagtttttcttcccttagtttcacgtatgaataaccagatgttttcacatttgtatggtggccataccaaaaattactcttcttgaccccaggaacacccctcttttcccgtttcacttagagatcctactaa

SEQ ID NO: 194577 - DNA, 944 bp, Homo sapiens
ccataaaccaaacaccgcacactcgccagcagttaaccgcccatgtcgcagctacattttccacttagtaaaatgcatatccatttgcttcacaaatcctggcaaagacagaatatttagaatattctgtttagaatattgcagatcatggagggaaacctaagcaaaaatttaaaagtgtattcattctcagatggatttgaaaattatataactcaagataacatttagaaagaacaaaatacagatatggcataaatgttgtttttgacattggtgagaaacaaaacttgtatgcctaagattaataatgttttcctttttcgtctttgtttcttttcatttttcagctttgacacaatcatgaaaatttatagaaacttttaacatgaaacaaaacaactttaaaactgtcacatacactctttcaaagactgcatattctttatttttgcaaaggaaatatgcaatttccttagcaagagaaaggaatgtgacattttcttgtcctagtcaccaagtttaaattatatttcaaggaaatagttaatatttgcagttttatgtctcgttatacatctttgtggcattttagaagtgttttctgtaaaacccagggaaacgaaatgatttcacacttttatgaaggtatcagcaaaatgtaatttaaatttgttttccctccttcagagaattgaacctaaagctttgtgtatggaacttctgttaggtctagtaattacttaacatttgtaatatttgctatatcatttttaggaaaagaaagtgtaaaaaacacgagtctccttcactgaaacagcaggtcacttagagagtaaaaacaaagttggcaatagagtaataattttacatacttagagcacatgaaatgaactctagaatttgtttttaaacaaatttcttgaactctagactttgttttt

SEQ ID NO: 194578 - DNA, 458 bp, Homo sapiens
gaaataatttacgagtaacctagattttcccaaatctatctcatggagctattgtgaggatcaaatgagacagactatgtgaaagtgttttgcaaactacaaaacaatttagagatatatatgacaattatttatgtcattaccagtgaaatgcttttttgactttcattaagatccattcctagcttttccagagctaatacatttggaaataagatccaccctaaaatgctaaatattaataccattttagattttagggatgtttaatttttaaaccctacatgctatagggattccatatctcaagtttaggagacttaatttttaaatttaagctcacttgtcctgcctctgatgtccttaccaattatttataatgttatacattattttctgcagccctaagggaaaatctccattgtggtgacaaagtaagtggcagccatacacaggta

SEQ ID NO: 194579 - DNA, 676 bp, Homo sapiens
agataatggttacttggatgaggcaggagcagtggagggtgaaaagccctcaaatgctgcatatgtcagaataacagattggatgtgggatgttaaaaaaaatgacaactccaaggtttttagttttagtaactacaaagatgtagttgccattaattgagatggagactaagtagaacaagtttttttgttttttgagtggggcataggaatttatttaaacttattttgagataattatagattcacttggcagttgtaagaaataatatagagatcctgcatatcccctacccagttttcctaatagtaacgtctttcaaaacaatagtgcaatatcacgaccaggatattaacattggtacagtcaaaatacggggcattaccatcaccacaaggatatctcatattgcccttataaagccaccccacttccctcctacctcacccctcctgaactcctggtaaccacaaattatccatttgtataagttggtaattttgagaatcttacataaatggaataatacagtatgtaacttttgggattgactttttttcacttagcataattctctgaagattcacctaggttgttacatgtgtcaatagtttgttcctttttaaattttaacttttattttttcgagagtaagtcttgcactccaggctggag

SEQ ID NO: 194580 - DNA, 567 bp, Homo sapiens
cagccacttaaatgagaacctcggataaacggtgaacacttaaaaatatacaagaatgttccaaatagttcatgggatatctttaaactaaaacaattatttgtggttaatctgaaatttaagctgggctgcttgtattttcatttgctaaattggacagcctggccaacacggcgaaaacccatctctactaaaaatacaaaaattagccgggtgtggtggcgcatgcctgtagtcttagctacatggaaggctgaggcaggagaatcgcttgaacccgggaggtggaggttgcagtgagcagagatcgcaccactgcactccattctgggcgacagagtgagactcaatctcaaaaaataacataaatgtttctgccattgtagcatcatacagaaaaataagtagtttcagtgccctaaaaatcctctgtgcttcacttattcatccccaacccctggcaaccactgatcttttcactgtctccatagttttaccttttccagaatgtcatataattgcaaccgtaaggtaaatagccttttcagattgtcttctttcacatag

SEQ ID NO: 194581 - DNA, 265 bp, Homo sapiens
tgtacttttgcatattttcacaatggtaagtggcatccgttcacttctaagtttgggattcctttgagcatttcttgtagtctagtggtaatacataaattctctcagcatttgcttgtccagaaaatacttcatttctccttcatttgtgaaggataattttcctacatatagtatccttggcagacagttttgtcttttcagcactttgaatatattatctcattctcttcttatgtattaggtttctgcagaggaatctgct

SEQ ID NO: 194582 - DNA, 906 bp, Homo sapiens
ggtgtgtatagttttcctgtctcttttcaggatatatattatatcactgatacgtattaccagtattctagattgttgtgttttaaaacatttatgtgattattgtattattattgttctaccacttgcttgtttactccacaaatgtgtttagatctatctagtcttattgaagtatctatagctacatatttgtagttatttcatttaaactgttttatagtattccatcttagaactgaaattatttgttccccatttgttaaaggatatttaggttgtttaaagttttttcctgttatgtacactgccacaatgagcttctatttaaagttgttttgttttgtttttgagtcaggggctcactgtgtcacccaggctgaagtgcaatggcgcagtcatggcttactgcagcctcgacctcctgggctcaagcaatccttctgccttagcctcctgagtagctacaactacaggtgtgagccaccacacccagctaattttttattaataaattttttgtggagatgggttcttgctgtgttgcccggactggtctctaattcctggccttgtgtggtcctcccacctaggtctcccaaagcagtgggattacaggtataacccaccgcacctggccttaacatttaagtgaaaattaactttttccttattatgtaagcaatcatatcttcattattgaaaatataaaaatgtaagcaagcaaacagaagaaaacaaatgtacataatttcccagtcccacctatccggaatcaataggtgttaattaaccctatatattttccagactttgttaatatttgtgttcatgttgtgtatgcatatagttatatgtgcatggtgggtgtgtatattaaacaaataggaaggtactttactattt

SEQ ID NO: 194583 - DNA, 373 bp, Homo sapiens
catagtgctttttagctgatcttccctaaagaccagtttcatcaagttacttcttagaaaatgttatcggcctacttctgcatatcatatgacggtttctggttcttctgttgagctttcaaatccctagcactgattttctgtgttaatcatattgacatatgattaaatgatacgatatctagaatatatgtcacctcatactatgtttttttccatctatgactttactaaattattctccttacctgaatgtcttttccttttccccctatcattctgaaacactgccttgtgaaattaacccaggcactttagcaacatgtgacattctctgagggattgtgctgcttttttaagggtccaaaaccat

SEQ ID NO: 194584 - DNA, 1045 bp, Homo sapiens
ggatttttagtagagacagggtttcaccatgatggccaggctggtcttgaactcctggcctcaggtgatctgcccacctcggcctcccaaagcactggaattacaggcatgagccaccacccagccgaatttttattttatttttctgagacagagtcttactctgtcactcaggctggagtacagtggcacaatctaggcagaggcaacctctgcctcccagtttcaagcgattctcgtgactcagtctcctgagtagctgggattacaggtcagtgccaccacgcccggctgatttttgtgtttttagtagagacatggttttaccatgttgtccaggctggtcttgaactgacctcaattgatccactcgcctcgcctcccaaagtgctgggattataggcgtgagccactgtacctggcccattttttttaaaagtgaaaaaccaaactaaagtgtgataatagttttgaacatttagtggagtgtaagaaaagagaacccatttgactcaggttcactgataaagggttctatttccttttctaggagttgagcattgctgttggttttgtgggaggtaatatttacacaatcatactgctgtggatgtagctaaatagtttattggttaatccccacacaagacaggaaagatgtaattataactacagagagaaaacaatcatcaaggttttaaaatctagcaatgcaaagggagtgaaagagcagacagaagcctgaggctagaaggcaggaaaagaggcaggagggagagggaccttggtactcattttcttcttttacatggtgggatgtagagaaatactgtgtaatactgctgaaacaggaaacagagctaaccaattgaaggactaaaaatagtataatcaagaaaactagagacaaaatagaggtgaagtaagtgtgaatgagttagatacgggggaggcggtaagtcagtagattctgtctgaagttgacacatcagggatagaagcctgtcatttcgttaagctgatcaccatagaaggactgtaaaag

SEQ ID NO: 194585 - DNA, 309 bp, Homo sapiens
atcagccaaaaaatccccaacacaacaagccttcaagttatgaaaaaataatgagtatgtttaagcacagttacagagattgcatttcctgacttttagagttaaaaaaaaaaaaaaaacaggatatagtttcttctttttttctgttttcctttttgtaaatgcagcaggcagacggttttctttttcctccaggcagaacaactgctctccactctagccccttctccctagggctcccccttcacactcccctacacagagccactttccctggaacaggggaggcgtgtgggcagagaggtcaag

SEQ ID NO: 194586 - DNA, 882 bp, Homo sapiens
gcagataaacaagcactggcctcaggataagcagtgttgaaacatttggaagctcctgcagatgctgaataactgacctccagcctctgttccaccagccacaactacagctttgattggagaagagactgatttcagccactttctcctggtataaaagcctgccgttggtggaaaaggaaaaggtggtccagttagacaagatgccaccggcttctgaaaccagacatctttgaaaacccacccatctacctgcaggaaaagagacagggtttcactatgttggccaggatgttcaacaacttctgccttcaagcgatcttccctcctgggctccccaagtgctgagtttacaagcatcagccaccacacccagcctatgacattttcttcattatggctggtactgcctcatgaaaagggggttcctcatgctggatctgaacaacccagcacaggcaagtctggggagcaaggcaggagcctgcatgtggactcaaaggaccggcacccgaaacaaagcagtggctggcacaggtggacaaaccaggcaagaaaagcaactgtccttcggagcagagtccacgtgatgggaagaaacagacacagtctcactctgttgcccaggctgaagtcaacggcatgatctcagctcactgcaaactccacctcctgggttcaagcaattctcgtgcctcagcctcccaagtagcttggattacaggagaaagaacctctcttctactgatcttgaacttgaaggctggtccctctcttctgggggccattgtgaagagaggctgcctaagcctgaagtcaacttaaaggaaggtgaaacagagaaaaaccacacattcaggcatttgatgtcctaaagcagat

SEQ ID NO: 194587 - DNA, 777 bp, Homo sapiens
gcagataaacaagcactggcctcaggataagcagtgttgaaacatttggaagctcctgcagatgctgaataactgacctccagcctctgttccaccagccacaactacagctttgattggagaagagactgatttcagccactttctcctggtataaaagcctgccgttggtggaaaaggaaaaggtggtccagttagacaagatgccaccggcttctgaaaccagacatctttgaaaacccacccatctacctgcaggaaaagagacagggtttcactatgttggccaggatgttcaacaacttctgccttcaagcgatcttccctcctgggctccccaagtgctgagtttacaagcatcagccaccacacccagcctatgacattttcttcattatggctggtactgcctcatgaaaagggggttcctcatgctggatctgaacaacccagcacaggcaagtctggggagcaaggcaggagcctgcatgtggactcaaaggaccggcacccgaaacaaagcagtggctggcacaggtggacaaaccaggcaagaaaagcaactgtccttcggagcagagtccacgtgatgggaagaaacagacacagtctcactctgttgcccaggctgaagtcaacggcatgatctcagctcactgcaaactccacctcctgggttcaagcaattctcgtgcctcagcctcccaagtagcttggattacagctttctctttccacagggtggttaggaaggtagaaggtaatcctggagcttcc

SEQ ID NO: 194588 - DNA, 686 bp, Homo sapiens
gcagataaacaagcactggcctcaggataagcagtgttgaaacatttggaagctcctgcagatgctgaataactgacctccagcctctgttccaccagccacaactacagctttgattggagaagagactgatttcagccactttctcctgtacatgtcagggcctgatctacattggcatacgtggacctgcctcgttctttgtaacaggtataaaagcctgccgttggtggaaaaggaaaaggtggtccagttagacaagatgccaccggcttctgaaaccagacatctttgaaaacccacccatctacctgcaggaaaagagacagggtttcactatgttggccaggatgttcaacaacttctgccttcaagcgatcttccctcctgggctccccaagtgctgagtttacaagcatcagccaccacacccagcctatgacattttcttcattatggctggtactgcctcatgaaaagggggttcctcatgctggatctgaacaacccagcacaggcaagtctggggagcaaggcaggagcctgcatgtggactcaaaggaccggcacccgaaacaaagcagtggctggcacaggtggacaaaccaggcaagaaaagcaactgtccttcggagcagagtccacgtgatgggaagaaacaggtcatgatacttttgagtggttac

SEQ ID NO: 194589 - DNA, 339 bp, Homo sapiens
ctttttgaccacatgactcttccaggtataaaagcctgccgttggtggaaaaggaaaaggtggtccagttagacaagatgccaccggcttctgaaaccagacatctttgaaaacccacccatctacctgcaggaaaaggcaagggacctgacctcgcctgggctcagggaagaggttgctgggatcataaccccaggaagagacgggatggaaggagagcatgcagggagcagaggacaggctactctccaaggaggagagggaagaggccacagaaatggaaaaggggccaggacaagtcagtggagagatggtcagggcctggcgaggaggagcagg

SEQ ID NO: 194590 - DNA, 477 bp, Homo sapiens
agggaggagtgacggctttgagaggtccctgcaagaggcagagtcagtgtttgaagagtcactacatctggaacagaaaggagactgtgctgcagctttggctctctgtaatgaagctatctctaaactaagacttgccctgcatggtgccagctgtagcacgcacagcagagccctagtcgataagaagttgcaaatcagtattcgaaaagcacggagcctgcaggatcgcatgcagcagcagcaatcaccacagcagccgtcgcagccctcagcctgcctcccaacacaggcggggactctctctcagccaacaagtgaacagcctatcccgctccaagtattgttaagccaagaggcccaactggaatccggcatggatacagagtttggggccagttctttcttccattcacctgcttcctgccatgagtcacactcatcactatctccagagtcatctgccccacagcacag

SEQ ID NO: 194591 - DNA, 156 bp, Homo sapiens
gagtaaataagacattggcaggagatttcattaagtgctatgactaggttgtgaattaaatctcaagagttagtaattaggctcataaggaagcagaaagatttggaaggttttaagtaggaaatactagggggccagtaccttgggaggcagagg

SEQ ID NO: 194592 - DNA, 101 bp, Homo sapiens
tagatgtctaatattgaaaaatttatttagccattctaaagcatattttattcatttgtaaaattggttggttggggataaaatgagataatatatctgaa

SEQ ID NO: 194593 - DNA, 1807 bp, Homo sapiens
tggcacgaggcaggctccatgaggaggcaagccttgggaatctgagggatggagactcagttccgcagagggggtctggggtgcagccctgccagcatcaagaggaagaagaagagggaggactcaggagactttggactccaggtgagcactatgttctcagaggacgacttccagtcaacagaaagagccccatatggtccacaactacagtggtcccaggatctgccaagagtccaggtttttagagaacaggccaacctggaggacaggagtcccaggagaacccagaggatcactggaggagaacaagtgctgtggggccccatcacccagatatttcccacagttcggcctgctgacctaaccagagtcatcatgcctcttgagcaaagaagtcagcactgcaagcctgaggaaggccttcaggcccaagaagaagacctgggcctggtgggtgcacaggctctccaagctgaggagcaggaggctgccttcttctcctctactctgaatgtgggcactctagaggagttgcctgctgctgagtcaccaagtcctccccagagtcctcaggaagagtccttctctcccactgccatggatgccatctttgggagcctatctgatgagggctctggcagccaagaaaaggaggggccaagtacctcgcctgacctgatagaccctgagtccttttcccaagatatactacatgacaagataattgatttggttcatttattgctccgcaagtatcgagtcaaggggctgatcacaaaggcagaaatgctggggagtgtcatcaaaaattatgaggactactttcctgagatatttagggaagcctctgtatgcatgcaactgctctttggcattgatgtgaaggaagtggaccccactagccactcctatgtccttgtcacctccctcaacctctcttatgatggcatacagtgtaatgagcagagcatgcccaagtctggcctcctgataatagtcctgggtgtaatcttcatggaggggaactgcatccctgaagaggttatgtgggaagtcctgagcattatgggggtgtatgctggaagggagcacttcctctttggggagcccaagaggctccttacccaaaattgggtgcaggaaaagtacctggtgtaccggcaggtgcccggcactgatcctgcatgctatgagttcctgtggggtccaagggcccacgctgagaccagcaagatgaaagttcttgagtacatagccaatgccaatgggagggatcccacttcttacccatccctgtatgaagatgctttgagagaggagggagagggagtctgagcatgagatgcaaccagggccagcgggcagggaaatgggccaatgcatgcttcagggccacacccagcagtttccctgtcctgtgtgaaatcaggcccattcttccctctgtgtttgatgagagaagtcagtgttctcagtagtagaaggcacagtgaatggaagggaacacattgtatactgcctttaggtttctcttccatcgggtgacttggagatttctttttgtttccctttggtaattttcaaatattgttcctgtaataaaagttttagttagcttcaacatctaagtgtatggatgatactgaccacacatgttgttttgcttatccatttcaagtgcaagtgtttgccattttgtaaaacattttgggaaatcttccatcttgctgtgatttgcaataggtattttcttggagaatgtaagaacttaacaataaagctgaactggtgttgtgaaacagag

SEQ ID NO: 194594 - DNA, 645 bp, Homo sapiens
taggtgttctgtctgctgagaggaagatatttgctattactaattatttagtttggtgcaacaggccagaattgtcctaataatgtcagtgtttaattggtgatatgtaaaatttcttcgacagtttgtaaatcaaattagatactagaaaaaagtttaatgtgtaaaaccatttattcattttgttgaacataggaatcacttgtggaatggcttggacacattatagaattagctttttagcaaagtgattagaaggggtaaatctcctatgtctggtatttggacttctgccagtcttacctgttaggttatacttgaccctaaagaagttcctagtgggtgtgccagggaggagaaccaaaaatataatgaaattggataaattcctcaggtaaaagaaaagcagtaccagtaaagaccaaaccccactggcaccaaagcccagaaatggaatggagctaaacaatataaaggaaattagagcaaagtaggaaaaaaccttggcaatttaaaaattgtgcccaagatagagaaaagaggagagagtgtgtgtttgtatgtgtgtctgtctgtgtgtgagtaatgacagtgataaagggagagcagacaagtctttgagacctgcatagccattctcggggt

SEQ ID NO: 194595 - DNA, 311 bp, Homo sapiens
ttgagttgtttatccgctcatccgttgatagacatttagacagtttccactttttggccattatgattggttattatgaataatgctgctgtgaacattggcatgcattttaaaagcaagtgcttgtggattttggaagcccttgaataaccaaagacttttaagactaaaggaagatcaaaaaagataaaatattttaacactgattgcataaaaagtataaaaaatggtaatgcctaatatagcaagtttgtattgcttatagcagtgtaaatttataatgattttggaaggcaactgggtgtcataaa

SEQ ID NO: 194596 - DNA, 189 bp, Homo sapiens
gaatatgtttgaagaaaatgtctttataaaattctttttaaactataaacgggtgtttaaattaatgtaaaatttaggaaattgatcgaataaacatgaattggcaggaaatgaatcaacctgtgactaagggtagttgttcgcccatttctttgataaagcatgatcttggctgtattcatttgtata

SEQ ID NO: 194597 - DNA, 526 bp, Homo sapiens
ctaaaaggcccagcagtgcccagacccatctctctttgcacttgtaaagtcatggaggtcttcttcattcatcacccaggtctttaagccacctctcaactttttcaaagtatcgccttaagtcggtacctgggcctagtctcaccagcagtaacgaggactcactggcaaatattaataatatccctttcctaaaattatgtctctgtatgtccacttgatcatttctgagcctctttgaactcttccttttttgaaaactcttggggctgggcatggtggctcacgcttgtaatctcaacactttgggaggccaagccaggctgattgcctgaatccaggagttcgagaccagcctggccaacatggtagcattctgactctactaaaaacacaaaaaaattgctgggtgtggtgctgcacacttgcagtcccagctactggggaggcagaggtgggaggattgcctaagcccaaggaggtagaagctcgcgagtgtgctactcatggtacgtcagagaggttc

SEQ ID NO: 194598 - DNA, 118 bp, Homo sapiens
agagggagggagggacaggaaggaaggaaggaaaatacagacaggaagggaaaggaagggaaggaaggaaggaaatacaggaaggaaaaggaagacaggaagaaggaaaaggaagaca

SEQ ID NO: 194599 - DNA, 244 bp, Homo sapiens
gtttgaaattttgcctaggataaaacggaaaaattctacttaaggaaactatatacaaattattttgtgaggagcagtccctgttggtgtatcctaaatctgatgggtacagctttcactggtttgctatttaggcggtgagatctggatactattcttctccatttattttgcaattaaattaaatctggctttaaagacaggccagaagacaaaggaggagttcaaactatgtcagccagag

SEQ ID NO: 194600 - DNA, 142 bp, Homo sapiens
atgattcctggaaatatggggacagagattaccataatttaacatctcttttcaggaacacttatttcattttcctcatttttaaatgtgagtactttaaaacttacagaaaagtttacaagaaagtacaatactaaattta

SEQ ID NO: 194601 - DNA, 171 bp, Homo sapiens
aaggaaacattctctcaggctaacacatcatttagcatcctaaagaaaactgtagcagctgcaaaccataacgtctggatacgagactcaaggcaaaagaattccctggcttagctgagagcatttgacatcgggcctcactgttaaagccagttagagcaaacagtatgc

SEQ ID NO: 194602 - DNA, 473 bp, Homo sapiens
gaaaagcaaatcgaacaagaggggagaaaagtgggtagcttaaactgtctttatagaaactatgtaattaattgaatgcatgtgaaatctatagacatggttgtaatttaagtatagatgttaaaaataatgtaggatctcaaactttaaaactttgaattcaaataatacataagcacatagaaaagttgaaaataaaactggcttgaaaaaatcatactaagtaaaattaaaatgtgtgtttattgcatttataagaacctcagttatgaccaaatatttcagaaatagtggttagctttcttgaaagaataaaggaaaattaatttaaatgtatggggtaaatatgttggtatttattttaaattgtgctgtggcctgggcttctcaaaggaagaaaaaaacagtgaaatatgaagtcaaagtaatgaagttcaagatggtaggtttagcatatgcatttgcctattctc

SEQ ID NO: 194603 - DNA, 593 bp, Homo sapiens
gtactacagtttatttatccattcacctactgaaggacaccttggttgcttccaagtttgggcaattatgggtaaagctgccataaacatctgggtgcaggtttttgtgtagacctaagttttcaattctgttgtgtaaatactaagtggtatatatggtaaaagtatgtttagtttcgtaagaatgccaaactgccttctgaagtggctgtactattttccatttccaacagcaatgaatgaaagttcctgttcctattgctccacattctcaccagcattgggtgttgtcagtgttctggattttggccatgctaacaggtgtgtagtagtgtctcactgttataattcacatttctctgatgacttacaatgtgtaacatcttttcacatacttacaatatgccatctgtatatccttctttggtgagatgtctgttaaggtctatgccttatttttaaaaatcaggttaagctaattgttttttttcttactgttgagattcaagagttctttgtatgtcttttgcatacattttctctagtctgtggcttgttttttcattctccagacaatgtctctcacagagcag

SEQ ID NO: 194604 - DNA, 340 bp, Homo sapiens
ccagcgcgcccagcctcgagtgtttttagattcacagtagatgaccatttccatttctggttcaagtccttcattttatacattaaactaaggtgcactgactcccagtccatcgcctttttggtatctttatggaagtaaaatgtggcaagctttttttcagcctcaaagactgtctcagagtaaaagtttaagaagtactgctctaaataattttattaaatatgccttattagatgaggaaaactgaaatatttttatacaagccttttgctgtagaacaatgggacagaataaaggtagctcacaaaataagggaacatttcttgcctgttttttt

SEQ ID NO: 194605 - DNA, 452 bp, Homo sapiens
atggcatgtaatttatgccacagtaaattggtttagaaaagtcttttaatacatgaaacacctactaaaacaaatgaattaaaaaaaaaaacccccacaaaactcttggctttgaatgactgtggttctgccctttcctggttctcctcatgcctccgggatgagttgcagtctctttcatggaacgctctcttctgctaacccggtaatgagtgttgcctctcaggatccagcctttggccactgctttctaatgccagagctcctctctgcatcatttcactcatactcctgcttttcacaatgatcaagtgactgtcaggggtatgttcctatcctgacctcttctctgagcttcagactcattgattcaggtggttttgtttttgttagtgttttttttttttttccttcaggatatcattagctggtgcctgtgataatggacacca

SEQ ID NO: 194606 - DNA, 516 bp, Homo sapiens
caaatgaaaatagtgtatagcctgagcttagcaattgggcagtagacaaaggaacatagatatcacaatgtggaaagaaagataccagtgtgatgtagtgacgaaacatttgataaaactatcagttgaacttggaagataaggcaagtgtctattgaccctatagctctaaggaaagtagttggaaatacctgggatgttagtgtatcttggtccttctcacttgtagaaaggtattacaataaatagctgaagtcaagaagaaatagacaggtttacaagcagaaataaaaaggaatctggggtctgaaaggacaggaaaatcaggctgattctagatcccaaacacacacaaaaaaagactaaagatggtttcaagcaaagaagacccgttaagatttctcaggtttgcaaagtagcttagattaagggagttacttttctacctttccaccccgcctactctttcagatgccctcaaagtagcttccattaagttgaagagaggtggaaagg

SEQ ID NO: 194607 - DNA, 329 bp, Homo sapiens
ggttttacctcaaacgtttctaatccttcttcaacaaacagttgctggctttgcatttctctttcctccaaaatcaccaaggcctcgacttactgttaaagaggactctgtatattttttaatgaagagtgttgtttttacctaaatcaatctggcctggtatatgacaacataaaaaactcaaggatagagcccaaaaactcgccaaccaagcaaacaataacgttgaacccccttggacactctctgattggatgtcctggatactcccaattcttagtcctttaatacctattttcctccttcttttattcggaccttgtgtcttt

SEQ ID NO: 194608 - DNA, 637 bp, Homo sapiens
cagagaagaccaagaacatcagagtgaatgccatcattttcagttgccattgccaaacatctccacagcctccttagctctccagctgtgctcttaattctacttctctaatttctctaaaacatcccttctcaaattattcctctctgtcttaaacctcccctcttctgctgactcctttcccgtggtctatgaacatgttcaaccactccattttaatcacagtcttgtcatggaatgtccccataatttttgcccaaattgctctctctctctctctttctctttgactgtctgcctctcatatccttctctgccataattcttcttttatttctgtatgctctttttctaacttctccagtcactatgatctgacttctgatccttctccctcaaacccaaataaaatgacccttgctggggctaccagctttctcctacttttcacatccagtgaacacttttctgagtctgttacttggtatctctgtggcattgatactgttggccacttctcatcttggtcttccttccatcattctaaccaaactgttgctgtctcttcggatcttctttttctgctgatctctacatattggtattgaaatgtcctcagattttatactgacttctt

SEQ ID NO: 194609 - DNA, 291 bp, Homo sapiens
gcaaaaaggaagagctcaaaacaggaagattggttgaaaactggttaagataataggcacagttgaaggcaggaataccaaactaaaattgggtgatttcaagacaaagtgttcattctgaatattgagacttctaaactctttttcctcaccagaagactgtcactcaggtttataccttctagcagtagcttagaagagccttcctttgaagaatctcactagcccagtagaaaagactttaagtgacagacatgaaatattaccttcccctaaaatatagcccagtca

SEQ ID NO: 194610 - DNA, 319 bp, Homo sapiens
gaaactgtaatagaaaaaaattaacagcagcaaccaaaactgtaaggtagctagaagtaaatctaatgaaagatatgcaagagatttatggagatgactgtaaacataattgaaggacacagaagaagatatgactaaatggagagacatgtcatgttaatggagaggaagattcagtatcataaagataccagtttaggctgggcgtggtggctcacgcctatagtcccagcactttgggaggccaaggcaggcagatcacctgaggtcgggagtttgagaccagcctgaccaacatggaggaaccccatctctacta

SEQ ID NO: 194611 - DNA, 549 bp, Homo sapiens
tgagataatttaggtgttttcttataaatgctaatgaattactatttggctctacaggtaacaaagccaaatagtaattttagaaaccaaaaggaagatgagaaataaagggggaaaaacacttaattcagttggtcacaaatttgagtgtacatagaatcacttaggaaacttgtatacaatactgatttttcaggtcccatcccatgattctgattcattaggtctggagaagggctcaaaaaacccacattttaataagaagaacgttgaagcaactctagtgtcagaggttccctcatcaaatgctggaaaacactgaattaaagggtttaaggctgggcacagtggctcatgcctgtaatcttagcactttgctccagatgccttccctgacccctcaagcttgggctaaaaggttccctataagttctcaaagtattagacctatccctacctgatcagatggtaattttttttctgagacaaggtctcactcttatctcccaggctggaacgcagtggtgtgaggagaacgcgtcaaaatcg

SEQ ID NO: 194612 - DNA, 323 bp, Homo sapiens
taggcagatcaaagtagaaagctggtagcaaagaagaatttgttcctaagagaaactgttctaggtaaaaagaaaggaataaagaaaacaagacgtgctaaagatgttttaaaactactattaaatagccagaactattagatcaaagattcactaaatatgaagatgcaaatcctaaaaatgaaaagtgacagggagggaaatgggatgagttaggctctgcaaccacaaagaaaaaactcagtaattgttttaggtggaattatattggattcattaattttagggaacacactgtattcccatttggaaaaaatgatttg

SEQ ID NO: 194613 - DNA, 231 bp, Homo sapiens
ttgagtggaaatggaatttaataaaggatattttgtgatcagacaatccccatgagaaacagagaaccagctcagccaggaaacaaatccaaaagctccttgaagatactacctcatgaaacaccaaggagcccctctagactcagatccgggggcttgcaccacctgcatcaccgtgtggctctgaacaccaccacgaaagcccctggagctgctggatccaggacctgg

SEQ ID NO: 194614 - DNA, 279 bp, Homo sapiens
ggcaatttcatgaatgaggtcttccaagcaaatgacaccaaaattcccctggtgctcctcatcactgtgttgtctgtctgagggatggtcttattcttgaccttggctcatccacatttcaaaatgagttcccaggcagacttcagatgtggaaatacccagatcacataagtttccactatgggcagcatttttaggttctggggggtgacttttacaaagataccactaaaaattttctttaggcgaagtcttgccatggttctctgcaccagtaaa

SEQ ID NO: 194615 - DNA, 603 bp, Homo sapiens
agatctgctctcttttttatacaatggagagcctccgggagctgcatatctttgacaatgaccttaatggtatttcagaaaggattctgtctaaagccctggagcattctagctgtaaacttcgcacactcaagttgtcctatgtctcgactgcttctggttttgaagacttactcaaggctttggctcgtaatcggagcctgacatacctgagtatcaactgtacgtccatttccctaaatatgttttcacttctgcatgacatcctgcacgagcccacatgccaaataagtcatctgagcttgatgaaatgtgatttgcgagccagcgaatgcgaagaaatcgcctctctcctcatcagtggcgggagtctgagaaaactgaccttatccagcaatccgctgaggagcgacgggatgaacatactgtgtgatgccttgcttcatcccaactgcactcttatatcactggtgttagtcttctgctgtctcactgaaaattgctgcagcgcccttggaagagtgcttctgttcagcccaactctaagacaactagacctgtgtgtgaatcgcttaaaaaattacggagtgttgcatgtgacgt

SEQ ID NO: 194616 - DNA, 570 bp, Homo sapiens
cattatactgtctggattactgctgtcacctgaggacacttaagttgagtgttcagcgcatctttcaaaacaaagagccacttataaggccaactgctaggttgtcctatgtctcgactgcttctggttttgaagacttactcaaggctttggctcgtaatcggagcctgacatacctgagtatcaactgtacgtccatttccctaaatatgttttcacttctgcatgacatcctgcacgagcccacatgccaaataagtcatctgagcttgatgaaatgtgatttgcgagccagcgaatgcgaagaaatcgcctctctcctcatcagtggcgggagtctgagaaaactgaccttatccagcaatccgctgaggagcgacgggatgaacatactgtgtgatgccttgcttcatcccaactgcactcttatatcactggtgttagtcttctgctgtctcactgaaaattgctgcagcgcccttggaagagtgcttctgttcagcccaactctaagacaactagacctgtgtgtgaatcgcttaaaaaattacggagtgttgcatgtgacgt

SEQ ID NO: 194617 - DNA, 395 bp, Homo sapiens
gtaccatataaattgttagtgtagtatttttcattagtttcaagctggagtgaacaccaattatgtgatttaacagtcttgttgttttgaaaaaagaaaagcaaaaaacaatacaaaaagacatattgtaaaaaaaaaaaaaaaaaaaacccaaacaatagaactctaaaaaactaaccttgcgttgtggaattttcatatgcagattaatgatctttcatttataaaaacagactataaagtagaaaccaaatctggtaatattaattaattatttgtttaccagcactttactgaggggcatgccaatagtaattttatttttaattgggggaggagtgagagatgaaaggggtgggataggttattctgtcaaaaaagcaaacaaacaaaaa

SEQ ID NO: 194618 - DNA, 331 bp, Homo sapiens
actacgtcgcatatctctatatgaatatcaataatgttaaatttcaggacaaaggaaatggttaaaaacgtttgttcaggtaggttaaagaaagtcaacctagaactagtggatattactttatatctaaaagagataattatttcttttcaaaaaggatatgccagtgatgattatagtctttaacagcagtagcttgtgagagtattaaaatgtttcttcttttataattcattctacgttaaaaaaatgaattaaaatgtatgcaaagtgtactttttcaagtcagtgaagaatatgcgacagtagcagcagtttacattagctttat

SEQ ID NO: 194619 - DNA, 127 bp, Homo sapiens
gctggaatccaaaaggaagatgcaaaaatgagatggctgtattagcttataacattctgaattattttcttttttaggttgccatattttttgtcttttccattttaaaatctagactccccaaagg

SEQ ID NO: 194620 - DNA, 258 bp, Homo sapiens
ccagaatacagaaaaactggtgtcacaggtctatagatgtctcttctattacttcatcacttgtggctgccatgtgatattagaacagtaccacccaggttttcagaatcctggtccgatgactttacatcattctgaggccgtcactgactacatctattcatcattctgaggccgtcactgactacatctattcagcaatgtagggtcttctctcctctctgaagccctcccaccccctatttgctcctacatctc

SEQ ID NO: 194621 - DNA, 620 bp, Homo sapiens
acggattgatcatattccagaagggcagtgtgatacagggcaagtgtactgaccatggcagtagccctgggttctggcctacctctgcctctgtcttggttgtgtggtcgatgggttgaactgagtggcttcaaactcttatctgcctccaacattctgtaatcctgtgatttcacaggatgtgtgatagggagaaacatcaactcctacaagggcagcagtgtgaagtcatgagaaaagcaatgtgaagacctgggatgttgtcacagctctatcataaaccagctgatggccttttgtgtagtcacttaaactttctgggtcctacttggcgtcagctatggaaatgtgattggacttccctgatggactctaaggaaagtttcttggattccttctttccctcccttctttcctccttccctttactttcttctttcctttcctttatttccttccttttctttcttgagacagggtcttgctctgttacccaagtggaatgcagtggtgcaatcatggctcccggcagccttgaactcccaggctcaagccatcctcccacctcagccttccaagtaactggtactaactacaggcacaaactaccaagcctgact

SEQ ID NO: 194622 - DNA, 412 bp, Homo sapiens
gttgtttctgggttttcccttaaagaatgagacccctgggggggtctggaattccacatttaagactcagactagaatgcttaggtgatatcttcataacttattgagttacttgcagatgttcattctattcattctaaaataatttcctcttatctactccatctagttacaattcagtctcttccttccattcatttatcttcaaaatgtagaccaggaatcgtcctctgcttccatgtcttcccattaacttcttctgtcctttgtgaatacacctcttctcttaatctcaactgtcttctgttaggtgatcctcaaatttacatgtgcagatctcaactctattctgagtgccgattcacatttctttacatttcttaaacatgtccacctgatgacctcctgatac

SEQ ID NO: 194623 - DNA, 395 bp, Homo sapiens
tgttgggaggtaatgtagcctagtggttaatatcagaagcactggagtctgtttcctcatccataaaatactatctacccccactgggctgttgtgaagcttaaatgaaatgttttagaagtatgcagtgctggcctggcacaggccagttaatggaggccagcaataaacacgacttttacccctggatcacaatcaacatagcaagcatcttcacagaatccttagatatttagaaaggcaggcgtcacaaacttttttttttgtttcaaaatgtccttctcagaaacaccactgtttgctgggttaggaggtaagttctcccacccctaatctaccagccccactcaccaagtgttgctggatctcttccctcactaacaccaccctctggg

SEQ ID NO: 194624 - DNA, 329 bp, Homo sapiens
tgcccccatcagcgccacccagaatgtagcctggcagctgcccacccagggagagagatggggtgaggtcaacagatggcgatgagagagaccctgatgcccacatctgtgcttctgggatgaggaggatgctgatgagggctgcgggctggcttagggactcagtcttgccctggaatccccatgcttctgcatctgtggaccctgctgaccctgaggtgggagaacaattgagtcgaggagatcctgttctcccaaccagacctttgtccctcctttccccgtgtctctttgggctttcctgggccccacctcatgctggtgcccat

SEQ ID NO: 194625 - DNA, 606 bp, Homo sapiens
gtggagacagagtcttgctctgtcacccaggctggagtgcagtggcacaatcctggttcactgcaacctctgccttccaggttcaaacaattctcctgcctcagcctcttgagtagctgggattacaggtacccgccagcacacccagctaatttttgtatttttagtggagatggggtttcaccatgttcaccaggctggtctcaaactcttgacccaggtgattcacccgtcttggcctcccaaagtgctgtgattacaagtgtgagccaccgcacctggcctctagttatactcttctttatattttaaaatgtaaaagttaaattattattgactgtagtcaccctgttgtgctaccaaatattaggtcttattatttctactttttgtactcattatttcaaatatttttaatttttattcatttttattatttccccttttgtatggtgctgataacatctcattctaaaagttgtgggctataactgaaacttcaaccctaagaaatacaaatgctacctttatatttttacttttaaaattatttgagatagattcttacagtctttaaaagaaaataaattctgaaatgctgcggac

SEQ ID NO: 194626 - DNA, 590 bp, Homo sapiens
accatcctctgactctcgaagcagagccctcaggcctccccatgcctccagacttccacagtctatgctgcccacacacttctgtgtctcctcatcgcccttccccctgccgcacggccctgaatattggaactgacactaacatcttagtctggtgttctcacatgtgacctcactggaccctcacaaccaccctgggaggtggcaaggttccaaactaaatccatctccatcactaacaatggagacaccgaggctcagagaagtggaataactggctaaggtcacacagctactgagctgcagaaccaaaattcgaacccacgactacctgccctgaagcccatgctctgaacactcagctccacgatgtcacaaacagccacggccagcctggcatggggacgaccttcacctccccaaatccaaacacgcgtactccaaggaagcttcctcacaagagcctcttctgagtcattcttcagagcatttttctgctcagcttaacttccttcagtctaggatatgacagtatctccctgcagctcaaagcctgctactaccctttgctctgagctccgtccggaaga

SEQ ID NO: 194627 - DNA, 290 bp, Homo sapiens
tcctgtttctaccaccaattagctgtgtgaccttaaccaaattatttatcctccattttcacttattttctcatctgtaaaacgagatagtaaacatatctacctcacctcacaatattgttgtgaggattaagtgagttgttatatgtaaagcacttaggatggtttctgaaatattgtgagggcttagagtttacaattataaactgctgaaaatatgaagagagatagaaatagaagtgtttctaccaataaatttcagtctatgagagagaagtagagaataagaa

SEQ ID NO: 194628 - DNA, 342 bp, Homo sapiens
agaagttgttgcttacttatatatgcaataaatatgatatatgggaagtgtaactccttggctgggtaatttaggtaaattcacttgtttctctgaatatctcttttcctcatctttaaaaagaagaacattaggctacatgacttcaagctcctttttaattttgataatacttgttttagtagagttcttcagagaaacagaatcaacaagatgtatatgtgtatatatgtgtatggagagagggggtatttttaaaactggatcacacgactgtggagatgcaagtctaaaatctgcagggtgggccagtaggctggagacccagagacgtactcagtc

SEQ ID NO: 194629 - DNA, 386 bp, Homo sapiens
tttctttcctcgggcaaagttttccccaagtttctaactatccaaatgaagccaagtagatttcaaaaaccactgtagagagccctacttggggattagagttaaatatagaattcataattcatccaataaattaaactgagcacctattgtgtaacaggctctgtgctggaaattaggtatacattatagtattagttcctactgctgctataataaattaccacaaatttagtaattcaaagcaacacagtttattatcctacagttctagaggtcagaagtccaaaatgggtcttggagggctaaaatcaaggtgtcagcagggcttacttccttctggaagccctagggcagaagccatttccttgccttttccagctctc

SEQ ID NO: 194630 - DNA, 439 bp, Homo sapiens
ctcgtagttactccgctgtccctccgcctcctccccagccccaaatcctgggcacaagctcttctgactggccgggcccagcccccctcatgcccagagaggcagcctcaacccttctccctaaaccgaagctccatccctctcgcgttcttgccttaacccgtgccccaggaccttcctttgcttcccacgcgcctaaattcccctcgcgcccggtgatctgctcgtcagatttcgcatttctagaaagggaccgagcgtctgcagagtgtatattggctagatagttcccaaggctgtttttagagactccagggttttgcctatgggtaaactggcgagtcattgaattggaaactagatcccctcttggaaagatgttgcagatcctcttattttgcaggttaaggggccgtgcgtgtgtgggcttgcctgtgtg

SEQ ID NO: 194631 - DNA, 294 bp, Homo sapiens
gtattcctcagtaataaccagaagggaaatctgcacctttctacaaatattattgtatctgatttttacatgctttgacctagttctcttgaaaaatatatttgaacatgaaatatttaaatgaagcaacttttatttatggaaatacaaaccactttccttagggcatattatataaactttaataaatacatcataagaggaaaaatggaagtatttgtgagaatctagtatttcaattttctttcctctggaatcagtttctctcatatgtaacaggtacctttacatcac

SEQ ID NO: 194632 - DNA, 285 bp, Homo sapiens
aataacaaaaccaaacccacaccgaaaagaaatcacttttagaatgatttggaatgtacattgatttctggcattctcagaaacaagctcaccaactccttggaaaacgggtgccatggagtcagtgcccaccgaagaaaatgtctttaaataagttagttacttggacaagattattcactccttagaaaatacatcaatgtaacaagtcccagcaggcagggtatgcagtacagcaccaatttcccagagggcttagtggatcttgggatgggtagtcacaga

SEQ ID NO: 194633 - DNA, 454 bp, Homo sapiens
actattttccctgcttaaatcctggctcctggcccggcattctgtgaatctctccgtgaaagcaccttgtcagccttcacagtcagccctgattttcaggccagcttcccctccagggagtggctctcaaaggctttcttcgtccgcggccggatgctagcaccgaggcacacagtaggtgtgcagtaaatgttgttggaaggaaggaagtgggtttccgtttgggaaaggaaactgggaggtaaaaagctaggagctgctccctccatctaaatgacttctttttttttcacctcattactaacatttttctccgaagtagaagtctgcccagaagacatgctcagactctaggacctaactagtctcttctggaaatccaagtccagctcttttcctcattatcccgggaaattctgcagacagagtgtggtcaccagaggcagaggggttc

SEQ ID NO: 194634 - DNA, 455 bp, Homo sapiens
ctacctgacaactctttccaaattcttcactgaataacctgggctgtagccagcaggccaaaagacagagtagaagaggataaagagagcttccttgaggcacttagagcccattgtaggctgagaacaggtcaggatatttgagaggaaccaaactgaggcattctgtgccttcagtaagctgtggtttcagaacactgaagagagagcagaactcatgcgaggtaaacttcctgatccctaggaaacaggaggcctgactgctacaggctgtgccacagcagatgaactgggaaagatgcctggaggcacctggtactttccagagtatgaagcactgcagcgccaaggatatgggcggatgggaaggtcgagaggaattttcctaagtctttttaaggtttcattgaatcttgaactgcagtccttcaaaggcataattgctcaggacagca

SEQ ID NO: 194635 - DNA, 250 bp, Homo sapiens
gtcaaagaatattatatacacatgttatggcaagaagcttttacaaattttaaataccttaaaaagcacatgcattttcactgggaagttttaagaatacattctaaatattcaggagtccattaagtggcagaatattttacatctgccccgttcctaaacagtaaaatgaaaatttcattgttctgctttagaaattaaatttgaccactttgaaattaaaggtgcaatattaaccatgtaactgtta

SEQ ID NO: 194636 - DNA, 828 bp, Homo sapiens
cctttggaaaagaatgttttccttattttgtctgttctgtattacatacccatataacagttttatagtatgcataagataaaatgctatatgaacagttaactacagtagtctgcaagtacattttcttattctggttaatggaaacttcataatcagtctgcagggtcataagaggttgaaagagaaggaactcagaaaaaacatgttaaatcttcaaaatgaacaatgagacaccaaccaaaagaatatctgtcacactactggaatgccgacattgctaactcaagtccctagtgcatgcccacgttgctcactcaagtcacaactggaatgcccacgttgttcactcgagtccctattggaatggccacgttgctcactcaagtccctattggaatgcccacgttgctcactcgagtccctattggaatggccacgttgctcactcaagtccctactggaatgcccacgttgctcactcaagtcacaattggaatgcccacgttgctcactaaagtccctattggaatgcccacgttgctcactcaagtccctattggaatgcccacatggctcactcaagtccctattgcaatgcccatgttgctcgctcaagtccctactgcaatgcccacattgctcactcaagtcacaactggaatgcccacactgctcactcaagtccctattgcaatgcccacattgctcactcaagtaacaactggaatgcccacgatgctcactgaagtctctctattggaatgcccacattgttcactcaagtccctattggaatgcccacattgctcaatcaagtccataatg

SEQ ID NO: 194637 - DNA, 536 bp, Homo sapiens
ataatatatttatgataggaggggtatattcttgggtatacagtaaaaagaaagggaagctgttcccaacatcactgagagactgagagaaaggaccatatggccaggtaatcaaccatttgtataacttaatttccttgtttggaaagtgagacaacagtatctgttctatccaattcaaagaaatggtcatgagtgtcaaattatgataacttacatgaacaaaaccctggaaatgcataagatgctttggcatattagacactgttcctcttatgatttcccatatcagactgaatgtttcctgcctgtaagctgagataactgctctctggggcccagcatcaccttgtagagtctggggaaaggtcaataaaaatcctctggagaatacagttgcagacaaagtatagttcaagcagcacagctgggcattcttcaacaccactgttctcagtagctctaagacctccttatcatgacttacttccttgtattttcctgactctccaacttatttataaacggaaaagagc

SEQ ID NO: 194638 - DNA, 905 bp, Homo sapiens
aagtgcttaattaaggggaggatgccagtgttgctgaagctgaatttgcaagagtcaaattggcagatgaggttggagaggaaatgggggttgagggagcaccagatcctatagagcctttagaccatcgtagagactttgctgttctctgagtgctttggtagggatttgaggaaaggagtgacatcgtatgaatgactttattatgtgcccacgtggaggtgtcaaataggcagctattgtgttgcaggtccccaggttcattgattcactaagaggactcaaaagactcagcacgtagtcatactcacagctgtgatttattatagcaaaaggatacaaagcaaaataagcaaagggaaaagatgcatgggacacagtctggaggaaacccggtgcagtcttctaagagtcctctcctagtggagtcacatggggtatgcttaattcttgcagcatcaaattatgacaagacgtgagagatctatcaggaaagcttgtagagctcatttttccaataaaaagtcacataggcactgtctgcctagaatgtgccaaaatttccgccgcccagaaaaaaagcaggtgtttagaatcacattgtacagtttccagcacagtgagccactcttatccaggtgggaattgtgggaaccctcgtgaagttcaagttctgagacactagccaagggccaactttgcaagcaggcattctaaggatagcagtctcaggcctgttatgttaactcgtttctgcacagatgtacgagtctggaatttgggagaaagttctggaatggggatatagattagggtgtggttggcatataggtggtatttaaagccacagaaatgattgatgtcttgataatgcatttgtaagaactaattgggtacatttaaga

SEQ ID NO: 194639 - DNA, 161 bp, Homo sapiens
gtcaggatacttgtcacctggtatggcctgggcactgaaatcagaacagacattgggcatcaacagttgaattggtgacacttaaatgtcaggcctgctcaggatcctctgaccgacctgcatcccttttctctcaggctctctggcagagacttctctct

SEQ ID NO: 194640 - DNA, 641 bp, Homo sapiens
caaatggtcagcagtaggattcactatcattgccgtcaccaactaggaataacttatttgctgtgtgcacaccagaagaagaaccaaacaagtaggctaggaaccagaaaatagtacacaaacatagagttgggataagaaagagaaatagagaactcttacagaaggtaaagttctaatattgataacttctattgtttgaaattgactcctgggaccaaaaaaaagtgtgcctttgcttaaatatttctagtaggtaaatcacctctgggaggcataagcgtggaacctccaaaactgtcgaagaatagttatgaaaaggtttgaaacatcacacctgtacaaatatagagtaaacatatgttaaaaatttaactcattaataaggaaaatagtgagatggaaaaactgctttaaaggaaaatcagaggaacgtgaccttctgaagctaatactgtccaataaggtaatggcacattaacctttgaggttatcatttcttttggggagaaaattaacatgtcacttcacagaagtctaagaactttaattaatagtaaatagcaaagtcaaacacaaatacattcccttaggtaattaaataatccttttgtgagcctgtcaaacagtccctagtgtat

SEQ ID NO: 194641 - DNA, 292 bp, Homo sapiens
atcgagctcggccccccttaccgatggcccatgaagcgatggcaaggttggagccctggctgcctgccgaagccctgcgcgcctcaggaaacttagaatcatggcggagggaaagcaggcagtctgcaggtgtctggagaaggaggaagagagcgaaggggaggtgctgtgcacttttaaatgaccagatcttaggagaactcactatcaccaaaacagcaagggggatatccgctcccatgatccaatcatctcccaccaggctcctccaacactggggattataattcga

SEQ ID NO: 194642 - DNA, 624 bp, Homo sapiens
attctaggattttctcctctctattctgcaaaaaggacagtcccttaaaatataacattctcagaaagactatgtccagtcgtcttggagccatcaagaaactgactaagtggaagtcagagacagctccaccagaataagaggcagaaactgagtcttagtgggtagagtgtgaaaagtccctgttccctttcccccatcctccctcgagctgcagacttaggccttctcctgacacatactgattgtaagcctctttcctcagctcaaggctcaggctcagctctccagcccttctctaccctcctctcggggatgagacagacatgagctttctctttaacacagtctgactggaataaaaggacccaaaagattacttgacaacgtgtgccaaggctgacatctttatgaaagccctttgccattcaggggatgctttgctgagagccagccaaacccacctgctagtccctgttcaacagacagctaagaaacacacagaggtttattcttattattcatattgttaattataaacctcagcagtatcagtttgccactagttgtgcaccccctgactaggaccagagatttcaggtacaaggagtgtttaaaggatct

SEQ ID NO: 194643 - DNA, 495 bp, Homo sapiens
actgctttagggagttaaatatccagcatatttgctttcttgttaatgaatatcctaagtgtgtatcctgactaattgttagtttcttctcaaatgaaaccctttctgtgtcttggctgtctgccttaacgctgtaggaggcagcttcttgcttgggacaaaggcattggtgatgtgttccatgttgaatctgccttcagtgcctgggctggcttgctatggaaatgtgcttagcattgattagggggtagagagctgtttctaaatcctgcttttctactttttatttcactcatttgccagaattgttcttggcaccagcagctccttaacatatagttgttgaatgactgaaagaaagcaactaatgttttaactccttgctaagtctgagattgggaggcagtcccctagagtggatagaaagaatggtggagcctcatcccaaagctgctctgatgaaactgctagaaagcagattgtagttctttgttt

SEQ ID NO: 194644 - DNA, 357 bp, Homo sapiens
gcacctccttctatataaggatctgttgccaaattcagtacttctgtgcaacttcatggtaattaaagtgacagaacagtttcactgtaatttcaaaagagttttccagagaagttgctccgatttttaaactccactttaagtccccagatgaaatgtaaccgtttaaggggaaccaagtagaaatatataaacacagaacaacttagcctggtcaaaattaaaataaaaataggtatagaaaagtaaattaagaaagaaagcaggctgtgtgtctccaaatccagggtttcaaaaatgtcacctctccaaacaccataagcagacttaaatgactaaatttagtatcttactctt

SEQ ID NO: 194645 - DNA, 468 bp, Homo sapiens
atgatgtaacagcggagcaaatgggacaaaaaaggcggaagtttggggaacatggttttacattattaaaatgtgaaaaccgtaaaagcaaagaggggtaaaggaatgggtcctgacaaagactagaaaagaaaagacgagaaggaaataaagagccatccactcgagctcagtaatgctgtgacaacagaataaatgccacttctttactcttgcgaaacacagcgcttattctcaagaaagaaagaagtcaaacctaagggagataattcctaagccctgcctaagagttacagaaataattacttctacctgccagagattccaaaaccataagaaaacagtccagataggagtatgcaatttccccttatttacttttattttatttaaattaaccaagggagttgagtcaaatttcggtgaattcatatatgcctgcacctatctaggtggttagttaagtat

SEQ ID NO: 194646 - DNA, 389 bp, Homo sapiens
atgatgtaacagcggagcaaatgggacaaaaaaggcggaagtttggggaacatggttttacattattaaaatgtgaaaaccgtaaaagcaaagaggggtaaaggaatgggtcctgacaaagactagaaaagaaaagacgagaaggaaataaagagccatccactcgagctcagtaatgctgtgacaacagaataaatgccacttctttactcttgcgaaacacagcgcttattctcaagaaagaaagaagtcaaacctaagggagataattcctaagccctgcctaagagttacagaaataattacttctacctgccagagattccaaaaccataagaaaacagtccagataggagtcgcggtgtattccggagatcctctaggtcacc

SEQ ID NO: 194647 - DNA, 270 bp, Homo sapiens
aggattatgctcatttcagttctgggctcggcacacagaaccactttttcctcctgggattccaggcttgcaatgggaggaacttccacaaaagtctctgacatgccctggagacattttcttcattgtcttggtgattaacatttggctccttgttacttatggaaatttctgcagtgggcttgaatttctcctcagaaaatgggattttcttttctattgcattgtcaggctgcaaattttccaaacttttttgctgttttccttttg

SEQ ID NO: 194648 - DNA, 451 bp, Homo sapiens
ctgtctggaatgttatcaaaccaggactgcacaggcactgcattctctgtgtggaagatgtaagaagcaggcgagttgtccaggatgagttttcctcaggtccctccccagatggctgacgtccttgacatagcagccctggtgaaacaaacatgactcatgggacaggcagccccagaccatcccatacccgtccagctcacccgtcacaggatctgcctacttgttcaggctgggaagaagagagcaatgacgaaaacacatttaaacatttcctccattcatgtcaggaactcatccatataaggcctcatgagcacatggatctggtgcatggtcccctcaagctctacaggcactaggcagtcagcattgctgattggcttaaaggagctatgcacaagggtttcatccaggtcagtgaccatacagatccttccttgatttttct

SEQ ID NO: 194649 - DNA, 271 bp, Homo sapiens
tcaagtttcttgttttctcagccacaggcgcccacctcagggcctttgccttggctgttctgcttttccagaatattcttgcctggctcttcacatgatgcttccttctcattttatcctcggagaggccgccgggacccccaaccacagtgtccacttcagtccctcggtggcctcatgagggtgttttctcgtgtgaatgagggttttatgttgttaatgtggtgggtgagtgagccccattgtgttgcggtgcgctgatctgaccagg

SEQ ID NO: 194650 - DNA, 527 bp, Homo sapiens
ccaggctggtctcgaactcctggatgcaagtgatcctcctgccttggcctcccaaagtgctgagccaccatgctcggctgaagattattttctcttgagcagtattctgttctttcattcaagggttcatttatgtcctgttctgagggtagcattttattctgcaagatacaacgaaagtatcagatcactttctcccttgaagccttattggtgatataaaacaaatatgtaaaacgttttagaatcagaagatcatatgattaaatactcgtgagagttcagaccatcagtattataggatttaagaataaggagagattagtgattaccaaccattggtaggcagcttctttaacaaatcgctgcctgaagtggactctgaaggatgagtgtagtttaggttctacagagtggaaggtacaagggagggtgacagagccagtatagtcctggtggaagatagaacaaagtgccaacaaagcaggaataaggatacagtactttgggaaggggaaaaaaatcag

SEQ ID NO: 194651 - DNA, 222 bp, Homo sapiens
agaagagggtaaaattgtttgctataaacccttacgctgagcttttgtaaacaaaggactcccaatgagaacctgcttgccgctccccagtgatcatcaggataggtttctaaactaattctgccaatttaacaaagcaatgccaagtattaactttggaaaactgttctttagaaaataggaagtcaaattttaaagttactattctcaaatgccagtagg

SEQ ID NO: 194652 - DNA, 538 bp, Homo sapiens
tccgaggagtctctgtttctggggacttaatttgggctccacgataatgatggaaaggagacagtgcaggcgcagcatgcaggatgttcaccagcagcgtccttatcacacttgatcctcacaaaaaggccacgttcttgcatggttgttgccaccgtgctctaaagataaggaagccatggctatgggaggccaggcagctcctcccgcagctggaccacctggaaggctacctcacctccatgcctgcaccttctgggctgtgaaacaggatcctaaaagggctatctttgggccttccaagcaaaacacacatcagggcacctcattaagtagcaagtgtgcaaggcattatatgaattacaaagttctctgcaaactcaagagactcatagctgctctggctttgcagctgttttagagatagggaaaaccacatgaggaaacaaaggtggaaggagaagcctgtgaggcaagggaaggagggggcgggaggaacttcccaccagcacaccggctgtccactctgccccgggtt

SEQ ID NO: 194653 - DNA, 661 bp, Homo sapiens
gcaaaattacacgccacatcttttgaagataacttttagcaggcaaaagaaaaaaagagaagatacttttaaaataaactttttaatgaatattgtaagacatttttttaccctgcttaataaatacatctggatgaaaatctcaactttatgatggcaagatatggactaaatatttaacttaagtaatagggtaattgataaagtaatagatatattttctccaactttcttccttatctttctaaacaaagggtagtggctaatcaatgtattgtactctcaaaagtccttaggccaacgagttggtttttttttcttttgagacagggtctcactctgtcgcccaggctggtgtgtagcggtgtgatcatggctaactgcagcctttacttcctgggctctgatcttctcacttcagcctcctgagtagctgggactacaggcatccatcactatgcccagctaatttttaaatttttggtagagatggggtcttcctatgttgcccaggctggtcttgaactcctgggctcaagttatcctactgcctccacctcccaaagtgctgcaattataggagtgagctaccatgctcagccccaacaatatcttcagtccaaatttctcataaagtgtcattaaagctgtggcctatgat

SEQ ID NO: 194654 - DNA, 3496 bp, Homo sapiens
tgtagcagcttcttctccgaaccaaccctttgccttcggacttctccggggccagcagccgcccgaccaggggcccggggccacgggctcagccgacgaccatgggctccgtgtccaaccagcagtttgcaggtggctgcgccaaggcggcagaagaggcgcccgaggaggcgccggaggacgcggcccgggcggcggacgagcctcagctgctgcacggtgcgggcatctgtaagtggttcaacgtgcgcatggggttcggcttcctgtccatgaccgcccgcgccggggtcgcgctcgaccccccagtggatgtctttgtgcaccagagtaagctgcacatggaagggttccggagcttgaaggagggtgaggcagtggagttcacctttaagaagtcagccaagggtctggaatccatccgtgtcaccggacctggtggagtattctgtattgggagtgagaggcggccaaaaggaaagagcatgcagaagcgcagatcaaaaggagacaggtgctacaactgtggaggtctagatcatcatgccaaggaatgcaagctgccaccccagcccaagaagtgccacttctgccagagcatcagccatatggtagcctcatgtccgctgaaggcccagcagggccctagtgcacagggaaagccaacctactttcgagaggaagaagaagaaatccacagccctaccctgctcccggaggcacagaattgagccacaatgggtgggggctattcttttgctatcaggaagtttcgaggagcaggcagagtggagaaagtgggaatagggtgcattggggctagttggcactgccatgtatctcaggcttgggttcacaccatcaccctttcttccctctaggtggggggaaagggtgagtcaaaggaactccaaccatgctctgtccaaatgcaagtgagggttctgggggcaaccaggaggggggaatcaccctacaacctgcatactttgagtctccatccccagaatttccagcttttgaaagtggcctggatagggaagttgttttccttttaaagaaggatatataataattcccatgccagagtgaaatgattaagtataagaccagattcatggagccaagccactacattctgtggaaggagatctctcaggagtaagcattgtttttttttcacatcttgtatcctcatacccacttttgggatagggtgctggcagctgtcccaagcaatgggtaatgatgatggcaaaaagggtgtttgggggaacagctgcagacctgctgctctatgctcacccccgccccattctgggccaatgtgattttatttatttgctcccttggatactgcaccttgggtcccactttctccaggatgccaactgcactagctgtgtgcgaatgacgtatcttgtgcattttaactttttttccttaatataaatattctggttttgtatttttgtatattttaatctaaggccctcatttcctgcactgtgttctcaggtacatgagcaatctcagggatagccagcagcagctccaggtctgcgcagcaggaattactttttgttgtttttgccaccgtggagagcaactatttggagtgcacagcctattgaactacctcatttttgccaataagagctggcttttctgccatagtgtcctcttgaaaccccctctgccttgaaaatgttttatgggagactaggttttaactgggtggccccatgacttgattgccttctactggaagattgggaattagtctaaacaggaaatggtggtacacagaggctaggagaggctgggcccggtgaaaaggccagagagcaagccaagattaggtgagggttgtctaatcctatggcacaggacgtgctttacatctccagatctgttcttcaccagattaggttaggcctaccatgtgccacagggtgtgtgtgtgtttgtaaaactagagttgctaaggataagtttaaagaccaatacccctgtacttaatcctgtgctgtcgagggatggatatatgaagtaaggtgagatccttaacctttcaaaattttcgggttccagggagacacacaagcgagggttttgtggtgcctggagcctgtgtcctgccctgctacagtagtgattaatagtgtcatggtagctaaaggagaaaaagggggtttcgtttacacgctgtgagatcaccgcaaacctaccttactgtgttgaaacgggacaaatgcaatagaacgcattgggtggtgtgtgtctgatcctgggttcttgtctcccctaaatgctgccccccaagttactgtatttgtctgggctttgtaggacttcactacgttgattgctaggtggcctagtttgtgtaaatataatgtattggtctttctccgtgttctttgggggttttgtttacaaacttctttttgtattgagagaaaaatagccaaagcatctttgacagaaggttctgcaccaggcaaaaagatctgaaacattagtttggggggccctcttcttaaagtggggatcttgaaccatcctttcttttgtattccccttcccctattacctattagaccagatcttctgtcctaaaaacttgtcttctaccctgccctcttttctgttcacccccaaaagaaaacttacacacccacacacatacacatttcatgcttggagtgtctccacaactcttaaatgatgtatgcaaaaatactgaagctaggaaaaccctccatcccttgttcccaacctcctaagtcaagaccattaccatttctttctttctttttttttttttttttaaagtggagtctcgctgtgtcacccaggcagaggttgcagtgagctgagatcgcaccactgcactccagcctggttacagagcaagactctgtctcaaacaaaacaaaacaaaacaaaaacacactactgtattttggatggatcaaacctccttaattttaatttctaatcctaaagtaaagagatgcaattgggggccttccatgtagaaagtggggtcaggaggccaagaaagggaatatgaatgtatatccaagtcactcaggaacttttatgcaggtgctagaaactttatgtcaaagtggccacaagattgtttaataggagacgaacgaatgtaactccatgtttactgctaaaaaccaaagctttgtgtaaaatcttgaatttatggggcgggagggtaggaaagcctgtacctgtctgtttttttcctgatccttttccctcattcctgaactgcaggagactgagcccctttgggctttggtgaccccatcactggggtgtgtttatttgatggttgattttgctgtactgggtacttcctttcccattttctaatcattttttaacacaagctgactcttcccttcccttctcctttccctgggaaaatacaatgaataaataaagacttattggtacgcaaactgtcatc

SEQ ID NO: 194655 - DNA, 780 bp, Homo sapiens
ggtcacgagttcaaaactatcctggccaacacagtgaaaccccgtctctactaaaatacaaaaaaattagccgggtgtggtggtgcatgcctttagtcctagctattcaggaggctgaggcaggggaatcgcttggacccgagaggcagaggttgcagtgagctgagatcgcaccactgcactccagcctggttacagagcaagactctgtctcaaacaaaacaaaacaaaacaaaaacacactactgtattttggatggatcaaacctccttaattttaatttctaatcctaaagtaaagagatgcaattgggggccttccatgtagaaagtggggtcaggaggccaagaaagggaatatgaatgtatatccaagtcactcaggaacttttatgcaggtgctagaaactttatgtcaaagtggccacaagattgtttaataggagacgaacgaatgtaactccatgtttactgctaaaaaccaaagctttgtgtaaaatcttgaatttatggggcgggagggtaggaaagcctgtacctgtctgtttttttcctgatccttttccctcattcctgaactgcaggagactgagcccctttgggctttggtgaccccatcactggggtgtgtttatttgatggttgattttgctgtactgggtacttcctttcccattttctaatcattttttaacacaagctgactcttcccttcccttctcctttccctgggaaaatacaatgaataaataaagacttattggtacgcaaactgtcatc

SEQ ID NO: 194656 - DNA, 3116 bp, Homo sapiens
  misc_feature (1)..(1): n is a, c, g, or t
ntagggctaggtacgaggctgggtgttggtctggaatccatccgtgtcaccggacctggtggagtattctgtattgggagtgagaggcggccaaaaggaaagagcatgcagaagcgcagatcaaaaggagacaggtgctacaactgtggaggtctagatcatcatgccaaggaatgcaagctgccaccccagcccaagaagtgccacttctgccagagcatcagccatatggtagcctcatgtccgctgaaggcccagcagggccctagtgcacagggaaagccaacctactttcgagaggaagaagaagaaatccacagccctaccctgctcccggaggcacagaattgagccacaatgggtgggggctattcttttgctatcaggaagtttcgaggagcaggcagagtggagaaagtgggaatagggtgcattggggctagttggcactgccatgtatctcaggcttgggttcacaccatcaccctttcttccctctaggtggggggaaagggtgagtcaaaggaactccaaccatgctctgtccaaatgcaagtgagggttctgggggcaaccaggaggggggaatcaccctacaacctgcatactttgagtctccatccccagaatttccagcttttgaaagtggcctggatagggaagttgttttccttttaaagaaggatatataataattcccatgccagagtgaaatgattaagtataagaccagattcatggagccaagccactacattctgtggaaggagatctctcaggagtaagcattgtttttttttcacatcttgtatcctcatacccacttttgggatagggtgctggcagctgtcccaagcaatgggtaatgatgatggcaaaaagggtgtttgggggaacagctgcagacctgctgctctatgctcacccccgccccattctgggccaatgtgattttatttatttgctcccttggatactgcaccttgggtcccactttctccaggatgccaactgcactagctgtgtgcgaatgacgtatcttgtgcattttaactttttttccttaatataaatattctggttttgtatttttgtatattttaatctaaggccctcatttcctgcactgtgttctcaggtacatgagcaatctcagggatagccagcagcagctccaggtctgcgcagcaggaattactttttgttgtttttgccaccgtggagagcaactatttggagtgcacagcctattgaactacctcatttttgccaataagagctggcttttctgccatagtgtcctcttgaaaccccctctgccttgaaaatgttttatgggagactaggttttaactgggtggccccatgacttgattgccttctactggaagattgggaattagtctaaacaggaaatggtggtacacagaggctaggagaggctgggcccggtgaaaaggccagagagcaagccaagattaggtgagggttgtctaatcctatggcacaggacgtgctttacatctccagatctgttcttcaccagattaggttaggcctaccatgtgccacagggtgtgtgtgtgtttgtaaaactagagttgctaaggataagtttaaagaccaatacccctgtacttaatcctgtgctgtcgagggatggatatatgaagtaaggtgagatccttaacctttcaaaattttcgggttccagggagacacacaagcgagggttttgtggtgcctggagcctgtgtcctgccctgctacagtagtgattaatagtgtcatggtagctaaaggagaaaaagggggtttcgtttacacgctgtgagatcaccgcaaacctaccttactgtgttgaaacgggacaaatgcaatagaacgcattgggtggtgtgtgtctgatcctgggttcttgtctcccctaaatgctgccccccaagttactgtatttgtctgggctttgtaggacttcactacgttgattgctaggtggcctagtttgtgtaaatataatgtattggtctttctccgtgttctttgggggttttgtttacaaacttctttttgtattgagagaaaaatagccaaagcatctttgacagaaggttctgcaccaggcaaaaagatctgaaacattagtttggggggccctcttcttaaagtggggatcttgaaccatcctttcttttgtattccccttcccctattacctattagaccagatcttctgtcctaaaaacttgtcttctaccctgccctcttttctgttcacccccaaaagaaaacttacacacccacacacatacacatttcatgcttggagtgtctccacaactcttaaatgatgtatgcaaaaatactgaagctaggaaaaccctccatcccttgttcccaacctcctaagtcaagaccattaccatttctttctttctttttttttttttttttaaagtggagtctcgctgtgtcacccaggcagaggttgcagtgagctgagatcgcaccactgcactccagcctggttacagagcaagactctgtctcaaacaaaacaaaacaaaacaaaaacacactactgtattttggatggatcaaacctccttaattttaatttctaatcctaaagtaaagagatgcaattgggggccttccatgtagaaagtggggtcaggaggccaagaaagggaatatgaatgtatatccaagtcactcaggaacttttatgcaggtgctagaaactttatgtcaaagtggccacaagattgtttaataggagacgaacgaatgtaactccatgtttactgctaaaaaccaaagctttgtgtaaaatcttgaatttatggggcgggagggtaggaaagcctgtacctgtctgtttttttcctgatccttttccctcattcctgaactgcaggagactgagcccctttgggctttggtgaccccatcactggggtgtgtttatttgatggttgattttgctgtactgggtacttcctttcccattttctaatcattttttaacacaagctgactcttcccttcccttctcctttccctgggaaaatacaatgaataaataaagacttattggtacgcaaactgtcatc

SEQ ID NO: 194657 - DNA, 2757 bp, Homo sapiens
caacacatgagtcatagtacgagctgggtggtaaatacgagcaggcagagtggagaaagtgggaatagggtgcattggggctagttggcactgccatgtatctcaggcttgggttcacaccatcaccctttcttccctctaggtggggggaaagggtgagtcaaaggaactccaaccatgctctgtccaaatgcaagtgagggttctgggggcaaccaggaggggggaatcaccctacaacctgcatactttgagtctccatccccagaatttccagcttttgaaagtggcctggatagggaagttgttttccttttaaagaaggatatataataattcccatgccagagtgaaatgattaagtataagaccagattcatggagccaagccactacattctgtggaaggagatctctcaggagtaagcattgtttttttttcacatcttgtatcctcatacccacttttgggatagggtgctggcagctgtcccaagcaatgggtaatgatgatggcaaaaagggtgtttgggggaacagctgcagacctgctgctctatgctcacccccgccccattctgggccaatgtgattttatttatttgctcccttggatactgcaccttgggtcccactttctccaggatgccaactgcactagctgtgtgcgaatgacgtatcttgtgcattttaactttttttccttaatataaatattctggttttgtatttttgtatattttaatctaaggccctcatttcctgcactgtgttctcaggtacatgagcaatctcagggatagccagcagcagctccaggtctgcgcagcaggaattactttttgttgtttttgccaccgtggagagcaactatttggagtgcacagcctattgaactacctcatttttgccaataagagctggcttttctgccatagtgtcctcttgaaaccccctctgccttgaaaatgttttatgggagactaggttttaactgggtggccccatgacttgattgccttctactggaagattgggaattagtctaaacaggaaatggtggtacacagaggctaggagaggctgggcccggtgaaaaggccagagagcaagccaagattaggtgagggttgtctaatcctatggcacaggacgtgctttacatctccagatctgttcttcaccagattaggttaggcctaccatgtgccacagggtgtgtgtgtgtttgtaaaactagagttgctaaggataagtttaaagaccaatacccctgtacttaatcctgtgctgtcgagggatggatatatgaagtaaggtgagatccttaacctttcaaaattttcgggttccagggagacacacaagcgagggttttgtggtgcctggagcctgtgtcctgccctgctacagtagtgattaatagtgtcatggtagctaaaggagaaaaagggggtttcgtttacacgctgtgagatcaccgcaaacctaccttactgtgttgaaacgggacaaatgcaatagaacgcattgggtggtgtgtgtctgatcctgggttcttgtctcccctaaatgctgccccccaagttactgtatttgtctgggctttgtaggacttcactacgttgattgctaggtggcctagtttgtgtaaatataatgtattggtctttctccgtgttctttgggggttttgtttacaaacttctttttgtattgagagaaaaatagccaaagcatctttgacagaaggttctgcaccaggcaaaaagatctgaaacattagtttggggggccctcttcttaaagtggggatcttgaaccatcctttcttttgtattccccttcccctattacctattagaccagatcttctgtcctaaaaacttgtcttctaccctgccctcttttctgttcacccccaaaagaaaacttacacacccacacacatacacatttcatgcttggagtgtctccacaactcttaaatgatgtatgcaaaaatactgaagctaggaaaaccctccatcccttgttcccaacctcctaagtcaagaccattaccatttctttctttctttttttttttttttttaaagtggagtctcgctgtgtcacccaggcagaggttgcagtgagctgagatcgcaccactgcactccagcctggttacagagcaagactctgtctcaaacaaaacaaaacaaaacaaaaacacactactgtattttggatggatcaaacctccttaattttaatttctaatcctaaagtaaagagatgcaattgggggccttccatgtagaaagtggggtcaggaggccaagaaagggaatatgaatgtatatccaagtcactcaggaacttttatgcaggtgctagaaactttatgtcaaagtggccacaagattgtttaataggagacgaacgaatgtaactccatgtttactgctaaaaaccaaagctttgtgtaaaatcttgaatttatggggcgggagggtaggaaagcctgtacctgtctgtttttttcctgatccttttccctcattcctgaactgcaggagactgagcccctttgggctttggtgaccccatcactggggtgtgtttatttgatggttgattttgctgtactgggtacttcctttcccattttctaatcattttttaacacaagctgactcttcccttcccttctcctttccctgggaaaatacaatgaataaataaagacttattggtacgcaaactgtcatc

SEQ ID NO: 194658 - DNA, 693 bp, Homo sapiens
  misc_feature (616)..(616): n is a, c, g, or t
  misc_feature (648)..(648): n is a, c, g, or t
  misc_feature (664)..(664): n is a, c, g, or t
tgtagcagcttcttctccgaaccaaccctttgccttcggacttctccggggccagcagccgcccgaccaggggcccggggccacgggctcagccgacgaccatgggctccgtgtccaaccagcagtttgcaggtggctgcgccaaggcggcagaagaggcgcccgaggaggcgccggaggacgcggcccgggcggcggacgagcctcagctgctgcacggtgcgggcatctgtaagtggttcaacgtgcgcatggggttcggcttcctgtccatgaccgcccgcgccggggtcgcgctcgaccccccagtggatgtctttgtgcaccagagtaagctgcacatggaagggttccggagcttgaaggagggtgaggcagtggagttcacctttaagaagtcagccaagggtctggaatccatccgtgtcaccggacctggtggagtattctgtattgggagtgagaggcggccaaaaggaaagagcatgcagaagcgcagatcaaaaggagacaggtgctacaactgtggaggtctagatcatcatgccaaggaatgcaagctgccaccccagcccaagaagtgccacttctgccagagcatcagccatatggtaanccctccattgttccgccttgaaaagggccccnacccaaggggcccctnacttgcccccacgggggaaaaagcccata

SEQ ID NO: 194659 - DNA, 2921 bp, Homo sapiens
tgtagcagcttcttctccgaaccaaccctttgccttcggacttctccggggccagcagccgcccgaccaggggcccggggccacgggctcagccgacgaccatgggctccgtgtccaaccagcagtttgcaggtggctgcgccaaggcggcagaagaggcgcccgaggaggcgccggaggacgcggcccgggcggcggacgagcctcagctgctgcacggtgcgggcatctgtaagtggttcaacgtgcgcatggggttcggcttcctgtccatgaccgcccgcgccggggtcgcgctcgaccccccagtggatgtctttgtgcaccagagtaagctgcacatggaagggttccggagcttgaaggagggtgaggcagtggagttcacctttaagaagtcagccaagggtctggaatccatccgtgtcaccggacctggtggagtattctgtattgggagtgagaggcggccaaaaggaaagagcatgcagaagcgcagatcaaaaggagacaggtgctacaactgtggaggtctagatcatcatgccaaggaatgcaagctgccaccccagcccaagaagtgccacttctgccagagcatcagccatatggtagcctcatgtccgctgaaggcccagcagggccctagtgcacagggaaagccaacctactttcgagaggaagaagaagaaatccacagccctaccctgctcccggaggcacagaattgagccacaatgggtgggggctattcttttgctatcaggaagtttcgaggagcaggcagagtggagaaagtgggaatagggtgcattggggctagttggcactgccatgtatctcaggcttgggttcacaccatcaccctttcttccctctaggtggggggaaagggtgagtcaaaggaactccaaccatgctctgtccaaatgcaagtgagggttctgggggcaaccaggaggggggaatcaccctacaacctgcatactttgagtctccatccccagaatttccagcttttgaaagtggcctggatagggaagttgttttccttttaaagaaggatatataataattcccatgccagagtgaaatgattaagtataagaccagattcatggagccaagccactacattctgtggaaggagatctctcaggagtaagcattgtttttttttcacatcttgtatcctcatacccacttttgggatagggtgctggcagctgtcccaagcaatgggtaatgatgatggcaaaaagggtgtttgggggaacagctgcagacctgctgctctatgctcacccccgccccattctgggccaatgtgattttatttatttgctcccttggatactgcaccttgggtcccactttctccaggatgccaactgcactagctgtgtgcgaatgacgtatcttgtgcattttaactttttttccttaatataaatattctggttttgtatttttgtatattttaatctaaggccctcatttcctgcactgtgttctcaggtacatgagcaatctcagggatagccagcagcagctccaggtctgcgcagcaggaattactttttgttgtttttgccaccgtggagagcaactatttggagtgcacagcctattgaactacctcatttttgccaataagagctggcttttctgccatagtgtcctcttgaaaccccctctgccttgaaaatgttttatgggagactaggttttaactgggtggccccatgacttgattgccttctactggaagattgggaattagtctaaacaggaaatggtggtacacagaggctaggagaggctgggcccggtgaaaaggccagagagcaagccaagattaggtgagggttgtctaatcctatggcacaggacgtgctttacatctccagatctgttcttcaccagattaggttaggcctaccatgtgccacagggtgtgtgtgtgtttgtaaaactagagttgctaaggataagtttaaagaccaatacccctgtacttaatcctgtgctgtcgagggatggatatatgaagtaaggtgagatccttaacctttcaaaattttcgggttccagggagacacacaagcgagggttttgtggtgcctggagcctgtgtcctgccctgctacagtagtgattaatagtgtcatggtagctaaaggagaaaaagggggtttcgtttacacgctgtgagatcaccgcaaacctaccttactgtgttgaaacgggacaaatgcaatagaacgcattgggtggtgtgtgtctgatcctgggttcttgtctcccctaaatgctgccccccaagttactgtatttgtctgggctttgtaggacttcactacgttgattgctaggtggcctagtttgtgtaaatataatgtattggtctttctccgtgttctttgggggttttgtttacaaacttctttttgtattgagagaaaaatagccaaagcatctttgacagaaggttctgcaccaggcaaaaagatctgaaacattagtttggggggccctcttcttaaagtggggatcttgaaccatcctttcttttgtattccccttcccctattacctattagaccagatcttctgtcctaaaaacttgtcttctaccctgccctcttttctgttcacccccaaaagaaaacttacacacccacacacatacacatttcatgcttggagtgtctccacaactcttaaatgatgtatgcaaaaatactgaagctaggaaaaccctccatcccttgttcccaacctcctaagtcaagaccattaccatttctttctttctttttttttttttttttaaagtggagtctcgctgtgtcacccaggctggagtgcagtggcatgatcggctcactgcagcctctgcctcttgggttcaagtgatt

SEQ ID NO: 194660 - DNA, 282 bp, Homo sapiens
gggtacaaatcgaggaccagtagccccttttcaggttgttttgaagataaggtacctgagagccttcagcctgtgcctggttcagagtcagcatcaggaaaataacaaatacaaggcaatttccagcatggaggaagaagagaatgggtctggattcttgttcactagacaaacctgtctctgttaagacttgtgctaatcattgcttgcctgacatatacttatgttcaagacctccgtctgtccttctgtctcgtccttctgtcctgtcctcgttgtgct

SEQ ID NO: 194661 - DNA, 341 bp, Homo sapiens
gctgggaaggagggtagcccgaacccctttatcgtgcaccgaaggggagagaaattggggaagtccaaccaagggaaggcaggtcataaagccaggaactgaacccttggtgacagttagaattaatttgaaaacatacttagggatgctaccttccctttgttcttagaaatttctgctgcaaagtgtgacagctataagcccattcatatgaccttcttctaaggcatggaagtgtggtgcggcaagtggagaagcctcaatgtccaccatatatgtgaatgccaacaacaacggtgatgaccagaacacccccatcccacaattggtcagcaagcatc

SEQ ID NO: 194662 - DNA, 296 bp, Homo sapiens
tactactctttattgcactgagatgtttgtgtaaagtcaaacataaacctggcctacgtgcatatccagacatagcacctttccttaaacttatttatgacacagagtcctttgctcacgttttcctgctgactccaccattaccctctagtcctgtcgcatccccctcaccgagatggggataatggtgatcaattactgctggaggtcctcgaagagtggtgctcctgcatcctccgccgtcatcctcgcggcgatccatcctctaatcgaccgtagctggcgtcctgccttct

SEQ ID NO: 194663 - DNA, 189 bp, Homo sapiens
gggttatcttgtgggcccttcagtagtcagtatctgttgctttgcactctaattatctgctagtattgtgactctccactgcccttgctgttcagtactttctattcttttctcatctcacagcttctattgctgcatgctttttgctgccacatgacctcagctttcttccttctctctgtgtatctt

SEQ ID NO: 194664 - DNA, 192 bp, Homo sapiens
agaaaacatgataggaaaaacctatgtctcaccttcattttctccctgtcctaataacggttcttagcccacagccatccaggcagtgaatcccttaggtagtctaggctctgcccttaacagaacttttttttttttttttgagatggattctcgctctgtcacccaggctggagtgcagtggtgtgatct

SEQ ID NO: 194665 - DNA, 303 bp, Homo sapiens
tctcccccaccatccccaaacaaaacagtccttgggctctcctcattgtcccagccctgagccttgctgttgcctttggaaaatgccagtcaacgttcagagtcctgacggggaggcgacctacatgggaccacctcatgcaatatgcttctaaggtcagggctgggcgtggtaatcccagcactttaggagtccgagacaggcagatcacttgagcccaggagttcaagttcagcctgggcatcatgacaaaaccctgtctctactaaaaatacaaaaattagccaagcgtggtggtgtgcg

SEQ ID NO: 194666 - DNA, 359 bp, Homo sapiens
tagctgggattacaggcatgtgccaccacacccggctgattttgtatttttagtagagactgggtttcacatgttggtcaggctggtctcagactcctgacctcaagtgatctgcctgcctcagcctcccaaagtgctaggattataggcgtgagccaccgcgcctggcctaaatttatttttgagagaagaaaatgctttttgctccctcctagctcatctggtacagcaggagtcagcttgtcctgcagttcagatggtcttgatggcagaagacaccagtcaccattatgtccctttcatcccagcccgcatcccatcctgccctcttcccctgtcctgggttcacgtagtagcta

SEQ ID NO: 194667 - DNA, 361 bp, Homo sapiens
agaccccggatcttagagacgaactcggggtgggaccaggagcggcggtgcaggagccgctaccgccacaccggagacgcacatcacacaaaacacacacaccggagacgctcatgagacataacatacacacagtgcgagccaccgagtagttgccgcgggaactggccgcaggctgagtttctgacggtgccggcctctcagttacacgcaggagttaattacgcttgctgctcccttttcactgaggaggtggacaactccggcctgctctctttcctttacttccaagtttactattgaccctgtgacaggatgggccgaggtgatggaggggaggaggaatgcctttgcctgccct

SEQ ID NO: 194668 - DNA, 458 bp, Homo sapiens
aattgatgttcattgccttagtacagatatgctatatttagatatatttaactctattacacatactgcaaacacatactcttgttgtcttctacactattatatattttacttgttatagtagatatttattttagatgaataactaagtataataaaatagatagcagaggaattaattatctcacatggatatcatttcacctgatcttgatgaacaaggaaatgggtgatttacccaggaataaatataaagttctgtatggtttggaaagcacaaatggtcacctaattttgaaacactttaggtaaattcccattcagaaaaacatttatcacttatataactaatgaaatgcttaggggaaagtgttttggctgtcaaagaaccatactttgcttttagagactatgtttgtatttgaatatttcataaaaactatttctaagccaaggaa

SEQ ID NO: 194669 - DNA, 521 bp, Homo sapiens
cagggggaatccagggtggtgattctgtaccagggcagtggctttggaattgccagctcatagaattctgagtttgataaatggttgttgttttaagctgctggcttttgggctgctttggtacatagcaatacgaaaaggctatgtgcttttactccccagagtagcctcttcaagagggaagcttttcctatgcatatgtcctagaattaggagttcattactcatgtgattctcacagtaactctgtgaagccatgattgttacgcccactctgtacatggtgaaatggaagtttagagagataaaatgacttcttccaagttaaaaaaatctactcagtggtaaagcggaagttcaaagccagtctgacttcaaatcatagagattaacaatcacagtaaaatgtaatatactttgctttgctcatatatcttcagttttcaattcagtttctgagttatgtttaaattatcacttattgatttttccttctttattgagatggaagtctcttctta

SEQ ID NO: 194670 - DNA, 437 bp, Homo sapiens
ctggttatattagaccagtcatcctagatgtgtctgagttgtttgctgcaaatattagtcatttgtacaatgtcaatgagatctctgcttgaaaaaaaatcacatcagaatacctccaatcacatttactacaaagtttagatttattcatttattatttacaagtccttagcaggtaacaaagacacctttaagtaataggctccagagggcagcagataagaatttttctttctgttgttaaagggctttcttgcagtctaagaatgatcattaattccttgttataagaaaaattataacactagtacaactcaacttctttttactgcctaggaaatttttttcccccagagatttgtgtaaatataaggctaaagttgtaaaatatacatatgaaggaatacagtagatatactctgtatttataatgtaaa

SEQ ID NO: 194671 - DNA, 106 bp, Homo sapiens
tgtagcagtttaaacatacacacatcacatgtatgatttcgtgatatcttacatgcaatctcttactttctcacttctttctgagacaagcaattgaagaggattt

SEQ ID NO: 194672 - DNA, 496 bp, Homo sapiens
agtcccagctacttgggaggctgaggccagagaatcgctcaaacccgggaggcagaggttgcagggagccgagattgtgccatggcactccagcctgggcgacagagaggttccatctcaaaaaagaaaagaaaaagaaaaaaagaaaatagctgtgatttataccggtgacacggtctcaagtgttgtactactgctcctgctaaaccatgactctggtttcatacctttactcatagttgaaggaaatgttctgttacagtgagaggttagtgaaaatgaagaggtcacttctctattcaagttattggaccccaggttaaaaaactcttgctctagagacttagcctggaagagcctcttagttctgatggttttgttgctgttaagtggtgacacaatgcatataaaatgcttagagtacattctgagaaaggtggtctgtgtacctctggaattgtgattactactatcaagttttaccagtgctgtacag

SEQ ID NO: 194673 - DNA, 202 bp, Homo sapiens
gtgcacgggaggggagatcatgaaattcattgtccaggggaggaatgtcacaaggtcgattgattagttggagtggggcatgtatatgtgcacgtcacagggattatgatggcttagcttgggctcagatgtctgacattgaggatccttctttatcttcctctgatgcccttctatgagaatgaatctgtaatccgagagg

SEQ ID NO: 194674 - DNA, 401 bp, Homo sapiens
ggagagggttacagatttaaagaaacttgagagaaatatctaccaaatgcaaagtgtagacttcatttggatgctgctctgaacaactgcttaaaaaaatatatatatagggccgggcacagtggctcacgcctataatcccagcactttgggaggctgaggcaggcggattatgaggtcaggagatcgagaccatcctggctaacaaggtgaaaccccgtctctactaaaaatacaaaaaattagccaggcgcggtgacgggcacctgtagtcctagctactagggaggctaagacaggagaatggcgtgaacccgggaggcagagcttgcagtgagctgagatagcgccactgcactccagcctgggagacagagcgagagactccgtctcaaaaaaaa

SEQ ID NO: 194675 - DNA, 368 bp, Homo sapiens
tgcccaaagtaaatggatgtttgatttttcttgattattatatatgcatcaaatttaaaacacctgaatgcctttggtcaactttgtccttcaacccatgactgttgtgcttccttgtgggtttcctagacagtagaaaaatatgcattttatttaatacttttaagcatactgtctctctctttctttctctctctctctctctctctctctagttctcactcttgccttcactcccacttttgctctctgctctctcttcctctgtgctctttcagtcttaaattattacagtttatgcaaagaatttaaatctcatatcttctccactaacttctaatgctttttaagtgtcagggtacatataa

SEQ ID NO: 194676 - DNA, 309 bp, Homo sapiens
aaaccctccaccagcaaaaagatgatgactctctgaaggctcagatggttgttagcattgtatgcctgtatgtgtctgttatttcaaatacggtatcttatttaatcttcaaaggaactctatttctatcactatgttatactccagaaaacagatcctcaaacattaaccaattacaactattagctactgaggtgaaaaagttggaattccaagtatgccttaatcacttcaaatctcagacctcacacatgttatacatgttgcccctttcagagtctttaaaattttaactaagtagaacacaga

SEQ ID NO: 194677 - DNA, 383 bp, Homo sapiens
tgtattggtggtgctggctcaacttctctcattgggtcaaagtcaagatttcagttagagctttagtgatctgaagtcttgactgaggctcgaggacttgctttcatggtggttcgttcacatggctggcaagttggtgttggttgctagtgggacagctgagttcccatcctcgtgggccactccacggatctacttgagtatcctggtagcatgttagctgggttctcccagagtgagcaatcgaagagaaaaagagagtcagaagaaaactgtcctttttatgacttagatttggaagtcacaaagcatcacctctgccacattctgtccattggaagagaaacaccaaggccagcaccaccaatacagggtaccgagct

SEQ ID NO: 194678 - DNA, 461 bp, Homo sapiens
ggtcaataccccctccataatgtctttgcattccttcgtctaacgtgtcagaactgatgactttgataaaaaacaagttttatgcctctctttggccccctgctcgtctttgccacaagagtaaacacagcctgaaagggagaagagtgctggattctgttaagtctgttttacttttcaatattcagtttgtttttgccagacaaactggttcagttgtttttgccagcctggttcttgagatgggcttattgtctgggtaagagttttttcttttttcttttgaaagtaccactcttagtacataaggtaaataattttaaaaattacattatatccagttgtatatctaattttagggtgatagatagttggcctggcctttctaagtgaagcaatatctatccacactcccagatactctccccagctgtggtgaaatgtgagctctctgaatccaa

SEQ ID NO: 194679 - DNA, 195 bp, Homo sapiens
acaggcatttgttgttgacactgatgcagtccagcttgctgaatggcggttctgcatgtgaaatcaacatttagattgattttacacgagtgtttaatgtttgtggaaagtacttttcttggattagttaatattcttgaattgaaatgatctgttttttaatgaatagccaaagagctgctgttcctttaatgg

SEQ ID NO: 194680 - DNA, 477 bp, Homo sapiens
tcctgggattcatcatacctacctgttcccctcttgactttcactgtgacaattttaagtgcatccgccgctcctgggtgtgtgacggggacaacgactgtgaggatgactcggatgagcaggactgtcgtgagtgttggcagaggctgggcggaactccattgagttccactgggaaaggattttcaatcagaaagcaatgccccaggtccacatgagcccttgtgttttcagcactttgtcctgtcctttcacttcctctcgaagtcagataagctgctgagaggcagccacctccttcggagccctcagggcagcactggagctacttgactgctccggagggctttaagtcaggcttccagacaccagacccccactgcctgcagcagcctgactgctctgtgcccacagccccccgggagtgtgaggaggacgagtttccctgccagaatggctactgcatccggagtctgt

SEQ ID NO: 194681 - DNA, 147 bp, Homo sapiens
tcttgtttgctgctcctgaagcactccctctccctggaggggccgcgggtctctctaacgccccagtgggggacctggcccaagttcctttccccggtgataagccctgacccccattcccgggcctgcctaattcagggcgctctc

SEQ ID NO: 194682 - DNA, 282 bp, Homo sapiens
ggcttgtcatgtgctcattcctggttcagtcctgtggctggacataggttctattcaaaggacattttcacaagagttggagaaagatgagtccctccaaaagaggtgatatcctgagtagacagaacaaaaaatactcactgaagaaaaactagaaaatcaatggaaaagaaaaagaaatcacacaatcttttttttttttttccaagacagagtctcgctgcactccagtctgggcaacaagagcagaactccatctccaaaaaaaataaaaataaaaat

SEQ ID NO: 194683 - DNA, 433 bp, Homo sapiens
tagaaggatttactgtggcctgggactgttgcagatgatagagagcatcggggggctgctggggcctcctctctcaggctacctccgggatgtgacaggcaactacacggcttcttttgtggtggctggggccttccttctttcagggagtggcattctcctcaccctgccccacttcttctgcttctcaactactacctccgggccccaggaccttgtaacagaagcactagatactaaagttcccctacccaaggaggggctggaagaggactgaactccacagagtcaggcccagaaagccaaagcttgacagctccaggtcttctcttgccacgtcttggtctccacagaaccacagtgccttaagattcttgatctgcctccccctagagcaggcctggggctcctgcaatgtgtgtgccaacccttt

SEQ ID NO: 194684 - DNA, 636 bp, Homo sapiens
cacagttgccagaaagaaaggcacaagtatgcctgactcaatctggatctccaaatccctgcaggctggtttggaggtcctttctgaaggcggggaggtggttgaaattaacttttgaggcccttttgggaaaccagagttcttaagtttatccaactattccatgggagttccaactcctctgagatgataagtcttccctccacccaaaaatgtatctgagccctcagccccagcaaatagatcactcatgtgtattctttttctctcttggacctaggctacctccgggatgtgacaggcaactacacggcttcttttgtggtggctggggccttccttctttcagggagtggcattctcctcaccctgccccacttcttctgcttctcaactactacctccgggccccaggaccttgtaacagaagcactagatactaaagttcccctacccaaggaggggctggaagaggactgaactccacagagtcaggcccagaaagccaaagcttgacagctccaggtcttctcttgccacgtcttggtctccacagaaccacagtgccttaagattcttgatctgcctccccctagagcaggcctggggctcctgcaatgtgtgtgccaacccttt

SEQ ID NO: 194685 - DNA, 325 bp, Homo sapiens
accacttgctgtctccaccttccctacctttcatcaactccttgatcctctgtaatctggtttctgcttactctgttttattgtatctgctcttgttaaatttctaattgtggactctggcaggcagtctttcatccatattttttcactttcttatgttggccaccccctcctccttaaatcaattcatttcagtcaatcaattctgtccccacgccttccattcatccatccatccatccatccatccatccatccatccatccatccatccatccatccatcttacttcagtgttcctcaggcacacatccaaacaaccaca

SEQ ID NO: 194686 - DNA, 302 bp, Homo sapiens
gtttggttaggaacacgtgaactacggtcacctttctgaactttctgaactcatatgtagtgaccataggtcacctgggttgagttttcaacactgcaaacagggatggcagttcttgaatacacaggagagtgcattagccagtggtgcccggcatcattcagagtgcagtttggcatcaggaatgttccgtcaggtatttgtggtcttgtggagaaaagccactgttggttttggtgaagggcttcagaccctttgactgctcatgaaaccacacagtcttaacatggacacgttggacg

SEQ ID NO: 194687 - DNA, 469 bp, Homo sapiens
tgagagatgtgctgggagtgtggcctgcagaaacacacataacctatgtggtcccgggaaggaacaagggaccgttcatgagaaatgccatagactcaatagaaacggaaccagctctgcactgttctcaagctggattggaaatgagggtgcaatcaacctggaggtcaggaagatgaatctggaatccctcaacccagctctgaccggcaggcagctaagggaatgtcagtgacaatccttcagaactggatcccctccccacttctagatggggctaggactgttttagaatactctggattaatggagtatgacttatgaaaccaacacccttttcttcagggaataatagagcaatgttcaacatgagaaaaggcatgcttggtgtaaaaaggtggtcattacatgattggtcattgtgaaggatgcgtcaaaagttgatgtggcggccgggcatggtggctca

SEQ ID NO: 194688 - DNA, 395 bp, Homo sapiens
gatgggttatcaccatcttggtcaggctggtcttgaactcctgacctcatgatccacctgcctcggcctcccaaagtgctgggattccaggtgtgagccaccgcactcagcctagacctacaaaattatacttggagaatcctgacaaaaaggctggctgagaaagcacacccataattatactcaactctcatatagagaactccatttaactttgtagtgcttcatagccaagacttgccagaaattggcagaacatctctaacataagagagaccaaaagaaagaaaaatgtacctcggagataacaaaaacaatgtaataagcaaaagaaatcataaatgaactgtaattaatattcttgtagaggtgaggtgaaggaacaagaataaatt

SEQ ID NO: 194689 - DNA, 375 bp, Homo sapiens
catctttttcagcaagaactgtccttccttcacacctgcacgtccttccaaatgggggacacagcttcaacagaagacagtaaaacccacgcgcaccaaaaagtttacagaaatgtgtgctgagtgatcctcactgcccatgaagaggtccacgctcaaacatggctaatttggggaaaataaaacagagagtgtgcaacattgctgtgcagatttgtgttttgtattcctagcatgggagttaccatagaaataaaagaggtaagtagtttaagaaaaatcccagttgcatgcatcctggggactgtgaaccaaagaatggcctgagcaactctaggactcttttttgccatgaagagaacgatatttaaattg

SEQ ID NO: 194690 - DNA, 685 bp, Homo sapiens
tggcctgggcttgttcatcgcatgctcctcagctattcattcaactggatcgtgcctccctacatgctgggatctgagcgttgatccaccacacctggccattcaattgtttttgtttcactttttcacacctatacaatcaaccaccactctctacctttggcttactgatgtgtaaggaagaattgaaaggaaaaataactatgactctgctatctttgcttctcctatgtcatcatttccagtggaagtggttggctactacagggaatcagatgagtagaaaaggctgggagagagttccttgtttgttcctgtttcttagaatgccattgacttggttttcaattctgattctataataagggaaagtgcaacctcttggtgctgtcagcatctctcgcagactccgttgtggacatagtaggcttcccttatgcccacttggagccttgctgggctcccatgcactgcggaccccccaagattctatgctcagggcacggcagacacgccatggggagtgtggtggtaactcatattgttgctggtgtctcgtctgcccacgcacatgttctattgccctgttggattttactgataaaacatagattcaggctgggtgcagtggctcatgcctgtaatcccagcattttgggaggccaaggtgggcagatcacttgag

SEQ ID NO: 194691 - DNA, 473 bp, Homo sapiens
acctaaattattatgtaaccaaactacaacttgaccaggcagtatattcttgtaagaagaaaggagtcttctccaatcatagcagccagccttcagccaggggcagactgcagactgaccagatgtgtccaaattagacaaaggttgagctgtaaccaatcagcctatatccaatgccacttcctttttctgtttataaacgctgcttgcccactgttgctgggtggaggtctctgaaacctctctaatgtagatctctcatttaatggggagggtttggcctttaatcaccatcatccctgaacaaagactgaccaattggactcaaatgctattgaactatctttattgcatggactttgagttatttgattttgactagttgtttgttgaaactcctgataaggagtgtacttcagtttcttggcattgtccactcatagccatcataataaatttagggtgatgggcac

SEQ ID NO: 194692 - DNA, 398 bp, Homo sapiens
aatgggatgtgttctattacaaagactttttatattcttgaaatcttacccaaggaatacaaatatgaaatcttttatttgtaaataaagtatatttattgtttgccatttaacttttagcaagctatgcattctccagaaggaaaatgcttagggccattgcagtgatctagtcaagcaataatgttaattggaaatagggtgatggcagtggaattagaatacatgaaataataagatgtctttgagaatttaaatagccatcatttactgttggatttgatatggggattaaataaggtaaaagatttaaggatggtgcccatatttctgttttgaacaatcagttgagtaattgggccacttattgtaataggaaagactgggggagaatggac

SEQ ID NO: 194693 - DNA, 469 bp, Homo sapiens
tagggagattacaatggtcattgcttattaatccagcataaataaaatacacagaaatatgagcctatttggtacaggaattgatctaaagtattccagatccagagaaaaaagtaccttgatacaaccctggtagaacagattgaagagtaaaggaaactaaagctgatagttcttcaacagttcagctcccctaaagaagggtcagaccacttgttttagacactgagagaaatcagccaaataatgaagaaaacaacagagttaaactgaatttacagacatattaactttgtatagatacacaattttttagcatctagaaaactgatgagtaatgaatccagctgccagagactccctgatgaagctaactaaacagtgtaaagatcagtaaatggaccaatttaaagcagtttgctattagcttaatagtgtcagaaattctaaataataatagtaaaaaagg

SEQ ID NO: 194694 - DNA, 425 bp, Homo sapiens
gagacagaaaaagatcagtggttgccggaagttagtggggaaggaggaagaacagaaagggcacagagaatttctgggaagtgaaactactctgtacaattctctaatggtagacacctgccattatacatttgtccaaacctacagaacatacaacaccaagagtgaatcctaatgtaaactatggcctttgtgtgttaatgatgtaccaaatgcaggttcatcagttgtaacaaacgtaccactctggcacgagatactgatagtgtggaaggctgtgcccgtgggagggacagaagaaatatgggaaccgtccgtattttctgctcaattttgctgtgaacctaaaactactcttaaaagtctattttttaaaaaacaacaaattatgacaatggaaaactgatcagtagttgccaggggct

SEQ ID NO: 194695 - DNA, 599 bp, Homo sapiens
gcagcggtgctcctgcactctgtgcctcataataaaatttgcataaaaggattgcacagttcccaaaaaaatcgcattcaataaatgttagctccccttctcatttccacaccatctgagtggcttatatgcaggggaggcaagaattacctactaaagacagaatagtggacctcatatcaccctttgatgattcccagaacctggtagcattagtcctatcatttgggcccataacacaactactgtcccagtcctgcatggtctctggtaaccaagaaatagagaaaaggcagcagcaggtaacacaagaattgggtgaccaacaatctgcaaaagctacagaatccagcccttaaaaggttcaaaccaagtaccaagtacagctcccaatgaaaatatttaggccagatgcggtggctcatgcctgtaatcccagcactttgggaggccaaggcaggtggattacctgaggtcaggagtttgagaccagcctggccgacatggtgaaaccccgtctctactaaaaacacaattaattagccaagcgtggtggcacatgccggtaatcctagctactcgggaggctgaggcagaag

SEQ ID NO: 194696 - DNA, 470 bp, Homo sapiens
ccttattctaagatcatttcccactatcctgtagtctaggcacacagaagtctcccctggtagaccacatacttgcttttatccttcctttacagttataaatattgagcgtaagcacatagtaaatttttgttgccagttatccagagtaattgatacatcattttataaacttttgagaggaggatgttagaaaccattccatcacacttttaataaaaaacggtatcatctcaggtggaagtgaggcctattcacagatctcctaacaggtgattactgtctctgtggcaaggagaacttttatgaacctgccctttgtgagctatgggtaaataaggagtcttggatttatgactgcagctactattaaatagtggacagtttgaacctctctctctcatgatgaactgcagatatgtgacttaaataagccacccaattctgaactgagctttatattgcaactt

SEQ ID NO: 194697 - DNA, 353 bp, Homo sapiens
tcagggtctgtgttttatacttttatccattcactacacctaatgctgtgttggatataaggtccgggaaatactgtgtaaaaattgctggttgaattttggcagatcttggtaacgtgattatcaggatattccaggggaagtggcattagtatacttaaactgatagtttaagtgtcattaatttggtggatggtggcattttggggaaaagagccggtttattggatgataaatcaggaccctgatctagacaggctgcattatgagctaaatcaaagaataaattcaaaagaaaattagatgactgccaatgtacatcagacataaattactgtcattaagaattactg

SEQ ID NO: 194698 - DNA, 662 bp, Homo sapiens
gtggtagcatgtatgctgttagattaccgcgtagcaatcaagaatcccatgtagaaagctttctgtatgtagttatcttaaaaataattttgtatatgaggtgacaaaaaaaggagatgacaattttaataatttgccttctttgaaatattcactcctaacactagtttgagctggggagttaacttttttgcttgtgtttagatttcacttcaacatgaagctctttaaaaaaataacgtccctcaatcattcatgttacgttttaactagactcggcaaggagttagcagtctcagaatcatgaattcatgaaaaagatgagcttttgtgaatgtatttcttgcttcctaaaaaaggtcacatctattaaatataaggagataacatcgtttttaatagtatttcacacattagcaaaggaattttttattaaacatagttatcaaattttttggaggaggtgacaaaaaaagagaggaatacgcccaggatgaaatattgggaaatgctaaaatctagggaaaacataataaacaagaatccagtcaaggaaaatcaagaacttaccacaagcactgggaaaataaatcaggatagtggtgtcggcagacaccaagaggtagaccgatcggccgagtccaaaaactcaaaatgtcatc

SEQ ID NO: 194699 - DNA, 204 bp, Homo sapiens
cagagttgttttaattcaaagatttatttcctgcatctttggaaatttttccccttgattagttcacctctccattgcctaagttaatcctctatatgtcctattctttctttcattttccttttgtcttattgttttgttttctagaagatttctatattttattctccacctgttgattgaaaaaatatatatgtatttatt

SEQ ID NO: 194700 - DNA, 414 bp, Homo sapiens
aattttagaatgcaagatctgaaagggacatgggaatctgtgtttttaacgtgttccaggtgattctgctgaccaggtgagtatggtaaatgtggcaagtattctcaagtgagctcatcagtcccagggctgttagcaccttccatctgccaggccctccctggtctagaccttcagccttgaccttgccctgaaacgccaaactcttactcccagctgctttctctgtccctccacttagatgttagtaggcaccacaaccttttaatgctcaaaatactacttttgagtcctttccaccccttacttggcccctcaattcatactttttgggatggagcctcaaatccagaaatcttctgtattagtccattctcacactgctaataaagaatacctgagactgagtaattt

SEQ ID NO: 194701 - DNA, 147 bp, Homo sapiens
ccctccttccactgtgattctctctgactggcctgtctctgacccctaactcaggtttcaagggctccgttgattccatcaagcctatgaggataattgctctaccttaaggtcaactgatttgggaccttaattacatctgtaaaa

SEQ ID NO: 194702 - DNA, 683 bp, Homo sapiens
gctgactccgaggatccaggcaaagctctacacacacagcacatcattgactcatgtcaacaaaagcccctcacacctttttaagtcgtctgctgctaggccatgccttccttattctgtgcctgggcaagtagctcttgggtgccagaaatagctcctttccctttccattgcatattcttgggtccaggccattgcttctagtctaggagtgagagtgatttggatgctgattctgaccctgagtcatgacatctttgttcccagcctatccacgaatgcaataaacatggcctctttattttcattcaagccagtgataaaaatgtccaatgggactttgcaaaggatagaggcttgaagtcctgaattcagaacctctctctgagaacattaaattgtagcctctgaagaaccgtatccaaccagtccccaagccatccaatggtccatgcaccaaattcatgtcaaccccattgaacttatcaaatgccctactgaattcataaactcttgatctccctcatttctaccggtctcttaatcctatcaaggaaggaaacaagattctcttgaaagagtattttctctgtgaacccacagggcgtcctggtgattcctgctttctgtatgttcataagccacaaatcccctctaacaagccattcctgaattgttttcat

SEQ ID NO: 194703 - DNA, 602 bp, Homo sapiens
tcaacagaatcttgctctgctgcccaggccagagtgtagtgtcacgatctcggttcactacaacctctgcctcctgggttcaagcaattgtccttcctcagcctcccaagtagctaggattacaggtgggtacgccaccatgcccagctaatttttgtacttttagtagagacggggtttcaccatgttggccaggctggtctcgaactcctgacctcaagtgatccgcccacccgggcctccagaagtgctaggattactggcatgagccactgtgcctggccccttctccaaatgttctactaggcaagcccataaagtactgcatttgttttatttttattaaacatatcagaagcaatataatcacacaaacttaacagttaagacaacacagatagcccactatggtgattaacagtcattacttcatagtcacttaaatttttcatattaatgattaattagatattccttttttttaaaaaaatatagacactccctgacttacaatggttcaacttaggattttttgactttatgatggtgcaaaagcagtgcatattcaatagaaatcatattttaagcacctataaaaacat

SEQ ID NO: 194704 - DNA, 389 bp, Homo sapiens
gtagctgggattacagatgtgcaccaccaggtccagctaatttttgtatttttagtagagacggggtttcaccatgttggccaggctggtctcgaactcttgacctcaggtgatctgcccaccttggcctcctgaagtgctgggattacaggcgtgaaccaccacgcctggccttgaataatttttaagagtgttaaagaggcctcaagacaacagtttgagaacagcttgctttaggatgtcaggaatctggagccaggccacatgccgtcatatcccagccctaaccttcctagcggcatggctacagatgaatgactcagcctctctgtgtgtcagtttcttgatctacagtaaggagctaacagtggcaggtgctttgtctgtta

SEQ ID NO: 194705 - DNA, 262 bp, Homo sapiens
atgtgagaaggaaaatgcacatgtggataaaatgttttcatttgacgtcgaaaatgatagggaagtgagagtctgaaaacggtttcacaatgagaacacatggacacagggaggggaaagggaacaacacacgccagggcctgttgtggggtgaggggagaagggagggaacttagatgaagggtcaataggtgcagcaaaccaccatggcataagtatacctatgtgacaaacctgcatgttctgtacatgtattttatgt

SEQ ID NO: 194706 - DNA, 860 bp, Homo sapiens
  misc_feature (584)..(584): n is a, c, g, or t
  misc_feature (758)..(758): n is a, c, g, or t
  misc_feature (841)..(841): n is a, c, g, or t
tataagatgcacgccagtttttgtgggctcctcgtgacctccaaccctgccaataggtaaaaaccagatggattggaaatgaccagaatggcagacatgacctgatccacatgctaccaacctgccactcctgccccctctccgatccgcccctggcatcaccttcactccagccacaaacccctcacagttctctgaatgcgccatggactgtctccctgtggcctcgctgatgttccccgttctgtgatgctgtctctcttctttaacatggggaagtgtgctgtgtcttcagagaccggactcaaatcctgtataaaggcccccactgcgcaccgcccctcagaggctaaccactcactcctgattctctcataactttgcaaaaagcttctattatataccgcttatcaggttacatgacctaggtgcctctcctccccacgcccttttcctctgtttattctacaagtgtccatagaaggaacacattttgtcaagcattgctgaaaaagctatttaggttggggctaagagagtcccccgcaactgccccaacaacctttgtttttcttgtttttacntagaaagaaactgaggcacagagggattagaaaactgacaccaaattgctctgccagtaagtataaatttgaaccgaggcaacctgactctgagaacccacagttttaactgttacactttgtggccttgttagctgaacttaaataagtgattccagctttccagatgagganacctagaagttgaaacctagaagttgaattacttgctcaaaatcccactgctagtaagtggaagaggcaggatttgaactcangacgtaagggtcaaaattc

SEQ ID NO: 194707 - DNA, 229 bp, Homo sapiens
caatgaggggtgcagtcaaagcagtcaggggaagtctgtgggcaaatgtatgctggcagcagcccatctgctaaagctttctgttggttaggtggggtctgttggtgaaaaagctatggcagtggctgctgggaagcacccagtaggtcatctgaggctgtgctgcaatcagacatggccaagcagggaccctgggagagactggcagacaaagtgttgctcagatcag

SEQ ID NO: 194708 - DNA, 324 bp, Homo sapiens
aggctcatatgacattaacagacaagacacttttcaggaagacaggtaagtcatttgttaaaatctcactactcttgtttaacagaaacatatatatgcatgtatatgtgtgtactgtatggaaaaagtggaattagagtttatctagaaaagaaaaaattacctcatctaagtgcagaaatgaataatacgtaaaccataccatacaattgtctctatcatatttccacagataagtcaaaaatttttaaaatcttattgttcatgcataaatgcagaaaacaatacctctagtatatgtttgtgttctattgtactttcaca

SEQ ID NO: 194709 - DNA, 223 bp, Homo sapiens
aaatctccccacaatgtttgtactacattttttttaaagcataataaatcccagttgaattttcccaaggtagagtattgtgacttggacgaccactgtagttttcaggaaacagaaatgtagcaacatggatcccttagacctaaacaacagtggctcaagccctggattccttgagttagggggtaccactccagctatacaaccctccccatgaagcaag

SEQ ID NO: 194710 - DNA, 426 bp, Homo sapiens
ccaaatgctgctctctggaattggcaaagacaaagccaagtaggtttctgagcagacggacagactgacttcagagaatagaaggcccccggggtttgtgggcagcagcagggctcacgtgaatgagagctctatgattctagaatatctaattaacactgacactctcccccagcctctgccttatccttactccacaggctctgcagcagtgagaaggcatctgtctagtgatctgctgatctgcctcaccccaaccaagcccttcaccctgggatgttactagagctcttggttacttgagccacctacctaaacatttgtgaatacttcagccatgggacagcgactgtcaatcaatagtcctcagagactcatcagaacagtcaggggacagtttggtggtaccaagcaatgagcacgggg

SEQ ID NO: 194711 - DNA, 1009 bp, Homo sapiens
caggcgcaggggcagggaggagcccagcagcgaggcaggtggcaccaccaggggggccctcaagcctggcgcgcacgcattccagacgacacccagaccatgctccgccgcctgggcgcccaagctgcagtcgccctctgtgtgcaggcagcagctgcctggcaacccccgagcccgctcgcgctcccagcatcgcagaaccagggccaggtatcccagtggctgcgatcaagccagtcattctgcccggcggcggcggctgcacaggagccagaactgagaacccgccgctcagccccacacggggtgactgccgagtgcccgtgccagcggcccagatctccctcaggtggaggagtgggcgagaggcacggcctgggggccctcaggctgggcgcgctggcgatcccaaggccgaccaggccatgcacctccagcccgcctgggcacctaagctgcagccgccttctgtgtgcaggcagcagcctccaggcaactcccgagcccgcccgcactccccacatctcggaaccagggccagatgtccctgtggctgcggcgaagccaggcggtctgccctgcagcagctgcacgggggcgggaaccggccctcagccccatcccgggtggctgtagaggacccctggctggaggtctcgagctctggcagaggaggacccgggcgggggcagggtctggcgggctctcaggccaggggcactcgtgatccagaggccgcccaggccatgctccaccacctgggcgcccagctacaggcgccgggcaacttccaagctggctggcgcgcccagcctcgcagaaccggggctagatgtcgccgtgactgaggccaagtcaggcggtctgcccggaggcggctgcaccggggcaggaaccgaccctcagccccatccccggtggctgcagacggccctggagcggcccgatctctcttcggaggagaagaggggcgggagtcacggccaggggggccctcaggagggaaggg

SEQ ID NO: 194712 - DNA, 548 bp, Homo sapiens
atctcattagaatattgtgctaattggctgcaaataatatgtcagcaatatttacagctttaaaaagcttttggttttaggtggttgattagcagggatggcattacccggaaaatacaactaggttatagtagtattaaaaataactcaggtttttctaagtttgaaacattaatattttttatgctaaaaggttttaagaaaacacttgcaatttacagcgccttgtttagtcctcagcgatagaatagtgtaattttaaaaaaaccaaagtagggccaggtgtggtggctcaaactgtaatcccaccactttgggaggctgaggcgggtggatcacctgaggtcaggagttcaagatcagcctggccaacatggtgacaccctgtctttactaaaaatacaaaaattagccaggtatagtggcctgcgcctgtaatcccagctcaggagactgaggcaggagaatcgcatgaacctaggaggcagaggttgcaatgagctgagacgtgcaccactgcactccagcctgggcggcagagtgtctca

SEQ ID NO: 194713 - DNA, 347 bp, Homo sapiens
catatgttctgctcaccagcatgtacacagcacaatccccagcatgtaataaccacacaataaaagcataaagggaaaaaatggacacaggcttctgtctccaagttactttactgcctctatgcctctttagagctggctctcagcagaggggagaggaaactgctcctcatgtgaaagataaaccctacaacctatggataaaacagaggcaagaggtgggaatcaggccattaagccttggagaacacaaaggcagctctcatctagagagagctaaggctatctcctcactctgatgccaaggagggaaccctccagggcacccatcccaaaagtccagacta

SEQ ID NO: 194714 - DNA, 547 bp, Homo sapiens
atatgaaaattaaagaagttgctcctgaatgatcattggctcaacaatgaaatcaaggtggaaatcaaaaaattctttgaactgaacaataatagtgacacaacctatccaaacctctgggatacagcaaaagcagtgctaagaggaaagttcatagcattaaatgcctacatcaaaaagtctgaaagagtgcaaatagacaatctaaggtcacatctctaggaactagagaaacaagaacaaaccaaatccaaacccaaccgaagaaaagaaataaccaagatctcagcagaattaaatgaggtaggccatggtggctgtctaggcgcagcagctcacgtctttaatcccagcactttgggaggccaaggcgggtggatcacgtggtcaggagtttgagaccagcctggccaagatagtgaaaccccatctctactaaaaatacacaatacacaaattagacaggtgtggtggtgcacgcctgtaatcctagctactcaggaggctgaggcatgagaactgcttgaacccaggaggcggaggttgc

SEQ ID NO: 194715 - DNA, 465 bp, Homo sapiens
aagtgtgagtcaccatgcccagccacatttgattattttaaaatgtgatttataacttacttacgatatacttgaagcatttaagtaagatattttggaatatatcctatttaaaaacatacatctttggaacatatcttagaagataaaacttgaagctttaaaaagtcagtttgttaggccaggcgcagtagctcctgcctgtaatcccagcactttgggaggccgaggcaggcagatcacctgaggtcgggagttcgagaccagcctgaccaacatggagaaaccctgtctttactaaaaatacaaaattagccaggtatggtagtgcatgcctgtaatgccagctactcagttggttgaggcaggagaatcgcttgaatcagggaggcggaggttttggtgagtcgagactgcaccattgcactccagcctgggcaacaagagggaaactccatctcaaaa

SEQ ID NO: 194716 - DNA, 193 bp, Homo sapiens
taggatggatgaaatggcccggggcctctgcgaaggaagaattgctaggtggcaactgggagttaaagagactctggtttccaggctgaaaaagccctcctttatggaagctgccataagaaggcacagagaactgcaatcagaggcaatgagaaggaaacacagtagttattagctcattagcctgcaacca

SEQ ID NO: 194717 - DNA, 626 bp, Homo sapiens
ataggaaaccccaaggaatatgcaaaacaaacagagctttctgtaactaatagatgagtttgaaaagatcacaggatacaagatagacctgaaaatcaattgtatttctctacactagtaatgaacacgtagagactgaattttaaaatacagtgccatttacaactgctcaaacccaaatgaaataagtataaatctaacaaaacaggtacaggacttgtattctgaaaactacaaaatgccaatgaaagaaatcaaagaaggttcaaataaatggagacagatgccatgtttatagattgaaagattcaacatagcaaagatatcaactaacctctaactgatttacagaattaacacaattctaatcaaaatctcagcaagatttgttacagatatatataaaattattctgaaatttattttgaaaaagaaaggaaataaatagctgaaataactttgaaaaaaaggaataaaatggaagccatcagtctagctgatttcagaacattatatagctacgatgatcaagactgtgggatactggcatagggacagacatgtacatcaatggaacagaatggagaacccaatagctcaccacataaatatgaccaatggatttt

SEQ ID NO: 194718 - DNA, 3663 bp, Homo sapiens
  misc_feature (672)..(672): n is a, c, g, or t
  misc_feature (1237)..(1237): n is a, c, g, or t
  misc_feature (1310)..(1310): n is a, c, g, or t
  misc_feature (1938)..(1938): n is a, c, g, or t
  misc_feature (2410)..(2410): n is a, c, g, or t
  misc_feature (2818)..(2818): n is a, c, g, or t
  misc_feature (3655)..(3660): n is a, c, g, or t
  misc_feature (3662)..(3663): n is a, c, g, or t
ctctctctctctgtacttacttacttaatttatttatgtatttattttactaaattaagagggtatataactgaacaagctctcatgatgcctcccttttaatgtaggagggacaaataatttaaaaagtaaacaagaaaatagcaggtggtgataaatgcagaacaatgacaataatcagtgtgatgtcttagagagcccctaggggccatttttggcagggtggtcaaaaaaggcttctccaaaaaggggatttcagctgaagctttcgtgataagaaggagcatgctttctgagcacgtgggcttaccaggtaaaaagggcagctagtgcgaaagccctgtggtaggaataagctttggcaaatacaaggaattagaagaaggtcaatgtaccagaagcacagtcgttaaggtggacagtaaggaatggaatatgagacagtcagacaaatcctaagaaggcagggccttcataggccaggcgaagagttcagattgtactttaagtgttacagaaagccattggagggtttcaagcaggggagtgacatgacctgactcacattttaaaataattacttcggcctctctttggagaacagaaggtaaggggtaaatgtggaagcaggaaggccaagtaggaggcgagtacagtattttacacgagacncgataaaatctggactgtggttgtagcagtggagatagaaaaatgtaaaagaaaaaagaattaagacacatttttgaggcaatactaatattctaccttacaatctaccgcctccttactctgccaaatctcacacatacagcatgcattcatttatgctgtccattaacgatagtttattgtacacttactatgtgccagatgtagagccaggtcatggtatcacaccaaaagatagaagtcagctcagtctccaacaaataattttgcttagtcatcaataccagacctcatcctaagtaaccagttctgaataagatattattttatattaaagtttcaccaagaaggcatttaaaaaatgcaatattaaaactgaaagccagaagaattctacctgttagtttaatttttctgcttataataagcaataattccacataattctattagctagtttcatgtcattaatatcctctcacccatcttcacagtcaattggaagatcaactagaagagcttcttcaaatgcctgctagaagaattgtttctattttcagttttngtgacctgctatgctggggagattgaatgagatactcaagtaccttgctttttagactggaatctttaatacntggtactatcacccatagtgatgcctcatttttttaggtgactctctgccccctttttttaggtgactcttttcagcacctaatcttggttctggtaagtaggttgagaagctaatccttcagtcctaaattgaatttgcaaattgtcaatgagaagcacagtgttcttcaaacaaaaacagacaatactaggcttagggttttttaaaaaaacttcaagtcaggtataacataacaacctttccagatattagaaaggctgtctcaaatttctttataagctctttgaagaattagcaatgaccatttcctttccattttataagctaaaccttttcactttctattactttctttttttaatgtgttttacaagagtcctttctattattttccactttcatcatctataatatgatgctttcttgactcaaaattatccaacttcctgtggttaatatggacaaaattctgtaaattgtgcacgttattgacttgtagcactcagtgaagagagcaaaccaactgtaccacctggccaatatgcaactcccctgtcctctgccctgacactttagtgcagccctagccaggacaggccccagcccaagagtcctcagtagttacncaaggctcttctgggaatccactggataaatgtgtatcattggtttttctctggcttccctatataattgataaacatagtagtgttatttctaattcaccatttacagaaaaataattgcaatattttaggctgtgtgatataaaaacatattattgacaattgattaaatggtgtatttgtgtcttgttctattaaaaaattaagagtaggttcttagttagaaaagtagtcccctatgactttgagtctcaaatgtattatttaactggtagagcaactgaaaatcataacataagatatgatgaaatattcagatatcaaatttaaattaatttagtactgattgagatcctattttctcattctctacataatgagaatagagaaggtttaagaaaaaatgagggttaagttttagtggagagaatttcagtaattaatttaattttcttcctaaaaatttggaaanggctattgtcattaagtgttaatactgaagtagtgacgctctatggtctcaaatgggaacagagctccaaattcacgatcctgttacaacattgtttatatgcagaaatcaattaaatttatatcgtttacattcaggggctgttaagctgccacaatgctgagaattgcctgtagtaaaatgtctgtagcatgagagagccacatttaaggaaagaaatcagttttactacatacatcatgctctgtcctaatgaatttcaaacacattgaggaattggactagatgccctcagtagtcccttttagccctgaaattttgtgatttcatattaaatgtctttggtcaccggataaccttgcatattgaaaaatgttgcacattttgataagcccagggtgcaagagntctttctgtaagcagccttagagaattgttgttgaattcttcggaaaagtaagtctctagaaaaatctaacgtctgaaaataaaagcagattagagagaggtgagcagcagaaatttacacaccagaatgctaagaaaacattgcagaaaagttctttttaatcttctgataattgcaaagcaagtaggtcactagttgagatagaaacatctttttcaaagcttccttttccagccaggaaaatgtagaaatgtgtcagggatcaaatatatttgcagaatatttactatggaaacttgtagactttgatattttaaaatgcaactgcaataacaggtactttataatcattcaaatgaattatgaacatgtttctaagcagaggccctgccaggcctgatttttatgggtactgggaccctcaattattgctgcagaaaaaacttggcattggtgtctgaaagacttggttttggatttgggcattttgctacttaactagctatgcaagttactagcttaggcacgttaacttaagttttctgtgactttaccgactgtaataatataatagctaccgcatagttgaggatgaaagaaataatatgtgagaaaatacttaaatacaagtttcctttctctttcctctcatctgccatcactgcttctcaccaatggccacactcaggagaaaacacaggcactagtgcccttcgaaagaatttgtactcttaccatccttttatatttttttgttgactcctctaatgtacagcaagtgagtaccatatcaaataaaagaaaattaagttagtaaaattctgaattaacattannnnnnann

SEQ ID NO: 194719 - DNA, 828 bp, Homo sapiens
gatttgtaaaaatataaaatttttatatttatattttgtgtttataaattgtatgccaatttttgtagagatggggttttgccacgttgcccaggctggtctcaaattcctggcctcaagcaatccaccttgcttggcctcccaaagtgctggggttacaggcatgagccactgcacctggccatccatgtaatttgtatgtagggctgatgcacacacctctgtaagtagtgctggggttacaggcgggagccaccatgcctggccatccatgtaatttgtgtgtaggcctgatgcacacacttctgtaagtacagctcaggttaccagcatgagccactgcgcctggccatctatgtaatttgtatgtagggatgatgcatacatctctgtaagtagtgttggggttacaggcatgagctcccgcgcccagccatctgtgtaatttgtacataaatccatgtaatttgtatgtagggctgatgcatacgtccctgtaagttgtgcattatgccttgtaatcagcagcccatagtcattcaaagtctcgccagaggatgggtaaaatgttaaaataattattttaacaaatttgatcatttaatatttaactctgaatgagctgttgactagacaatatttatctaaaaataaatgttaaaagtggcaatagcctgggtgcagtggttcatgcctgtaatccgagcatttttgtgaggccaaggtgggaggatcacttgaggaggccggggattggaggctgtagtgagccataaactcaccactgcattgcagtgtgggacacagagcaagctgaccttgtctcta

SEQ ID NO: 194720 - DNA, 575 bp, Homo sapiens
  misc_feature (20)..(21): n is a, c, g, or t
  misc_feature (26)..(26): n is a, c, g, or t
  misc_feature (381)..(382): n is a, c, g, or t
  misc_feature (386)..(386): n is a, c, g, or t
tagaggatccccaagtaccnnctgcngatttctggacccccagtgcctagtgaagtccctcaaatagtagaccctcaatacatattttctgctgactaaataaaacatctgtgattcatgctttccagtgggttaaccattctccttacaatggtaaagcttatcatggtaaagctttagctcctacttataagtggaggaaaagatggaggcaacataggagcgcatttcggctttctctcatgcgtcggccactgtcttgagttactggcctgatttcttctggtttggactctgaaaatagctttacgggtcctttttgatgtattctgcatttttctttttcttttcttttcttttctctttttttttttttttagnncccncctgcacgggtgggggaagctcatgcccgggggacagacagacacagaaaacttcaacagaattctctatgggtccccagggagagagctgctctttcttctgaagctctgggagctggcccagcccaggacttccttggctcagtctccacctcgacagtggcagaatggcagcctccaaaagaaaac

SEQ ID NO: 194721 - DNA, 426 bp, Homo sapiens
tgattctagagtatcccgctagtgtgcagctctctatagagagttgactccatgatgacccccaccccgagcccttttttatttttttaaagagacaggattggccaggtgcagtggctcatgcctctaatcccagcactttggaaggctgaggtgggtagtttgcttgagcctgggagttcaagaccaacctggcaatatgctgaaaccccatccctacaaaaaaatacaaaaattagctggtcatggtggcgcttgtagtcccagttacttgggaggctgaggtggaaggatcacctaaatccagggaggttcaaggctgtagtgagccttgatcattctgctgccttctagcctgggtgacagagtcagactctggctaaaataacaataaaaaaaagaacgggggttggtgtcagggctcct

SEQ ID NO: 194722 - DNA, 303 bp, Homo sapiens
caggctttcctgcatcaccgttcttaagggctatgctgctggactgacccatcactatctagaaactgtctggaaaagaaaatctcacacaccttggcctggtcttccagatcggagccaatcttccctttagtcattttccctatgcctctttgccctgagaaagctcgagaatctgccaccctctcaccctctccccacagttgaacaaccttcctaatttaggaatcttaaccactttcctaggctaggagggctcttatttcaggacatgaaaatgggatgaaaaaatcagaaagtttt

SEQ ID NO: 194723 - DNA, 453 bp, Homo sapiens
gacatgcccaaggtgcaggaggtatgaatacctccccactgtggctggtaacaccccaggtttctccaactccacagtgatgggctttcctccagagccggttcctcaggggcaggagtgagaagtgtgtgtgtctgtatttatccttccaccagtggctgtgattggtcctgtggttggaaacagggtcaagtaaggcccttgggagtagctgggtgaatggacgatggtggcgtccaccttggacatggcacatacttctggtcgggtatccacgtggctggccaacccggacctgccctattaggggccatcgccctcatggctcatcagtgctgagtttcattgccttcttcgtaatgcaatactaatggatacaggcatgtatctgccgtacactagatgaaatgtggttatttgctcaggtagaaataaagactaaaataccaaagt

SEQ ID NO: 194724 - DNA, 610 bp, Homo sapiens
accgtttctgtaacatttctctcttcaggcaccactcctcccctgcccctctggaagggaagaaaaacactcccaaatacctttacaaaggcacatgtggtgggcagccgacctcttacatgaacactacctcataaagctccaagaccaccgtaagttctaaagcatggtgtttggttatcttaaataatcaaaccaacgaatcagcaaagaacaagagttaaaagagagcagtaaagatcatctagtgcaaccctctaattttacagacaaggaagtccagggaataaatgacttcacaagttactaggttgcagagcttgaatcaaagccataactggaacccaaatctcttgaaatctcagcctacgttcgagagtggcacctagtagagaggtgcacgcttgcattaacacaaatctcataagactgaaatcggcttttctgattggtgagggaaatggctcacattaggaaaagcaaaagtcaatgatactatctcagagttaatgatctgccaaccagaccctaagaaagcttaaaaaataatcggccttaccttaacatggtatcagtgactttgacctaggcacacatctcaatcactggt

SEQ ID NO: 194725 - DNA, 188 bp, Homo sapiens
cgcctaatccttaaacacaactcttgggagattcctgaattctagccacctttgcttatatgggtcttcccacaaaaaaatactatgttgtgatcttcaaggtgacaaaaaagcctttcttgaccattccagcagactcattcattaattcctactaatgaatggggcagtaacatccactgcctgca

SEQ ID NO: 194726 - DNA, 303 bp, Homo sapiens
gggatcctgttgatctgtgaccttgcccccaaccctgtgctctctgaaacatgtgctgtgtccactcagggttaaatggattaagggcggtgcaagatgtgctttgttaaacagatgcttgaaggcagcatgctcgttaagagtcatcaccactccctaatctcaagtaatcagggacacaaacactgcggaaggccgcagggtcctctgcctaggaaaaccagagacctttgttcacttgtttatctgctgaccttccctgccaaatccccctctgtgagaaacacccaagaattatcaata

SEQ ID NO: 194727 - DNA, 883 bp, Homo sapiens
ggaacgtggcccagtgtgattccaggcttctagtctccaaaactgtgagagaataaagttgttttaagccaccacatttgtggtaacttattatagtagcatcaggaaattaatgcatgtctattttctttcttttgataatttcatttaaaaatagataggagaaagagggaaaatggtaggaatttttttatttatttttttatttatttttatttatttattcatttatatttggagatggaatctcgctctgtctcccaggctggagtgcaatggcgcaatctcggctcactgcaacctccgcctcctgggttcaagcaattctcctgcctcagcctcccgagtagctgggactgcaggtgtacactgccaagcctggctaattttttgtatttttagtagagatgggatttcaccacgttgctgaggctggtcttgaactcctgagctcaggcaatctgcctgcctcagcctcccaaagtgctggaattacaggcatgagccaccacacctggccagaatgatcatttttaagatgtcaaaatgtattacagaattaacagtgtagaattacttaatcaggaagttaattggaaaagtattaatactataaatgaaaaaacataatagtctaagtacaacaatttatccattcctttagcaatagttggacacttagaatgtaaaactgttcaaacaaattggtatattggagtttgggtagaaagaagggcgttggaagaggaggaaaagagggtgagatgatacattaatataaattactgaaaggtggtgttcacatttagaattttttttttaagttgcatgtttaggattttagtgctcaggaggaaagaaggccagtgttgcccttccagac

SEQ ID NO: 194728 - DNA, 199 bp, Homo sapiens
cttaccctgggctccccacagagtcagagggaaatatgatgaaaaggcactgggatgcagcacatcacagaaagaacaggcccctttcagtcatccattccctcaacacatactaagggcccagcatgaggcttgctacttgaagctgctgcacctatattaaaagtcatattcatcaccatagtggatgctcagcgct

SEQ ID NO: 194729 - DNA, 293 bp, Homo sapiens
ggttatattaatatatgttatagtatatactacattattaggcccaccaaaaaaaaaaggtgtcaaaggttaaaatttttttccaattatttttgttccccaaaatatttttagatttgtgtaatttttttgttttaagtctcctcatcttgattatcatctctaacagcaacttacctcacgtcacttatatactgtcaaatggtaaattgctaattttgctttatttatttattttgagatggagtcttgctctgtctgttgggtgatctcggctcactgcaacctcctcc

SEQ ID NO: 194730 - DNA, 203 bp, Homo sapiens
ctgaaaataaaataaaataaaataaaatacctactgctgcttcagtcagcactaggtctcctctatttttgaaaatggagctctaagctatggtcattatgaggcttagtcagactcctcccatcatttctttatcattaaatcttccctaagcaccaagacaagatagctgggatccccacagacaatgcccctgctctaat

SEQ ID NO: 194731 - DNA, 341 bp, Homo sapiens
atactggcatctactggacagaagtcagggaggccaggatgggaataagcatcctacagagagctgggcacagtggcgcgcacctgtgatcccagctactcaggaggcgaaggcgagaggattgtgtgaggctgtagtgagctatgactgcatctgtaaacagctcctgcactctggcctgggcaacatagtgagaccctgcctcttaaacaaaagaaaacatcctacagtgcacagaccaccacccacccgcagccagaatgtctgccatgccacagcatgccaaggctgggaaaccagggctaaaggagctcatttctgcatttggttcctgcaagggc

SEQ ID NO: 194732 - DNA, 262 bp, Homo sapiens
tccatcctttcatgaaactccttaaagatacaatattctaggattttacaagcttgcaaaatcctagaatattgtatctttaaggattttgcaagcttgtaaatttttagaaattaactcagaattaagcaatttacactggacatgactttaaattgtcatagttagacacaattgacaagaaaattttatttacaggcgtgagccactgcgactggcctctgaagttaatttaataaaacttcataaataaatgtatcaa

SEQ ID NO: 194733 - DNA, 676 bp, Homo sapiens
aaggctggtgtggcagagtcacgagcagtgaggggagagtgcttggagatgaagtcagagaagtggacaaagatgagaacttgtaagactttttggtcatggttagaagttggattttattctaagtgtgatgggaaaccattggagggtttaagcagaggaggatgaagatctgatttatattttagaagaatctatctggttgcttgagaattggttatgggatgggggtgacgggattgcgagcagtcttgcaaatatgagttgggagaagcgaccagctctgaggtatgctagtgggttgacaggatgattaatggagtcagtgtcaagtggtaaagagaacagatgaaataagagtttctgatggcgctgtttcctgagatgtgttctgggacaggagtgggtttggcagaaaggaaatagaaacttctgttttgaatgtgttgaatttgaggggcctgttggaaccaagtggagatgttaagtcggcagatagtttctaccacttgagttcggggaagcagttgtggcctgagatatgattttgagagtctttgatgcatgcatgatattcagagccgtggaatttgttgatcttatctgaggagagagcacagatgaggaaagaagaagcctgtgacccagcccatggggctccccaatgtatagagat

SEQ ID NO: 194734 - DNA, 665 bp, Homo sapiens
aagtgctccacaacactcagtctgaggggaatgctccaggtagtgattgttgccagtgttttgggtggggaggtattatttcccatctgtctacgtgccaacacattattgaaaacaatggatgtgtctgatgcctagaacatgctatgtttgaaagcacttctgtactttttgtacagctctttttgtgtaagcaaagggagacttagaagaactcacagagaattgaatgatgctgctttacccaggccagagggtttctacttcctttgtgtgttttgtcagtgccattagtggtaactggatgtttgaggggaaaccactgaggacacagaggcccatgagctcctgataagccgtgttctttgtggagcaaaccctttgctgtggtagggcctccctgtgtctggagggcatagctgatacttgctgggacacagctttggtcagccccacaagaggtgcccaacaagaggggcagggtctctgctgcaaacctctggatctacatgtggacatctctgcctgctcagacttctatgtggaaaatctaaagcaagaggattattggaaaaggtgtacatttcttttaaacaatttttttattgtagtgttcttttttcttttagcacacatttattagacaaagggataatcctaattaa

SEQ ID NO: 194735 - DNA, 355 bp, Homo sapiens
atgtgctgtatgactttgggtaagtagcttaacgtctctgtctgttaagcctattaatttaaaaatgggactatgaatacccatttcataacatttttgtgataagtaaatcaataagtaaaatgcatttagaatagtgcctggtcatagagatactggctgttattaaatatcttattaaatattcaccaagatataaaaatctgataaaaacctaattgtgacaaaattagattagtacagggatttatctgggacttaatgaggactagaaaatggccatgttaaatgaatctccttaaaactggaattaaaatttgtggatagtgaggattccttgtagtcaaggaatcta

SEQ ID NO: 194736 - DNA, 268 bp, Homo sapiens
tgagacgaccttatctcaaaaaatgaatacataaaaattaaaaaattaaaacctgtgttgacacagattcatattagctagctgaaaagggtacacctatctagagaaaacagctcctttatcatcgaagaaacgcttatgtaacttgtaccatttgtttgacctcttacaacaggaaatctaaaattctcagtagctgatctttgaattttctgctgaagaaccaccactgagcacgtgggctccaatgtgcttaaaaaattatctc

SEQ ID NO: 194737 - DNA, 478 bp, Homo sapiens
gtgccctgacatattgccaattactgctcacactttgagaccattaaggagctccaacaaaaagtaagatgaggccttgagctctggtgtcagtggcatggaaagagagggctgaggattggtgatgggagaattggaggggttgcctggggggatgacagtccatgaatgttcataaagatggattgaaggtgccagaaataaactgtgatgtcaagggcccaaccacttggttctacaaccagttccattcaacaagcatcattgctgatgtctgcaatgagaggactgtgagtgggatatggatttatttcttcacaatccagatcctgccttatttaaggacatgccaccattcactcactagttattgagcaccagcaatgagtgattgcatcgctgggtgctggggagcagacagtgcctacaaaatgaagcctcagctctttagcctggcattcaaggctgccatgttctc

SEQ ID NO: 194738 - DNA, 147 bp, Homo sapiens
aagaggcaaccacatatgtacaatgaaatattttccaactgttttccctggaatcgcaatgctccacagaaacatatgtaaaattcaccatttatggattccatgaatgtttgcctcaaatttcattttttaaactgaaaactcaaa

SEQ ID NO: 194739 - DNA, 498 bp, Homo sapiens
ggctaaaaaaaaaaataaataaaagagagagaaaaaaggaggctgggcacagtggctcatgcttgtaagaccaacacttacaggcagacacaaaaggatcacttgaactcctgacctcaagtgatccacccacctcggcctcccaaagtgctgggattaccagagtgagccacggcacctggcccccaaggacatttagctcagtgtttggttgagtccatccttcttcctccacatgtctgagcaccccacctccatccccctttccctcctggatcctatttttctcccagcccaccatgaagaaaggtcgtttatgccctgggtttgccgcgcaggaatgctaagaatcagaggtatagcccttggctccaagtcacatagccattccagggcaaaatcaaggtgtaaacacagcctcccagttctggaattcttcctgggcttggggcttgcccccacatacccactaactcacctgtctcccattcttcccca

SEQ ID NO: 194740 - DNA, 619 bp, Homo sapiens
atataagacctgaaacagcacaactacgaggaaaaaaaaagtgcaaaagcttcttgacactagtctgggcaatgatgtttgggtatgatactaaaagcacaggcaacaaaagcaaaaacaggcaactgagattgcatcaaactaaagagcttctgcacagcaaaggaaacaatcaatagagtgaaaaggcaacctatggaatgggagaaaatatttgcaaaccacatatttaataagcggttaattcccaaagtatataaggaactcctacaactcaactgcggaaaaaacccaaccaatcaaattaaaatatacgcaaataacctgaagacatttctcgaaagaagacatacacaaggcaaacaaacatatgaaaaggtgctcaacatctttcatcatcagggagatgcacattgaaaccacaaggagatatcacctcatgcttgttaaaatggcttttatcaaaaagacaaaagataacaagtgtctggcaagaatgtggtaaaaagggaagcttggtaccctgctggtgaaaatgtaatgtgttacagccataaatgaaaaagaaaatggaggtttctcaaaaaataagaaatagaactccacataatccagcaat

SEQ ID NO: 194741 - DNA, 369 bp, Homo sapiens
agttggggaaggacgaggcagctgtcatttgcagaacagaatgccagaaaagaagttaagcctagaaaggctccagaaatcctcacagggtgtctttcaatcttttgctaaataataatctatgtatgcatagagtgaaacaacaccaggcaaatttaagaacaattaattccagggggcagaaaaaaggcataagaaaagaacaaaaaacatgggagaaataaaaaacaaatggcaagatggtcaatttaaacctaaccctatcaaaattacatcaagtataaatggtctaagcacttctaattaaaaggcagaaacttcagattggataaaaaagccacacccaaatatataacatccacaagaaaa

SEQ ID NO: 194742 - DNA, 365 bp, Homo sapiens
gaaatcacaggagaagagatatttctccaaagaagctctaaagatggccagtaagcacacgaaatgatgctcaacatcactggccgtcaggaaaatgcaaaccaaaaccacaatgagatgccacttcccacccgccaggacagccacagacactaagaaatggtggcgaggacgtggagaacctggagccctctgcaactgctgcagggaaagcaagatggggcagccaccgtgggggtccagcagttcccccagggtggagaggccgtggctcagcggcagtgtgtaagggaacagggcacaggcaaagcctaaagcgtaatggaataacctggggcttgtggcatctggtgtcacgtaggaaa

SEQ ID NO: 194743 - DNA, 381 bp, Homo sapiens
tctgcaggggatggttcttgaggcaaggcagagcctccacccagtcagtcttcttttggcactgtgcacataaacacgagatacatgagaaagaacaagcaaaagctctctgtaaaacagttatgaagcatactaagaagggaaatccaagtgttgcctacgctagtataaataagcagacagccttgatttaagagcataagtagttgtattttaaagatgagaaaaacacaagttctgcaggcacctaccgctgtctactaaaagctatcgctatcagacctagcattgaacacacaaagcaatttgcaagaaaggaaaaatttgccttgatataagcgctgagcattacacctgccatcacgagtcaccattcgagat

SEQ ID NO: 194744 - DNA, 620 bp, Homo sapiens
cactggaaaagcagtatgtatcaagaaccatgtaattaaaaactacattttagtatacacctggatacataagatacacttgatttttcatgtatttctcacaggaatttgatacttctcactgtgaatactggttaagtatcccttgtccaaaatgcatgggaccagaagtgtttcatatttcagatattttcagattttggaatatttgcattatatctactggagttcagcatccctaatccaaaatgctccaatgtgcagttcctttaagcaccatgtcagcactcaaaaagttttagattttggagcatttcagattagggatactctagctctgtcacctttcccatttttcatataaggaaactgagggtcagaggtgaagtccttttcctagatgtcccacaaactattaagtagaaatgccaagagttaaatccctcgagtgctacataatgatgtttctgtcaacaatgaactgcatatacaatagtcccataagattataatggagctaaaacattcctctcctactgacgtggtagccattctaagagcacagtgcgatgcatttctcatgagtttgtggtgatgctggaataaacaaacctactaag

SEQ ID NO: 194745 - DNA, 379 bp, Homo sapiens
tcattcatcttctccttcaaaatgctgacacaagcagagaagtgaatgaacaaaaactcactgtttgtatttattcatgtttccaagtgattcatgtttagttatcctttccttgaatcaccattcattaaaagtggtttggtcttctttatgcctatcttctctgtttgtgataatctttctattctttgggattcaggtcaatttactaagaaaaactcatgattaaatatcttgaagaaagcagacatgggctgggtgctatggcacacacctgtaatcccagcagtttgggaggctgaggtggaaagattacttgagcccaggagtttcagactggcctgggcaacagagcaagaccctgtctctacaaataaat

SEQ ID NO: 194746 - DNA, 591 bp, Homo sapiens
tactcattgatcctttgtcatacattggatttttgaaatttgctccatttctaaaaacacaatattctaggtgctgtctactttaaaatattgcacctatctctttttttgagacaaggtctcattatgttacctaggctggtcctgaactctttagtgcaagtgatgcccctgcctaagcctcccaagtagctgggactaccagcgtactcccatgaccagttaaaaactgcctctcgtgatttaaacaacatacttctttcattctgagatgccactcattcgtcagtttttattgttttcataggcagccatatgttatttcaagaaaatatttgataatgagtatactaagtttaatataacaattttctttgatttcatttgggtaggatatttctaatacttaaaactcaacttgattataatttttttttttttttgtcacccagactggagtgtaatgacacaactgcagctcactgaagcctcaatctcccaggctcaagtggtccctccagagtagctgggactacaggcgcatcaccatgcccagctagttcttgtatttttttgtagagatggggtttc

SEQ ID NO: 194747 - DNA, 267 bp, Homo sapiens
aggacaggatgaatgtatgagaatcatcttcttactgagaatggtaggacagaagggatagtttagccactatacttcctggaagaatcagtacttgagggttgctgcagctttttgggattgaaggagtatgttcatttcctttggaagattaattttttccttttttttgacatggagtctctctctgtcgcccaggtggaggttgcagtgagctgagattgtgccactactccagcctgggtgacagagcaagactccatctca

SEQ ID NO: 194748 - DNA, 189 bp, Homo sapiens
atgatagtcccaaagtaattcaatgaatcctaattgatgttttacaagaaaagcaaattctcatctacataaaggttaatagattgatgcccaaataaccatagataggtgagttatttaaatttccactttaggccaggcgcggtggctcacgcctgtaatcccagcactttgggaggccgaggcagg

SEQ ID NO: 194749 - DNA, 1035 bp, Homo sapiens
tacccgccaccacgcctggctaattttttgtaattttagtagagacggggtttcaccgtgttagccaggatgggtctcgatatcctgacctcgtgatccgcccgcctcggcctcccaaagtgctgggattacaggcgtgagccactgcacccggcctacaactagcccttaattccctctccagccacctctctctagtctctggccaaatcccttactttagccaaatcagtccattcatttttcccaaacatctggccctctgccttcacctcctttctcacttgtttaaaaatcccactccaagatctagctcaagtttcacctcctccacaaagctgcctgtgccctctgcaactacaaggacttttatagtttttccccacgttggctcctttagctctgttagcacaactcatttaacacctcccactcattcccttgtattgctatatatcttgtttattcgtgtaatatttaatattaaaaattatttttataacctgagaagtaacatctgagcaggaaaaaaattataaccaaagtaatttctattgtaaaagatccaaacaatacaaaaatatacagagcaacatgtgggacattgcccttactcttctctctcccatgcccaaacgtaaccatcctcagctatttgatgtgcatccttctagttccttttttaaatgtatgtgctgacacatgtttgtggaggggttaaaatataaatgggctcatatcacatctgttattctgctacttgcttttttacttagggtatatatacatttgtcttagagattttctatattagtgtaattagatctccttttaatggcttctcagtatttcatagtataatttcttcaaagtaaaacatactgtctagaatctattatttggaggctatcgtgtagctagtacttagctccagacatgattgcaaccttgaccttgccatcagttagctggctctttgggggagataggaagggaggaatggggcatacacaaataactgcaacaaaaggaaaa

SEQ ID NO: 194750 - DNA, 944 bp, Homo sapiens
gagatagggaggaagtcataggtagtagcaggtggattaccaggcgtgagccactgcacccggcctacaactagcccttaattccctctccagccacctctctctagtctctggccaaatcccttactttagccaaatcagtccattcatttttcccaaacatctggccctctgccttcacctcctttctcacttgtttaaaaatcccactccaagatctagctcaagtttcacctcctccacaaagctgcctgtgccctctgcaactacaaggacttttatagtttttccccacgttggctcctttagctctgttagcacaactcatttaacacctcccactcattcccttgtattgctatatatcttgtttattcgtgtaatatttaatattaaaaattatttttataacctgagaagtaacatctgagcaggaaaaaaattataaccaaagtaatttctattgtaaaagatccaaacaatacaaaaatatacagagcaacatgtgggacattgcccttactcttctctctcccatgcccaaacgtaaccatcctcagctatttgatgtgcatccttctagttccttttttaaatgtatgtgctgacacatgtttgtggaggggttaaaatataaatgggctcatatcacatctgttattctgctacttgcttttttacttagggtatatatacatttgtcttagagattttctatattagtgtaattagatctccttttaatggcttctcagtatttcatagtataatttcttcaaagtaaaacatactgtctagaatctattatttggaggctatcgtgtagctagtacttagctccagacatgattgcaaccttgaccttgccatcagttagctggctctttgggggagataggaagggaggaatggggcatacacaaataactgcaacaaaaggaaaa

SEQ ID NO: 194751 - DNA, 339 bp, Homo sapiens
ttgtgagatgaagtgagataatccacaatcagggttaagacagtgcacttgttatgcagtaaatattcaagacattagctactattcaggtttataatcttttatccaaaacacaagggataatacagctttcagaatttcaaattttacagatttagaaagataatataggggctggcgtaatgcactataatcaaagttactataatcaaagtctgcatcaaaatatatgaatgtttacagtaaggaggataaataactagtataaacagccttatgtcagctcaggacagattttgccatgcaaagagatctggcaccgagttatgaaaaaacttt

SEQ ID NO: 194752 - DNA, 437 bp, Homo sapiens
atgcagatctgaaccaagctgagattagggtacacactctcctctactgaaaagtagctagagattccaactaggtgagaagaagagtggggcagaggcagaccagacaaggactgatcacctggaaaaagccggtcatcaaaggtcttggcaaatgctgggtgcagtggctcactcctgtaatcccagcactttggggggctgagacaggtggactacttgaggcaaggagttcgagtccagcctgggcaacatggcaaaaccccatctctactagaaatacaaaaattagctaggcatgctacactcctgtaatcccagctactcaggaggctgaggcaggagaaatcacttgaactggggaggcagaggtcgaagtgagctgagattgtgcccctgcactccagtctgggagacagagtgaaactgggcctcaa

SEQ ID NO: 194753 - DNA, 245 bp, Homo sapiens
gtcatataattcttatattttaaatataaatcgaaccaactaaatttaccgctatatttttttctacatattcttttttcaattttcattttgaaaaaattcagacctatgtaaaagttgagagtagaacaaagatacttggtactcatccctcaggttcatttattgttaatatttcaccatatttacttcatctctgtatacacacacacttttttgtatgattaaatcatttgaaattaaat

SEQ ID NO: 194754 - DNA, 472 bp, Homo sapiens
aaaacaaatgatctcaatacctctcaacgtgggcacacatctgtaatacacttttattgtgcaactttaaatgtgtgtgcctttctccattaattgactgtagtttaatatttttaatagtgctctgtgtaaagatgatgcagtttgtgagtcagatttcatactgagcttaatatactcaaaacctaagcttccagtggtattacttgtgatttttttatgagatagagaattacatgaaattctagtaatccagtttccacacaaaattatttcaataagcacatatccaagcaatttgtacagaccttgtttaaagcactgcttcttatagggctcaattggcagtctcaggagcttgggatgctaccaacagggcatttaggttttcatttttatgaaacaaaaggcaatctggaaatagctaaatttattttaaggattttattcactgatgtcccgtcaaactaaa

SEQ ID NO: 194755 - DNA, 710 bp, Homo sapiens
aatgtaataggtaaacgtcacctatacctgggttggaaaaggctgctctatcagtaggaagcatagggaagacctgaactggttttaagtgatgacaagttcagtataagcagtgggaagctgccgcagtaggaagacagtgtaatccgagcacgcttcagtcggggttgaggatttctacagtagctggcggcatcagaccccatctgaagtagtgtgcccgcggaaacctatccggacatcaagaggcctttcagcaatactgatctagggaaccactgaagaaagggaggatttttggctcgcaaaatagattacagtgagagggtgtaaagatttccaaataaatgcctggctgtcaatggcagtttctcaaaaagatcaaagtagatgttccagggaagggagacgttaagcacaggcagtttccagggtgatgcgtttccctggaagccggactggaccccagggctccagcgcaggtggagaggttgggcctcgccaaaagagatcctgggaaacttccaggacttccaggagccccgagggctcgagcgttcacatacgcgccccgccccggggcggcccgggcagagagactggcgcggtctctcctggcgcccttcggccatcgcgcgccgccgtccccgggcccccggaccctgggcgcccagcctgcgcgggacacacccaggcgccgcctcccaggg

SEQ ID NO: 194756 - DNA, 254 bp, Homo sapiens
tgtaggcaactggaacacaatggtaagtatttgtgcatccaaacatagacaaggtacagtcaaacatatggtataaagggtgaatgatggtatgcccatgcagggcactcaccatgaatggagcttgcgggactggaagttgccctgggtgagtgagtgagtggtgagtgagtgtcgaggccaaaggcatgagtgtacaccactgtaaactttagaaacactgcatgcttaggctacactacattttctaaaga

SEQ ID NO: 194757 - DNA, 434 bp, Homo sapiens
ttacaaacaaaatgtgagatagaagctcatcttttgaggacaaaataattctacaaataagataatagtcatctagattaaatttgtcaatttacagatataaaaactgacatgacatgagatggtttaagtgtcaaacataagggtctttggctaggcgccatggttcacgcctgtaatcccagcactttgggaggtggaggtggatggatcatctgaagtcaggagtttgagaccagcctagctaacatggtgatacaccatctctactaaaaatatgaaaattagccaggcatggtggcaaactcctgtagtcccagctactaaggaggccgatgcaggaggatcgcttgaacctgggaggcagaggttgtagtaagccgagattgtgccactgcactgcagcctgggtgacagagtgagactctgtctca

SEQ ID NO: 194758 - DNA, 255 bp, Homo sapiens
attctggtcttttaaagacactgacaggaaaatatagttatatagctaatatgggggagggagtggtatggattgaatgtttgtgtcctctctaaaattcatgttaaaactaaatttccaatgcagcagcattaagaggtgcggcctttaagagatgacttggccatgctggctctgccttcatcaataaattcctgccttagaaaagtcttgagagcgtgagtttacctctactgtcccttccaccttgggagg

SEQ ID NO: 194759 - DNA, 518 bp, Homo sapiens
tgtgcatgtgtggggacaggggaaatatgggaactctctgtacttttcacgcaatttttctgtgaacctaaaacagctctaaactattaagtctattgaaaacaacagcaacaaccaagccatggcaggaggaagacttccttggcctaacagagggtattttcagaagtcagatacttgggccttaccccaaatctactgaatcatttctgcaggaataggacgcagaaataagtatttttggctagacacagtggctcactcttgtaatcccagcactttggaaggccgaggtgagtggatcacctgaggtcagaagttcgagaccagtgaagccaacatagtgaaaccctatctctactaaaaatacaaaaatcagctgggcttggtggcatgcacctgtaatcccagctactccagaagctgagatgagaggatgactggagcccaggtttgcggttacattgagctatgaaagcacactgcatccagcctgggtgacagagcgagaactgtct

SEQ ID NO: 194760 - DNA, 597 bp, Homo sapiens
  misc_feature (19)..(19): n is a, c, g, or t
taccgaggtgatacctaancattcaaatatccacatatgacacgttttgtggtttcccagatatagccttaatactgtaccaagggatggtggtttccctttcttgccaccaaaccacatttcagtcaaagctcctttaatcttttaaatagtttcccacagataccctttttcttttctctgatagaatggggcattggtcttgcatttagaacaatatacagtgcactttaaatgcttcaggccttgaaaagaattattcccaaaggcctatcacagtttacctgagggaaaatgtacaaaacaggcactattcacatatccattatgctactggttagacaggaagaatgaggaagttttccaatagcggtatcatcttgtggacatcatcatgagcttcatatacccattaacaatgcggagattgcaccagcaacacatgaggccctggccaactgtggtattttaagatcaaactgtaggaaaagtaaatacttactgtagaaaaatgtccaccacttatttagtctactgatagcatttcctgcaagagagaattgtgtatttattcgtggatatttgaatggttaatga

SEQ ID NO: 194761 - DNA, 701 bp, Homo sapiens
tcaatattttaagaatcacaatgttactaccattattcgtctgaataaaaggatacatgatgccaaacgctttacggatgctggcttcgatcaccatgatcttttctttgcagatggcagcacccctactgatgccattgtcaaaagatttctggatatctgtgaaaatgctgagggtgccattgcagtacattgtaaagctggccttggtcgcacaggcactctgatagcctgctacatcatgaagcattacaggatgacagcagccgagaccattgcgtgggtaaggatctgcagacctggcttggtgatcgggcctccgcagcagtttttggtgatgaagcaaacaagcctctggctggaaggggactattttcgtcagaagttaaaggggcaggagaatggacaacacagagcagccttctccaaacttctctctggtgttgatgacatttccataaatggggtcgagaatcaagaccagcaagaacccaaaccttacggtgatgacgacgaaatcaatggagtgacacaaggtgatagaagtcgggccctgaaaaggcaaagacaatcaaaaacaaacgatattcttctcccatctcccctggctgtgctgacctttacactgtgtagtgttgtcatctggtggattgtttgtgactacattcttcccatcctgctatcctgactcgaagatttca

SEQ ID NO: 194762 - DNA, 533 bp, Homo sapiens
gccacaggtggttcttttacacatgcctgtcccggtagtgtccccgtctcccttggcccctgggtacattcattcacctttatcctccagggtttagcctcgtggtccccaggtgtcctgagcctgtgcttttcgctacctggctgtgccgatcacgagcccccagccaggattttgcctgtgtcatgtgtgtttgtgccactcagcatttccctctcacttgtgttgcacatgtgtgcctgcctgtgtgtgcatttgggtcgcccatcttccacctggatcagcccttaccccgcttgaactccgtaataggtgagggttcacttctcatgtttacccctccctccgcctccactcacctgcaggagagaaataccttctaatgggtgtggacactggaggaactgttacattaaaagtgcataagaggcctggcatggtggctcacgcctgtaatcccagcactttgggaggtcgaggtgggaggatcacttgagcccaagagttcaagaccagcttgggcaaaaatccca

SEQ ID NO: 194763 - DNA, 252 bp, Homo sapiens
cctttgggaacctgacagaggtggaggggcaggtgtccgggctttgagctgaaggcagtcagtgcatctgctttctatcttcacatcagactcgttccccatcctgtagagaggaggttcctcaacctccctaatcactggtgctgtcgggctgccttcatcctgtaacctcaacctcctgggtgtcaggttgtgattccatatccccaggctgtcccaggagcgaagggtgggtgctgaaggcagctggtg

SEQ ID NO: 194764 - DNA, 279 bp, Homo sapiens
gcagtctgatctttgccgggtaacaattcttctctctcctttccctgtgtctttccagcagaggctctgcctgccttttttcccaactatctttccaagaacatgcacaggaaacagccttggatgatggagatagcatctccctccagagcacagggcaaatgtgctttgtgcccactgtagaagatttggttcctaagcttagggttcctctcctgcaatgcagcccttgatgtgtgcggatgccatggggccctgactacatcacagctatgggca

SEQ ID NO: 194765 - DNA, 204 bp, Homo sapiens
cttttgggttagttaaagggttgatgctctaaaaatagcatttcctaaactacctggagatcctcattgttatgaatgagaacagcagtgattgcttaaaatataacatcatgattccagctatttaacgggactataaacttttgcattgtttctggatttctaaatatacaaacttagttgggtattacataaaacaatcac

SEQ ID NO: 194766 - DNA, 158 bp, Homo sapiens
agcaatcagaaggatagaatacatgggttttaagggggatggggggagtaaaatgggagatcgaacatggggcaggaagccttttcatatgagtccacagcccccaccaccatggaagggagaaagtatcatgggttggtatgataacggcatgccta

SEQ ID NO: 194767 - DNA, 444 bp, Homo sapiens
cagtcatgtaatcactgcagcctcaaactcttgagctcagcaatcctcccactttggccttctaagtagctgggacttcaggtgtgtgccattacacctaactaatttttattgtttttttttctagagacagaatcttgctctattgcccaggctcacgtgattctcccaactcagcctcccaaaatgctgggattacaggtgtgagccacgcacccagcctctttttttcttttatcactcctcaactgaggagaatgttttgttttaaacatatgtttaggaaaaaagtgattacaaatcagattttggaaactattgagctgtgtatgaatggattcaggtacagtaaatcacaaatcccaaaaccatgtagagagtatgagaacttccttgaatgactagctccttagacaacacagctgttctatctccaatattata

SEQ ID NO: 194768 - DNA, 1074 bp, Homo sapiens
ccctgcttcggctcgcgcacggtgcgcgcacccactgacctgcgcccactgtctggcactccctagtgagatgaacccggtacctcagatggaaatgcagaaatcacccgtcttctgcgtcgctcacgctgggagctgtagaccggagctgttcctattcggccatcttggctcctccccccgagattgataaatccaagaaaatagagaagatcaaaagaagatacatagctgaaaacacttgaaggtatagactaccttgaaagtcacgcaagaactgttcttcctgctttccatatccaaggttctcactctgttgcctaggctggagtatagtgacccaatcactgctcactgcagcattgacctcctgggctcaagcaatcctcacacctgagcctcccaagaggctgggactacagaacccaaattgcctcacagatgtctgcacagatcacagcaggtgttaaggagcagaaagctctctgggaaatgagagtccccttcttgctacagggacactgaagcacaaggaagaccactgtccccaaaagccaggatccatttctacctgtagcaccactggcagcacctgctgttggaaagatcttcttccacaatttctgagaactgtgctctaccatgccattacagggactcactgaatactaaaactctcaattgttcatggatcaaaagtaaatgaataggacactgtaacctaaaggcaaggataagaaaactgggatttaaatgtgctgggactgtaaaaacaaaaatgctaaggagtaaagctttacctagtaatgaaaataaaccaggagaaagagcaccacaccagagcttagaaagcttctgttctttcctgctctccccagttgttccctgaagaccaggccatgtcttcctcataattgcatattactgtgcctggcacatactagaaagctatttaaaattatgtacttgttagcatattgacatgataatatgttcacaatgtatcatagtgagttataacagcagtatgggcagtgtgtatacatttctgtaaagaagactggaaactgataa

SEQ ID NO: 194769 - DNA, 345 bp, Homo sapiens
ccctgcttcggctcgcgcacggtgcgcgcacccactgacctgcgcccactgtctggcactccctagtgagatgaacccggtacctcagatggaaatgcagaaatcacccgtcttctgcgtcgctcacgctgggagctgtagaccggagctgttcctattcggccatcttggctcctccccccgagattgataaatccaagaaaatagagaagatcaaaagaagatacatagctgaaaacacttgaaggtatagactaccttgaaagtcacgcaagaactgttcttcctgctttccatatccaagattcttggccgatcgcccaggctggaatgcagtggtgtgat

SEQ ID NO: 194770 - DNA, 310 bp, Homo sapiens
ggtatggggtagagacagagaatttgtactttctaacaagtttccaggccatgtgggtgttgctggtacagggaccacactttgagaatcactgatctagagctctgcactctattttcagaatccaaagcacctaatacagaatatatggttgttttaaaagttccagagagcagttataaactgaactcatgcttgatcccagctaccactgttagttggttaatgtatttttaccacctcacaacatattctgttgcagtaattcttaactttggaaaattttaaatccttcgtccagaaatactgg

SEQ ID NO: 194771 - DNA, 345 bp, Homo sapiens
aggagggcaggtgacaggcggggaggcttgggaggaagaagcctccctgggctgaccacagagggttctgcatgccttgttggtgagtgtgagcctcgcctggggtcagaagtcatagaaggttatgagcaagggagtggcttgactactctgtgtcaagaagcctaagggggcagcagagagtgacgtggctcatggtgggatagtccggggtgaggagaaggaaccccagaggagtttctcaatggttgggtcaaaagagagtgaggacccaaaaccaaggccacagaaggaagaagaaaggacagtgaacatggagctgggtcagcagggcccgggctgcgg

SEQ ID NO: 194772 - DNA, 284 bp, Homo sapiens
tcatcggctcatttcagttttcaggatttccatatgtctgaacaaggttaacagcagaggggaaaaaacctgatatattgtctctgccattgaaatatggggtcaggtacatatatttttgtaatttacaaggtcagccacagtactgatttatagcctttctaagtcaatgagtgtcttagtaataagactctaaaatacctcttcacttctcctgagcacccatcaagtctgtctgccaactcagttttcagtgaactgaaatgagctaagtcctgtaggtg

SEQ ID NO: 194773 - DNA, 301 bp, Homo sapiens
ctctggagaaaatggagaaactctgaagggttttaagtacctttcctgaagctgcagactccataacctctctttacaaagagctcctgcagctcctacagaaatgagtggctgagattcttgattgcatagcagagcttctcatccaaaccctttccctttttagtgtctgtgtatcagtataaaagttctataaactgtagttacttattttaatcccaaagcacagtaacaatatatttcatcctagggttggcagtttctctaagtgttttgtttaattatcatgataatatctgca

SEQ ID NO: 194774 - DNA, 353 bp, Homo sapiens
agacatcgacgaacacgtggatacacaccacacacatttatacatatgcaccatgccctcacacatacacatatgtgcatacacacatatacacatataccatacactcacacatatcacacacaacacatgcatacatgcacacattcacacacacataacaccatgccttcacacatactacacactcgcatacaccacacatacatatacacaacacgtgcatacacgctgcacacacattgttccatattttccatttaattggccccagtatgagccttcattgttcattcattcagcaaacgtcccctgagtgctagcccagggctccacgaggactggggcctggc

SEQ ID NO: 194775 - DNA, 486 bp, Homo sapiens
ggcattgccacagactccctcatatatagatacacacaaacacaaatcctgatctctgacaccatctcgagcaggaaagttgcaaagcttcccaattccgcttcatcctctggaacctcgctggcggttccagacttcagaaagttcttaatgatgaatccttggcttctagcctccttctttccccaccactccccaggctgagatcatccagccctgagctctgcacctgccatgtgccttctgggatacccacttggaaccatatattccatgagttaatggtgtcactatcacctcctcttctatatcaataattttaccttaatcttctcatttactacttcactaaaaagggacctaaaaaaacaactagtcttctctgccttcccctacttttttattggtgttgtcgaagttgcagaaactgagatcacagaggaaacgggatgtagctaggatcacacagttaggcagagtcaggac

SEQ ID NO: 194776 - DNA, 212 bp, Homo sapiens
tgtagacaatcctactcaaggtaaatgcaaccagaaacaaaggacattgcccctaacaaggacttgggccagaattccattgttcggccttcttgccaagggctgagacatgctttctgtcagtatcattgaagtatgatggatggttcgtgctagtctaagaggagcaatatctcacgtcgctggagtgtctagggacaagaatgctttta

SEQ ID NO: 194777 - DNA, 366 bp, Homo sapiens
tgttcaagtgattctcccacctcaacctcccaagtagctgggactacaggcacatgccaccatgctcggctaatttttttattttttttaatagagacggggtttcaccatgttggccaggctggtctcgaaatcctgacctcaggtgatccacctacctcggcctcccaaagtgctgggattacaggcatgagccaccgcacctggccagatgctgttggttctaaatggcactttgaggtgttctaatatgaatcagatattagaaattatttagtcatagcagctcttgtttgtgtgttcatcttttcttgtctatatctttgtagattgtacaaaactgaagcataactatggggataattg

SEQ ID NO: 194778 - DNA, 430 bp, Homo sapiens
ctgacatctcagttgggtttagtgtcgaaattaattcagggctttttcaccattgctaatgaataatccgtgtgccaaggaaatgacttcgtgaaccccagtgagacttttaaccaagctgagatcaggcctgcaaacttcttcaatttgtcagttttcacaaagcccttttcagtagtgtgtctgtcagaaggccttatgttccccgcctcccaaaactgtaaaaggacaagaaatgtgagtgtcattgctggccacgctgtcttccctggggttccggagagtgggggattgggtgcatgccggggtgttcataggttaggaattgtgccagatcttcagggtcgttccactcacctgtcacaactgacctttgccgcactggcaccagcccttggcgagaaacaagccctttcatttgtgtggtaaa

SEQ ID NO: 194779 - DNA, 325 bp, Homo sapiens
  misc_feature (37)..(37): n is a, c, g, or t
cggactctatcgcgacgctccatcaaccctagctacnagtgctaggattacaggcatgaaccactgtgcctgcctgcttttcatttttaatcctgggttctaaaatgcaagaattaatttccaaataattagtatggaatggaatcccactttttcctgtgtgctgagagaatgatcaaagatcacagaaaagagatggagacagaagaagctgagagcaagggcatctttaaggatttcttcagtcttgttaatctgggtgtaaattctgtgtggctgacagcctctgaggatcccttgaagttttgatggaagcgtcgcgcat

SEQ ID NO: 194780 - DNA, 145 bp, Homo sapiens
tgttttagagacacttagagtttattagaagtcgatgataaacaggtagttatagtacatgttagaatggaatattcagagaactataggattataaaatacgtgctcatttaacccatatgtggcagctaagttaactcatgaa

SEQ ID NO: 194781 - DNA, 112 bp, Homo sapiens
atatgaatatacatgtcaagactataatgtttgagattttctattgcttatttcattagtttctttctggacctattccatctgggctagcagctctgaaaacaaagtagtg

SEQ ID NO: 194782 - DNA, 663 bp, Homo sapiens
taaatacatatcaacctgaaatagtcagtttacaacacaggttgatgagcaacaaatcattgcctgccacataattcatagtctataaatatttgtcaagtggatgaataaagcctatcctcatcaaataatgggttctgtggatttaagacttgcagaatgaaggtgtaagaatctggatggaccttttccccagaaaaaccatttaacaagtgaaaattacagatgacaatcatttaagtctctgaaaattgtcccaaaggcatgcagcaaatggagaaagagtcattcaagaaaaacctattaaattatggtaaagacagtgagagtctgtggcatttgagccagaatgcatccctttacccctacccagagcttcatgctagagtagctctactccaggcaggtgaagccaagaaggctgtggctgcctctccacccagtccttagcctggagctgcagtttcacccagagagggtcaggctgccatttcttatcttccccagttccatgctgcagaagctctattttaagcaggcatggccagaaggattgagtttccaaccccgacccagccctgactcacaggatggaagctttattccaggtgcaaaggctgagaacactggagcccttttgctcccacctcaacttgccagtag

SEQ ID NO: 194783 - DNA, 384 bp, Homo sapiens
aaaaaaggtggatgagggacaaggtggtgcaataagaaactagagaaatagccagaatttgtatcatgcggggccttgaagaagatgttgtagatcacaaagttattctaagagcaatggaaagctaccaaggggtttggggcaggaagtgacatgccccagtttgtatttttaaaatgatccaagttgaacttgtacctctggccatgatggaggaactggtactagaaatgatctcccattgaaaacaatcataaaactggaaaaacaatttgtagaaatcattttcaggtattgaacagcaaacagtgcaaacttacaatctttgagagaagggaaatgcgtgaagcaattactacacaattgtccagccttttctctgca

SEQ ID NO: 194784 - DNA, 371 bp, Homo sapiens
aatcctataacgtggtctttcgtgtctggctcctttcacttagcatattgttttcaaggtcatccatgttttagcgtgtatcctatttatttaatttgttaactgttaaaatatctatcccaatttgactcaaaagtttgctttaaatcaaaagtaggcgttcagtttcaacttttcagcatctgttgagaatatcaggcgttttttttttggacctattaattggggccattattgggctccatccttgaattctagagtacccatactgtgccaaggtctgtggtgtgtgtgtgtgtggtgtgtacatgtacatggatgtgctttttttttttttttttttacatgacggatcatatttgcggatactt

SEQ ID NO: 194785 - DNA, 301 bp, Homo sapiens
attttatgttttcttattatattcttcactaaatgtgtgatgaacaaaagttatttaaaataaaacaaactgctgttaaaattgggatgtaaaaattgagtttatatttaaggtccataaaaatatggtgatagacttgcgatgatacacctacagttttctctcaccagaagcacattttcttgcgtttgtaaaatgttggctagagttaacggtgtgactggtaactgcagaacagcttctgggtgtaagatttaaccaatagttaatgcacagagctaactttcctaagtgaatggcc

SEQ ID NO: 194786 - DNA, 333 bp, Homo sapiens
ggcggtcggagggtaccggtgctggtgttatggatgttgcgttattatagttctgcgagaagattgtgggatgaacgagtagttatttaaaataaaacaaactgctgttaaaattgggatgtaaaaattgagtttatatttaaggtccataaaaatatggtgatagacttgcgatgatacacctacagttttctctcaccagaagcacattttcttgcgtttgtaaaatgttggctagagttaacggtgtgactggtaactgcagaacagcttctgggtgtaagatttaaccaatagttaatgcacagagctaactttcctaagtgaatggcc

SEQ ID NO: 194787 - DNA, 724 bp, Homo sapiens
caaaaagctgtaataaagcaaatcatactaacccctagaattgtcattttcaataatgtatctagtttaaataatcataaatgtccacaaaaatttagctacaaatgaggtcattatataatggtattatttttaatagtgaaaaatcactagcaacctaaaaatctggcaggaaatgattagttatattacattcataaagcagaatattatgattgctttaaaacagctgtatagaagaatacttaataacctggatatgatctgtagctgattgaaaaaagcaagctctgagaggacatgtagtatgtggtccaattttttgtttcaaaacaaagcaaaaaccatatgcagaagggaaaaattgaaattattatagtctctggacagtgagattatgggtgatttttttttttcttctacctacctgattttcagattttctatagtgaaaacagtaataaggaaaaagacagaacaagttattttttaaattaagaaaatggaacagattttgtttctgtggaaaaagactagattgaaagttctcatagatgcctcaaggaagtccatttgtgtcactgatatttccttagcatttagcaatattggctagtcagtcaaacactaagagtaaaagtaaaacagtgttgacacctttttgtcatttcagtcttatatctgttagaacaagggtggtcatttttctggttttgaacatacc

SEQ ID NO: 194788 - DNA, 297 bp, Homo sapiens
tctatttttcacccataaaatggtgcaattctgccttgcttaccccgtaaggttatagagttataaggatcaaagctactacaatataataacaatgaggaggaggaggaggaggcgaagacaaggctttcttgaccttgctgacctacagacctgtgactggtgcccaaggacgaactccgctgtggatggcagccaggaccagggcaggttcctgatgcagatggctgtctgatcccagccagtcctggagcaccggtgccctgtgccctcattcccgaagctggttcccctggg

SEQ ID NO: 194789 - DNA, 346 bp, Homo sapiens
taaacacccacagtacccttttgattatgctacacctctgtttaaacctatgaccacctccctcactctatctttgcctacagagtaaataaaccccaagctccatagtctggccttcaggacttttcataatctagctctagctgacctttccaatgctgtacatagataaggacatattttggccaaactggactgcttaatttcctcaaacctgccctgagctttcctgcttctgaacatttgtaccatttaagccgaaattcatttcaggccatcaatgctcattgagtgatttctgtagaaaactataggatctagcaggttgaaaaagtctttctttagg

SEQ ID NO: 194790 - DNA, 457 bp, Homo sapiens
ttctagaggatcccttcgattgcgggcacttacttgatcctactgctcaggactgtcccaattttaaaactgaaagtcctgtgttctagaacctctagttttaaacaaacctggacaactgcccatcctagcttctgggcacatcaaaacttcccagctgggaaagaattttcaaattatctagtaaattacctaattttactgatgggaaaagtgaagaatcctaaatcttcagagtgtaaaaggaagttccacgccattcagtgctctagttcaactgcggaattcacggactaatcctctacagatcttgctggagtggcctttcagccttttgtgactgtttgtagtgaaatgtacacacaagcctacaaggcagcccagatgtaccataactgtgggaaaattaaaaaaaaaaaacacagaacctctctaagttgcccgccaatcaaactct

SEQ ID NO: 194791 - DNA, 1138 bp, Homo sapiens
caggggtcttttcccctcaaacctccgttgtcaccaccaccgtcttctccacatcttcccccatgtcatccccaaagcaacaggaacagttccaaaaacaacccaccaaaggactctatttttgagttatctccccttgtggatctcagtgtttcctccaggtgtgttcacccagagcagctctctaggatctgagacagattccagcccaggccatgtaaagactttagatcctagcctaggttacacgtgtatacccggaatggatatgtacctgactgttgtagactttgaacagtagtcaggcttccaaggtgaaaccacagaagtccaacacacatgacctcatttctcacacttggataaacaagactagagtccacttaaaagcattcacgatcactgtatcttactgcatctcacgcgggccactgtcttcactggagaacatcatcatactgggcagccagagaagttcttcaagtcatttccccgacaagcagctttggaaacacctgaaaatttgcaacaaagcagaccagactgctgagtgagtaacatgaaggagaggcccagcaacccgttatcctacagccctccaggtggttctggtccattctacgtgcagcagcctctgcagtacctgagccgtagtttatcctgagttaacatagtcatactaggaatacgccatacacatgtggtaactttagagctggactcaaaactccaaaaatgtatgaacaaaaataggtctgaccgactccacagcctttattggtttcttgctctttcccatcttccttcactgcttccttctgttcctgggatcacctttcaagtaaatcacttgcttttatgtgttgcatcatcatcatgcaaattaaagcaccacaatttattgaacattttatcaaaatgtaaaaccttacaaaagattaacaggttatgtttgattatgggattgaatattacattctcactgttgtgtttgataattttcattacaaagtcataagtaatcaaatgattagacagctgtttaattatacctctaaagaataagcattccatttgcttacataattattgtgactctgggatgaatgtattctgaatttgaggggaaagaaccctg

SEQ ID NO: 194792 - DNA, 270 bp, Homo sapiens
ccttcttcaaggttcaaaggtttattaggtagcattttggctgcctgttgtctcccatagctaccttttcaccgaatgcccccacaccagccacagtgaaataaaaagcctagttcttccctagaaaataaagtagtgagtctgaagcgaggactgtatccaggcacattacatatgttcatgagacagctgcagatcttcctcagcaagaatggtggtgaccacggagtcagttcacaggtaagagtgacctcactgggtggtttcaag

SEQ ID NO: 194793 - DNA, 316 bp, Homo sapiens
  misc_feature (29)..(29): n is a, c, g, or t
  misc_feature (66)..(66): n is a, c, g, or t
tttctaatgtaggtatttattatggaagnatttatatatcaaaagactggctttgtcccacacagntcagggatgagttttatttctctttttgtgattactgtccttcagataagacacggctcacaggatgagattaataaatacttccataataaatacctacattagaaactatactacagggcacatgaatggtgcaaaatattgtggggattcagagatggtagataatatgggcatgctttttctgaagaagttgcttaaagctaggatgtgaaggaggtgggatttctgtgaggtatttgaggtggaa

SEQ ID NO: 194794 - DNA, 156 bp, Homo sapiens
ctggctttcggcacataccagaattgttattagcaaattatctttcagaatgttctatttcgactagggctgtgactacctttccttccaaaacttcgaaactaaatcctctggcttgaagacaatgtctgttattgaggctggtgaaaggacatt

SEQ ID NO: 194795 - DNA, 163 bp, Homo sapiens
ttggcctcccaaagtgctggaattacaggtgtgagccaccgcacccggccttgattccaggtctttagatagtaacttaatgctttcaattaactgccaatcagaaaaatctctgaatccacctgtgactcggagccccctccagcccctgtgccttccccat

SEQ ID NO: 194796 - DNA, 300 bp, Homo sapiens
actctggccaagatgacagagctgtctacaaatacatacacacatgtgtaaaatataacacttttttaaaaagcttgcaagttcttttatgatcccgtgtctgtgcattactgtaataatatggattagaagcagaataactgtatccaatatggagtttgagagaaaacagaaatatatcatctgtacttcaggtgtcctgataaggatcagcggagggttctgccctctgactttatctctactaaatgcatgagaggcagagtttttttgttttgttttttgtttgtttgtttgttt

SEQ ID NO: 194797 - DNA, 286 bp, Homo sapiens
tgatttatcgcccaacaccatcaccttcatcatcatggtaatcattaccatcaccaccaccaccatcatcatcatcaccatttcactctcctagttttccttcagcctctctgtctactctttaatcctctctgcagactcttttcctcttccaaacccttaaaattgaggttcctgaggtttatatcttaggccttttcccatctcccattagacattcactctcagtggcctcattcactgtgggggtgttggggataacatcacgggatcctgtagagcgacc

SEQ ID NO: 194798 - DNA, 589 bp, Homo sapiens
tttaaaaatggtcagactgtattgccagccatcagttagtatgactttcctatctttcacagacagttatttcttattagatagattgttatgtttcatagggtcatgaaatattagaatgggattaataatagcaaattaaaatccaactttgagatatggcatgggagaatgttatggaccatgctaattcgagatggaattatgccttcattttcaggaatttttcaaaatgaaaggattgaattaaagtaaatttgtcttagatgaatcaaaacaagagagggtgacatgtcatttttttctactaattcagaacatttatggagcccctaatatgtgtcagggacaatgcaaatataacaaatacaacaaatacataaaatgaggagctgatgaagtaaggagctgctggtcggtgggacgtgtacagcccattaaggaagctctcaggctgttcccaactctgtgctttgatgatctttctaaggttgctgcagcctcattaaggaagtcacaacctttctctgtttcttatgtcctttggattggtatttttttttcccctcaaatactattgtgttacaat

SEQ ID NO: 194799 - DNA, 308 bp, Homo sapiens
acacgcaggatggcacagaaaaggaaggtctgcaagggctttgggaactgtccagtagaggatgattccctgggaatttgtaaggacatagagcactagaaagggattctcagctgtgggtgcaacctctcagcctctgaactattcctccaacccccttaaaactatatgcttcctaagcaccctcatgatgagcccaggtgacgggtggaacacgcctggtagtgtgctcttcccacattcatgggctcccatgttctacctccaagttggcgtgtgaagggggttacccgaagctcgaaattcgg

SEQ ID NO: 194800 - DNA, 505 bp, Homo sapiens
tctatcaccaactgtttgttacattcaactatgatacatgtcttgttatagaatcagctgaggtctgtattaactttctcaaaaagttacacatagagaaaaatatatataatgtctttaagacataaacagtagtctctaaaatttaatgagcctgaaaaaagagtaccttccaatttatgatgggaatcatttgatctttccaacttcttgatttctaaaagcactactggattagcttactatgaatcaggtgaccaccatcataatcaatggggtgagtgaggcccaagagcttttccaaatattaagaatatttctcttaaaagtgaaaagaaaaaaaacccatagtcctagcccaatattttgtccagcatgtgctccaaaaagtagacagagtattactggaacataaccagtaaaatctgtatttataaaaataaaaaaagaacaccgagaattaaacttaaaagaagtcaaccaggggtcacgatggggtcaaccc

SEQ ID NO: 194801 - DNA, 389 bp, Homo sapiens
agcaacagcagcaataattatagctcactgagcttttatcatgtactctgccaaagtactttacagggatattttatttaatcctagcaacctctgagggagaattaccagtgagaaaactaaggctcagagaactaacttgtacagggttactcagtattttgtgatggagttgtaacataaacccagatggttagactccataccagctctcttaaccactctgctaaattgcttccttattattttccatacgcacatcagtatccacatctagcctagaaaaaaatgagtaagtagtgtttttttggtaaatggtccaaatcagtcagctaagtcttttgtatagtttattactgatctatatatctagctgccataccagagag

SEQ ID NO: 194802 - DNA, 451 bp, Homo sapiens
gttcttgtcacttgcagctgagaaaatcctgaattggacacttatcaaaaaaaagtactttacaagatcactgttaatggctggtaagcatcccgtgatatgcacacctttacatacttttcaagtcttcctctattataggacacttagattctttaaagacgccctgcaccataaataatgctgtgataaacatccttattcataaaatattgtgcacctctctgactgtcccattagacttgctgctaagaccacatgcactttgaaagcttttgagaccttatgatcaaatttccctgccaaacagttgcatttcatgtatatatctgacagtcattcatgaaagaaagcgtctattttttcacgttgttgccacatattagatattatcactatatttctttaacatgtttctcgatgttataggccaaaagggccacctcattgt

SEQ ID NO: 194803 - DNA, 467 bp, Homo sapiens
tctctaaaactactaccggatctttagaaatgccagccaccagggcagcactcttccaggcaaacattatgactaaactgtaaaatattgtgaaaagtattcatgaaggaggtgaagacaaaatcactaaacaggaacgagtgaagaagcaacatactggaacgatgaaatagggagttttttgcaatttataaatttcagcatcaaatgttttcattgtgaggtcttcttaatgttcgtgattctaaatgtaattaagttcaccaatactttgggggtccctattatagcagtcaagggtcttctgtgaagaactgaaatgatgaataactgatggtcacagcccttaaaaaccttataattcaatgaaaggctaaggagaaaagtccaggtgctcattagctattaaaataaggcagattttaagacagccattatacagagtaaggcaaagtattgtgaaatta

SEQ ID NO: 194804 - DNA, 843 bp, Homo sapiens
ttcactgttcggccacttccacggacccgatggctgtggccaacaatgaaagcgagtccccattccgagcgattaccaacaatggatagatttgctctcttggtccagggcgctgtggagtaccaacgaatagtttctgggcagcgccttttgaaggtagacaccagcttgaagagacgtgaggagtcagggtgcgggtcgtctgtcccttggcactgaagttagggtcaattacactgattagggctatgacggtacccagtggagcgtcctcctgtacagggaatgatagtgacttactgctaactctggaacactatcattgatgtccaagacttctatcaagtctgtgcagtgatcaaacattggggaattgcctgtgtcaactgcctgtatttgaatctttcattatttagtttcctcaaaacctatctttacatttatttatccactgtctgaatctatgcgaaaaagggcttctatgttaggggagacatcagttgcaaagaaacaatgtgacggtttgaaccctcgtcaaaatccaaggggttaagtctaataaccagtgtaccttctcttgcattttccagtaatttcacatgatagactcctttgtcaaacactgggcatcatcatttacatccagcgctgtgatatataatgctttggtgcctgtcagctcagcttcgcccccatcagttgctttgagcaccaagagtagctctgaagtgacttactatctgaaagaatttttaaaatacaccttcaagtggttttacctgccctggttggtatttccagggaaaaataatcattgcggcacagtatgtaagtcatcagagc

SEQ ID NO: 194805 - DNA, 152 bp, Homo sapiens
ggtgaatgcagacaggagttcaggggaaagagaagccatgagtatctcaagtgagcagcagcaggaacaggacacacgtgaaaatctacgcatgctccttcagggaacgtttcctgaacaccttttctctaatgtattggtccttggcatga

SEQ ID NO: 194806 - DNA, 148 bp, Homo sapiens
accttcagcgctaaccctacccacatatttcctgtattaaaacaaaaaaacccttctctaatttgagtctgctttatggatcattactctgtacactacttctttttgttgtcagactttgtgaaagagtaatcagtagatgccagtt

SEQ ID NO: 194807 - DNA, 216 bp, Homo sapiens
caaagtgttgggattacaggcgtgagctaccatgcccagccaaggctaggtatttaaatgtcaaggagttgatttcaacttagatgcagtgacccccccccaccccttggaagaaaggtacattacatcacatttgccatcttgaagtaagattcattgatagtataatcaaccacacacacattaaaacaacaacaacaataatataatactcta

SEQ ID NO: 194808 - DNA, 396 bp, Homo sapiens
gtgaatgagatgggacaggcacagcccttagcacacagccagtggtccacagggttcatggtgctgaagctgcttcttatttcttctttccagtctccttgtggtttgtgtgactcataataacaacttcatttttggagttgttgaagacatcttcctagaaagacttgactcaagctgagttttcaagcatgggtagagaatagcagcatggaaatgagataaagacaatttcgggaaaggaagaagcacgtggcaagtcacagtacccttgtccctttaggaaaagaaagcgtccctactgatttcttagataacaataacaggccctccagtgcctggtgccaaattaggtccaccagaaagtaccaggcaaggttccttatacttcactga

SEQ ID NO: 194809 - DNA, 346 bp, Homo sapiens
atgtagtgaatggaattacaggaacaagtctgggagtcgtcatccgtcattccttacccaatacactggtgtatttaaacgagccagtggaatgctgagcatcataaggaagaggattcaaagcaaaacagtaaacaggagggttcctttgaatctcttacttgaactaggcagttgaaaagtgattggcgtcaataagatcctgaagcctttgccaaatattaaagaagtaaaatataggccaggcaagttggctcatgcctgtaatcccagcactttggaaggccgaggtgagaggatcatttgagcctaggagtttgagaacagcctgggcaacatagtgaga

SEQ ID NO: 194810 - DNA, 311 bp, Homo sapiens
agtaggacctcatgacatcatagctcatggttagaattcaatttggaataagtcttgatgttggaatgggatcactgcactgggagcccctggtggtcaggagctgtgctttagccatcgccgaactccagcatcgagtgcagtcctgctgcctgatacacactcagaagttaaaggcactcaaaagtcctatggttcattcttttttaaaaatttaatttttaaaatatgacacataataactacatattcatggagtacatagtgttttcatacatataatgtatagtgatcaagtcaggataattagc

SEQ ID NO: 194811 - DNA, 353 bp, Homo sapiens
tcaccatcctgagagttcccacgtggccccttttcacaggtctcaggcagtctgatgtgacttctctcacttttgctggcctggcagtggccagatgtaggatcctcaagggttctcatcatcagctgagctgtgaagccgactcccaccatcaagagaccccaaaatggggagagctggggtcatggcttacccaggttctgtgatgcatgaaatgaaaacagggaatatttctaacccaactttcaaactctggataaagacgcggtggccatgatatgatcctgcttctcgtgaaagccgtaatcagggggccagcaggctctgggttcaagggcaggagttctggccca

SEQ ID NO: 194812 - DNA, 669 bp, Homo sapiens
cactagtcagtctctctagagtaactagtgttagtataaatccggtgagaacatgctcactccgcataaggcctgcgtcagataaaaacactgcactgacaattaacagcccaatatctacgatcaagcaacaagtcatcattaccctcatgtcataccatttgtagtgacatgagagggggagaggagttcatataaatttgtcatccttggtctagcataaatgttttcctttctgtaaaatttccttccaaaatctaagaactctaagtagagcccacttagaggtgagcccacttacagcagtatcatccggacaataccctgtctcaagaatggcttgataaatatcagccccttcattttttattttctcaagaggcaaagatccatttaagatctgaaagagatcagtcagccctattttttatcttgagtattagcaatggggtagagaaataaccaagaagtcagaaattggtctaaaatgctagcagaaagacaaaaacagagaagtttaagagcaggcaagagaaaaccaaataaggttcaaagagtggtgcggtagaattcctccagaaactatctcaggtatttaagactaacattggtgccaaaagtcaaatgccatgggccagcgggaatctaaatacacttttgggcttctta

SEQ ID NO: 194813 - DNA, 828 bp, Homo sapiens
gtctacagctcccagcttgagccacgcagaagatgggtgatttctgcatttccatctgaggtaccaggctacaccctgcaaggtcattatcattagctgcactttacaggagaggaagctgaggctcagagaagcaaactgccctcctacttatgttgaagactttcccatcctatgagcccaggtgggagaagctgaaaatggcagaaggtcacttttccagctgccctgtgcctggtgagcctgtgacacagaccccgttgctcacatatccacccagtttggtgccataggtggtaggcaggttgcaaactctgcgcttatgtgcctcaagagacagggctctggatgtatgaggtcaaggctgtctgaagaagatgaatatggtagagataaggaggattttccagtgattgaagagagacttcctagtcaaggactgtggttttggagcagcagcagcagggtcgtgttccctgtctctggcagtactctgaacattggcaggacctcagagtggtggcccaaggtgcctaggctgccagccttgccaaaacttcccttcaatcagcttggtgaggaaggagaaggggctgaggcagtgggattctcagtggtaatccagggtgaaccaatgttctataataatattagagggacctccctatgtctgggccctgtgtcctaccttaggaccatggcacaactccctgtggggagagggaagagaaatccctgtgaatcactcaggctgaatttctcaccaacccagcaagatggaagctcagagttgaaatcaagttgattaataaaacattttaaaagaaa

SEQ ID NO: 194814 - DNA, 406 bp, Homo sapiens
gaccttcacagacaacagctctcaccgccggtttggtcacacccctctgtttcctcagggtcacttgtaggtcagcgtttgaactttgtgatttctatctccctccttcaatccaatctttgacctctagtatttgcccacctgacccataaacagagaaccataatggttctctgatttgtgttttcaacaaaaccccacctttaacaccactcacctctaccagccaacaaaaccccggctttaacaccgctcgtctctaccagcccctcttctcttagtcgcttcaccactgaggcctccctgagcagctagcagaaaaggccttccatcccgctggctggcgctggtacccgcgaataggttggtgtgtgtctttccagacatgtttgtgcacatatatgtt

SEQ ID NO: 194815 - DNA, 326 bp, Homo sapiens
caggagaccattttaaatcaggattctttcctaaataactttggaaaaatacatgaattgcacaagtagtacatgtttgtaattaggtatttcttaagcctatagaatctttgcctgagactccttctagatttaaaagtcttgaccttcaggatttaagactctggaaagatatttagtaaatggtttttaaaaataaatcagttaatttttcagttaagcttctaccatatattgaaatacataaatatctatatatataaatgtgttaaatactttaaaattctcaaactatttttcctgccaaaatatcacagtaggaggca

SEQ ID NO: 194816 - DNA, 552 bp, Homo sapiens
  misc_feature (27)..(27): n is a, c, g, or t
gctgaccatagaggacccctcgaatcnacggtttctcttggctatctgcctacgagtggaactgataggtcatagggtaactctatgtctaacattctgaaaaactgacaaaccgttttccaaagcagctgcaccattttacactccccagcaatgtacgagggctccaatatgtgaggtttatccacattcccaatgtgtaagggttatcctcatcctcaccaacatttgttattatcttttttattcaaaccatcctagtgagtatgaaatggtatttcattgtggttttggtttgcctttcctcttgtctaatgatgctaagcaccttttcaagtgcttattggccatttgtttatcttcttcagaaaggtatctattcaaataatttgcccattttaaaatcaggttgtcttggccaggcacggcggcccacacctgtaatcccagcactttgggaggtcgaggtgggcagatcacctgaagtcgggagcccgggaccagcccgaccaacatggagaaaccgtcgaattcgagtaaatcctctagatc

SEQ ID NO: 194817 - DNA, 695 bp, Homo sapiens
tgttcatccatgttatatcagtatttcattagtttttattgcactgtatggatataccacattttgtttatccattcatcgattcgtgaacatctgggttgtttccactttgaggctatcatgaataatgctatgatcatttgtgtataagttctgtgtagacatatgttctaatttctcttggctatctgcctacgagtggaactgataggtcatagggtaactctatgtctaacattctgaaaaactgacaaaccgttttccaaagcagctgcaccattttacactccccagcaatgtacgagggctccaatatgtgaggtttatccacattcccaatgtgtaagggttatcctcatcctcaccaacatttgttattatcttttttattcaaaccatcctagtgagtatgaaatggtatttcattgtggttttggtttgcctttcctcttgtctaatgatgctaagcaccttttcaagtgcttattggccatttgtttatcttcttcagaaaggtatctattcaaataatttgcccattttaaaatcaggttgtcttggccaggcacggcggcccacacctgtaatcccagcactttgggaggtcgaggtgggcagatcacctgaagtcgggagcccgggaccagcccgaccaacatggagaaaccgtcgaattcgagtaaatcctctagatc

SEQ ID NO: 194818 - DNA, 843 bp, Homo sapiens
ggaaaagaaaagcatcacaggcctcagatgtatatgttatatatgtgcgatttgcacatatatgcccgtgctggcatctctgcgtatctgcatgcagttcacttctccgtcactgtccccaggaagggtggcagcctcatcctctgtttcctacttctcctcacctgggcgtttgcccattcagacgtgcaattgtgcaattccaagcccgcagttcttcagctcctgtgcttcccttattccttgaataaggctgggctacaagatctcagtggagttctgtgagcacgctggactcaggaaagtccgtcgcagggccctggtagagcggttactggagctcgctgtctgccgtggaagtgggcgtgtggctgaacgtgtggcttcaggattccagcggtgcctggtagaccttccagccgagggacctcagaccctctgcctcccgcgggtgcatggcccgtccctgagcctgtcgctgtctcagttctgggctcgggcccctcatgggagcggccctgctgggacagtgttttcccaagacgccccaagccctcgccctggcagctccatgaaccccatgcagactccaacaggggcttcgagcctcttcctgctggggtcccacggatggtgcaggcagaggcccgagcactcctggtggccccgtgtggcccacgtcgctcagtatctttcctcgccttgcagaggggtgtgaagcacaaggctccagtccaggccgcacagagcagcgatgggcccctcctgaaggacctcctacggcggccaaggcgcagttagctccacgctaggtaactgtgcggctgctggacgccgcccgtg

SEQ ID NO: 194819 - DNA, 295 bp, Homo sapiens
cctcaatgtagaactaaaactataaaactgttaaaacatgggagaacaaaagagaagataacccacagaatggaagaaattattgcaaatcatgtctcttataagggcctagtattcaaattatttaaagagttttacgactgaataagatgccgtgcgtggtggctcacacctgtaatcccagcattttgggaggccgaggtgggcagatcacgaggtcaggagttcgagaccatcctggctaacacagtgaaaccccatctctactaaaaatacaaaaaattagacgggcgtg

SEQ ID NO: 194820 - DNA, 307 bp, Homo sapiens
tacagcaagtctctgtgccagaaagtctttgtgccagcacacaatcagcaaaatccatcaaacatcaacacagcagctctgtcctgtgcttgccctgcaaattcagaagcccccatggtgctttccgctggcttctcgggcgtttctgattgtctcagtaccgagtgatcttgggcaccgcattatctgccacataatttagaacaaggacatttggtgcttcgcagatgtcctcttctctttgtaccttagtaatattttattttctcataaccattttaagatccattcttgttgctttcctatc

SEQ ID NO: 194821 - DNA, 449 bp, Homo sapiens
gagtgaaacgtcgtctcaaaaaataaaaaaaaagtccaggcgtgatggctcacacctgtaatcccagcactttgggaggccaagacgggtggatcacgaggtcaggagttcaagaccagcctggcctagatggtgaaaccctgtctctactaaaaatgcaaatattagctggacatggtggcatgcacctgtaatctcagctactcagaagtctgatgcaggagaattgccaaaacccaggagggagaggttacattgagccgagattgcaccactgcactctagcctgggcgccagagcaagactccatctcgaaagaaagaaagagaaaggaaattccccagggaagtacctcagcttatttcataaacaggtactgaaggaagcagaggcttgtggaggacttccccacctcatgcagctatttgggccatggcgtctgaaattta

SEQ ID NO: 194822 - DNA, 281 bp, Homo sapiens
atatcttcattgatggagaactccatccttccaggtgctgaagccaaaagccttagagtcagctttgacgcctctgttaatctcacgcccatatccaacctctcaagacatcttgctggctcttccctgagagcacactcagaaactgacccctctcaccatctccatcttcagcttactgtaatgtcctcctagctggtcttcacttgcattcctgactccttatctactcatcccaactgccaacatgaccctttgcaaacttaaggcagagcatattt

SEQ ID NO: 194823 - DNA, 122 bp, Homo sapiens
gattggtcagtaagtgcagcaaaccaccatggcacatgtatacctatgtaacatacctgcacattctgcaaaagtatccagtttgtttattttttgttttttgtggggttttttttagaaga

SEQ ID NO: 194824 - DNA, 397 bp, Homo sapiens
taggagtggttagtagcccttctctcatctgttggggtggtcatcccttttctgcatcagtgaaaataacaccctatcatttcacttcaagcacaaatgctacttttgtctcatttttggagttataaaaccatgtggattaatcccaaccaggtggtggggagccaaagctaagctgtttctttcacctctgacccgcgcgattagtttgtggaagaacgctctccaaacccataggaagttcacagacagcttggattcctcagagggtcttcggtatcgattgtgtagcagaaaaagcaagcatgcctctgggtctttcctctcttctccatagtcttttttatgtctaactggtgttgggttgctttacctctccacccatagttaaagaaag

SEQ ID NO: 194825 - DNA, 469 bp, Homo sapiens
ctgtcatagtcggtcttcttgcttagtaggcctgagataaaactttctcctatttcatccctcctcctccctcttcctgattttacatgttatttagttgtttctccctctcactataattatttgtgagaagttacaagagttatactatggtagagcagacaggctttgcacaccttcagggtcagttctggaccaaaccactcagaaaccactgcacggatgaatggctggagattgtggggcctattgtgtctccaggtggctgtggttacatgggatccctggaatgttaattaattttcatatttccctttaaggtacttctgtggctcaaacaatgaatttctgagttaggtcccaaagtggcatttttgtttgccaacaccctcataggaaactgtattagaagctttcttgtaatatttaagagcctttaaaagagcgagactccgtctccaaaaaaaac

SEQ ID NO: 194826 - DNA, 312 bp, Homo sapiens
ctgtgtaccaagcatcgtgctaagtgcttggcgcatatcatttaatataggaatcaacaaacctcttctgtaaagggtcagacaataaatattttaggctttgcaggcctctcttacaaacactcaaatctgctgttacagtacaaaatcagccacagacaatacataaataatggatatggcttgtccaataaaacgttatttataaaacaggcagctataagctgtggacccctgatctaactgaatccccacagctcaatgaagtagatatcattcattcattcattcattgaataaatactacagaat

SEQ ID NO: 194827 - DNA, 704 bp, Homo sapiens
aaaacatcattttcacaagtcattcttgagacagaaaagtggaaatagaagttcatatatggttgtttcactatctctaatcttatgtacagtttttagtcagttgacagccatataattcttagttttatatactgatagtcattagaaattacaaattttaaaaaatattcatgtctcattctacgaatcaatgtaaaaatttcattcacttggttatatttcttcattttacctggccttgactacttctttcctgcccagcattaaatttaattaatgtctaatttgtttacttggtttagttattttggccatgttcagtacacttgttatgaagcaggcatgtaggaatgttgacaagtttatggtcctcactcttccaaatccctaatggcggcaccccaacagacacataccacaatgtaaacacatacacacacacacaatccgtgcccacccatactcacccacgtacacacagacacacacacacactccagtggatcaacacataaaacactccacaggcaggcatcgtacagcagggatctcttagtgcactacacacttctgtaaattatcaggactcttcaattgaggtgagtctacagagatttcaaaagctatttgagtgttaagctatctaactagtggttggacactatttaaataatgcattaaacacaactcttgaggctctg

SEQ ID NO: 194828 - DNA, 481 bp, Homo sapiens
tctttaggtcaaactaccttaatgttatcatacttcaaatatcctacacattctttctgaaccactccttccctatggcatataagccctggctctgggggctaatggcgtgggatctgacaccttgtctcaccacttcctgagagaaacatggcttctgctcctaagtccctgtttctttctaagaaactggatttgtcagcctccttccttggcccctccgcttctccggacattgggggtagatttgcatagacctgcccaccacggaaccatggggcagctaggtggcacctaggctgcagccctgatcacctgtagctgcatgttctaatccgttcaactgcttccagccggccatctgcccaagtgggcggaaagcaggggccacgtcagctttacttctggcacaaagtaggtgctcaaacacccatcagataatggtcaagtttagtttctggtgaaaacaaataatggctct

SEQ ID NO: 194829 - DNA, 295 bp, Homo sapiens
tctctgaaaaaatataaatattattagcaaggagaaacaatatttaggatttgagtaaatcaatcaagaaaaatccttggagggtagtggggagggtaatggaaaagcacaggctgaaaagtcctatttggtcacattccgtagcttttcattattggtttctactagcaaatagagtaaggtacaacagaatgttcaatgcattgaaagaacattttgcttctcttaaaagtcataaaagagaaacagaggatttctctaagaaaaaccaaaataactccctctggagtaaccc

SEQ ID NO: 194830 - DNA, 357 bp, Homo sapiens
cgaggacccggcgtgtcaggagccagatcacgccactgcacttctttatcctagataacattttctaaatatttgttcaattaattatattggaattatttctggaattaatttttgccttcccaaagttcatatctagcatatttaagtttgataaacttgcatctttattaaagaaatctctcattggcctaatagcaatattatccaatatcaacttcagatttaaccagcctcaactggttaagagcttcagatggcattatactaaatggagagtttcctcagattctaaatctgtgctgtccaacacaataaccactaatcacatgcgactatataaatttacattttctc

SEQ ID NO: 194831 - DNA, 165 bp, Homo sapiens
tccctgatcacaggatctccctaactttttacatttgtgagcagtggttctcatgtattcatgtgctggagatgcagactcctgggtgccattcccagagcagctgattcagtaggtctgggaggcctgggaatttgcatcatcccagggtggcagatcattctg

SEQ ID NO: 194832 - DNA, 233 bp, Homo sapiens
gcaggaagactggttagaaagctagcaaaatcaactacaaagggggataggtcatgccagagatgctgatagctcggatcagggtggtaatgcagcaagggtggtggtaagcagtagtcagatctggagtatatttttaggcacaagctatggggaccagaagaaaatgaaagaatgaattcaacaaagaagcccaataatggggtagggcaggtggtaaactgtcaaaaaga

SEQ ID NO: 194833 - DNA, 479 bp, Homo sapiens
gcatcaccttctaatattcttttcctaatttgaaaacgtctgtttattctaaatttaattttttaaatccaagctgcatgtcagtcaggtactctcccaaaccttctctaatttcctgaaatgaagaatgagttataacaagaaatgttttacttattaaagtctagattaaaaataagatttgaccgggcacagtggctcacgcctgtaatcccagcaccttgggaggccgaggcgggcggatcacttgaagtcaggagatcgagactagcctgacttacatggtgaaaccgtctctaactaaaaatacaaaaattagctgggcgtggtggcacacgtctgtcatctcagctacttgggaggccgaagcaggcgaatcacttgaacccaggaggcggaggttgcagtgagccaagatcgcggcactgcactccagcctgggtgacagagtgagactccatctaaaaacaaaacgaaac

SEQ ID NO: 194834 - DNA, 742 bp, Homo sapiens
tttaggattgtaatgtcttttgtccaattttcgtatcattccctttacatttgttagttaacatttaattgtaatgaatatattgtctgacatttctaataggttaagatctctttcagtattacatgtattcttgcatatcccattcgtttgctgattttagagtctctctccttgacttttacactgcttgatatctttacttggttagatggtgatagtagtggttgtggtgacaacaataagttgatgttattgttaagggcttcaacacactgagctttgatttaggcattgttatcagtccatgtgaattaacccatctagtcctctgaaagccctatgaggcagttattgttctaattttatagatgaggaaatgaagcattaaggaggaggtaaagtaccttctgtggctggtgagttgcttggccccaagatatgaacccaggctggcttgagtttaactactacattgtgcctttcctctaagtagtcttctgatttccttatttccattcttccgcccttttctcttttcagcaaccagagtgaatttaaagaataatcttctagcatattttaatgtattcagttagagtcaggtctttactgtggctaaaggccctacgtggccttgtagcttgctcctccctagagttttctactctttgcctcctctttgtgtattcctcgaacatacacatgctctcatcatagggctttggtgttgctactccct

SEQ ID NO: 194835 - DNA, 472 bp, Homo sapiens
  misc_feature (373)..(373): n is a, c, g, or t
  misc_feature (464)..(464): n is a, c, g, or t
catagcgagctcggtaccccaccactcctaagatcagtaagaatcaaagtgatttttaggctgtcttagtgtacacagcaagggtggtgaaaaagtcaacctgcactagttagttgtgggatcctgagaaaagtaacaatgggtggaaatacctagaaaaaacagcacaagttgaatgctttaaaaaatttgaggatatttactttggaaaaaaggcttagctgggcgcagtggctcacgctgtaatcccagcactttgggaggccaaggtgggcagattgcttgagcccaggagttctgggctgtagtgcgctatgccgatcgggtgtccgcactaagttcggcatcaatatggtgacctcccgggagcggnggaccaccaggttgcctaaggaggggtgaaccggcccaggtcggaaacggagcaggtcaaaactcccgtactgatctataggagtggtggnggatcctc

SEQ ID NO: 194836 - DNA, 320 bp, Homo sapiens
gtgttacattttttaaaaagtgttgatattagctcacatcttcttcctataacctctacttctgcatcatttatttcatcatatagcttaaatttctctcttattcccaactatatcctagtcattcctgtgaaacattcttgaatccaaaaatggtagctcacagtattaccccgttctatccatgtactcacctgaatgaacacatggttagtgtaacctaacatattcttagtgggcagatgttggctcttaataataatagttttggggcgggcacggtggctcacgcctgtaatcccaatgcttgggaggctgaa

SEQ ID NO: 194837 - DNA, 362 bp, Homo sapiens
aaaatttagatacatcttagattagatgaagacctttcaaaatagggctttaaaacatacaattcaaatatacgtgcttatacttttacgtgaattacaaattgggtaaagatagaaatttgtttctacagaactgccaggaattatattacacattgagaccactgatttttgacactggccactttgtccatttgaattttgctgctgagttactcttttgggcataattctgcagagtggaagtctttaaagataaaggaagggctgagaatgttttattcttgttgacatatgagtatgattcaaattgagttttatggaaagatcactcacttcatagaaatttttttattttacct

SEQ ID NO: 194838 - DNA, 591 bp, Homo sapiens
actttttgtttgtgccacctgtctatattaattctctgtattttccccatatgcttacttgcatacttatatggttattctctgtgtatttcctgtttcttttctctctttttttctaaatgtattgaaatttctgagaagatgaaaataccacctttatggctactcctaatggcaataagcgtagtcaccaacatttatttaatgttggctctttgttcaattaatctttgtggcaactgtaaaggcacaagttactttatctccatttgggggttaaatctgttgaaactctgaagaagaaaggaatttgtctctaggtcatgcaactggaaaccctggacttgaacccctagcactgatatatcctaggggttctagttcagattagactgatgctagaacccctgacctggtctccacagacccctcaacactgcttcacgtgcagagcaggaagcaccaggacatccttcctaagtggtgttaagaacttgatctgatgaagtatccatgtgtctttgagtaagtcatttaacttctctggaagaacagcttctttacaaagtaaggtcgtctgcctcttagttc

SEQ ID NO: 194839 - DNA, 394 bp, Homo sapiens
gaagagggattgggtgtattctgcgtgggcagaaccatgaccaggagagaggggaagccaagaggagagattgcagatggataaagaagtttctcacagtcgaggaataagaagcacacgggcaggcttccccagagaggccggtgccccaacctagaggacacgaagccgaggccaggactgtggaccgcagctggagacccctcttgacccgcgggggctggtgtgctaaggtgcaaagggaggaaagagcaacatgcagggtgacacctgcagacagttctccctgttctggaatcttccggtcggccccaggggtgcacgctagggcagcccatagccagcccctgctagatcccggctcccggcaaccctcaatgctgaactctcccag

SEQ ID NO: 194840 - DNA, 316 bp, Homo sapiens
ggaaccttccattaatcagcacataaagtgacctatttaacccttacagcaaccacatagcataggtattgccatttttactttcttccatagaaaacaaattgtagctcagagaaattaagtaaattgtccaagagaaccaaggcagaggtcctgaaattcaaacacaggtctcacgtcaaaatccatgtgctctccttgacacatgtcacttcctcttgtctggatgccttctaggcttccctttgactaaactctaaacaactcatatgttgacaagtaataatcatatatatttatggtatacaacatgatg

SEQ ID NO: 194841 - DNA, 288 bp, Homo sapiens
ctccgaaaataacaccaaggacttaaaggagaagaaggaagtaaattaaggtctaggaaatgaagagagctaataagctacctaaatccaacagtagagagaagagaacagaactgtcttatgtttcaaagatgaagatgaatttttttcctctgttcaatcagtaaatacttattgggtaccaattatgagccatacattcttctaggaaatgggactttaagagttaaagaagtcctacttgccttcatggacttttgaacctagtgacagggaaagagacaacaa

SEQ ID NO: 194842 - DNA, 275 bp, Homo sapiens
cacattgtttttgagaagatgggttaaaaccagttacaagtgactaatattaaaatttactctctaagaagtgatgagtaaaatggttttatcaagtcttgtgttttattaatggcatgaaatatagaaaagcaggcttagagatactattttttacagttggataaacttttgtacacagtagaaatctgattttgccatgtgtttttttgtttatgagggagaagtgttcaatgactttttcccaaagatttttttttttcattcagtgaatt

SEQ ID NO: 194843 - DNA, 133 bp, Homo sapiens
actgggaggcaaagaagagtgctatctggcctctggttcagtgggtggtggtaagatggtcggagtatgtggttaggctcaaagctggtgacctattagactattataagttacagttttcttccttactaca

SEQ ID NO: 194844 - DNA, 243 bp, Homo sapiens
tggaaggatcgctttgagcccaagagttcaaaaccatcttgggctcaagcaaaccttccaccttagccttccacagtgctgggattaaaggagtgcgccaaagtacctggcctccctcccatcgtctttttaacatttctcaatgtgctctgtcactttcattcccattgttaccaacccctagagcaataacgcacaacagaaatgaaagccacatatgcaatttcagattttctagtagcc

SEQ ID NO: 194845 - DNA, 343 bp, Homo sapiens
ccacaacattcaactgatttcaaatattatattattcactttaacgattttgtccatagctgtttgacttctcttgagtcagtttgactatcctagcgggatgatgaaaacccactacttaggaagaacagtttactactacagtcacattctgcataaggaaaactgaccaaggttacacataagctggtaaatgttaacaaggggatctgaacccatatctacttaattctaagacccttctcttcacatttaactaccataaaagagttcttttcaatcatattttaattcatcatgatttctgaaaattttgagtattattctagagatacggactagc

SEQ ID NO: 194846 - DNA, 341 bp, Homo sapiens
aattcagtctatgacaagtgagaatgacaatattggcaatgaagttaaggaacagacacttagacacagttgatgggaatgttaattgggacaatctttttggcaagtcggtgtttcaatatatagaaaaatttagaatgttaatttcatttcactcaatgattctgcacctaggaaattaccttatgaatatgttctcaaaagaatgcagtgatatatgtattgtagcaatattgcaatagcaaaaatgtctaaaaattagatgtccattggtggagaaatagttaagtaaaattggcaatattcatgcagtagaatactagatggcagtagaatactag

SEQ ID NO: 194847 - DNA, 523 bp, Homo sapiens
cccagcactggttggtgctgttggcatagactctgaaagctctcaagctgtctgggctcacgtcccaggtctctccccagccccccacccccacctggtgtgttgcctgaactggagccactcaactccctgtgcctctatttcctcacctctgaaatggcaatgccaagagcactgttttagggggctattctgagcattatatatgctcatagatgggcctggcacaaagtaagtgctcagtaaatgtcagctactattatttcctttttttgttttttgttttttgtttttagacaacgtttcactcttgtcacccaggctgcagtgcaatggtaggattttggctcactgtaacctctgcctcccgggttcaagcaattctcccgcctcagcctcctgagcagctgggaccacagacgtgcgccaccatgccaggctatttttgtattattagtagagacagggtttcaccatgttggccgggctggtctcgaactcctgaccttaggtgatctgcctg

SEQ ID NO: 194848 - DNA, 528 bp, Homo sapiens
cactactggttcccacattgcacaggacaaagttcaaatgtcttagcacagtgtttctgtccctatcctgcagttttctctctcatctcccatgttcatagcctataatctctccaactttcaccttttcataggctgcttagtttcacttagtttctttgtggaagacctttaattttcccttataaatcctactatttttaaaagactcagctcaagttctatctcagaaaaccttaactaccaagatctggttagatgacttgcttactttatcaaagcacttatcacataaagcagtatagtgtcttccactagaatgtgatctcctgaaaaaaaaaatctttgatacctacacattcatgcatctaactaatatctgctaagcaactacatgacaggcactgtattaggtgtttattacttaatggtgaacaaaacaaatatgcccctgtccttgcagagcttgtaatctataagaaaagaaaatcaaagaaacaaataaatatggtgagatctgaaaaaaca

SEQ ID NO: 194849 - DNA, 438 bp, Homo sapiens
agatgcagccaagtttgtaatccaagcgcctggctgcttggctctggcagcccctcacagccctgctctcccgctcccacattgcagccgtccccaccagccgctggggccaaggagcctcgggtgctgggaggggggcctgcggggcctccactgggaggcccagcttcaggcttctccccacattctcgctctctcgggctggtggggagataaggaaagggcttccctggggctgaggatgaaggaggacttcagccctagtggtctgaccctgaggtgggcactacctggggcaggggacagatgcccactccacccactgcacgggcacaggaataccacgttccatctgcagccatgctagccaagaactcactgacctgagcagtgagttaacatttttatagtacacattaaattgatacataactatta

SEQ ID NO: 194850 - DNA, 225 bp, Homo sapiens
atcaggatgacaatatataattaaagtcttctgatcatagcttgagaccagtcaagggaatgtttagtttcctccacaaagagccaccaaatatcctcgtatgaggtcccagcccaacttcaatggtctcgtgttaaccacctctttaaaagccctacctccaaatacagtcacattctgaggtactaggggttagggcttcaatgtttgaattttggggggaca

SEQ ID NO: 194851 - DNA, 260 bp, Homo sapiens
acgtaaagagagccagttgacatctacacaggcagttccttctctacaggagaggaaccctaagcttagggaaccctaatcttttaagatgggcagtaagcatgcctaccctttcgctccagagggagacgttattcttattatactggataatatgtatccccgccttttgctctggtggaagacactatctctatcttccaaggctgctctttagataatatccgtgaaaaaatagaaacaaagggcagtcagtatct

SEQ ID NO: 194852 - DNA, 233 bp, Homo sapiens
tattatttacattataataagagaaaaccaaagtacagagttgaaataccttgctctgaggtcacacagctagtggtgaagctagaagacagtccatatctgcttgcctatgagcccttaactctaaacaaacacatctacctttttggccttattttcacaaaaaaaaattgactacacttcagatagtgattatttttgcctagaatgcctgtcttcctactgttattaaa

SEQ ID NO: 194853 - DNA, 455 bp, Homo sapiens
taggcatgagccacctcacccagccaacatatgtgctcttatagttttgtgatttttatgaacagtttcatttgcattcccccatgccatttttcctaatttataagtacttttcaactattttagcttgtttttctttgctattggaataagcaaataatatgtgtatcttacatatgcacattttttctttttaattaatcttgtgatgaattcttggtacatttcctggggaaaaggatttaaacatctttatggttcttaatgatttttttaaaaagaattattgaacccaaaggatcttgcaggtttcagatgttacatgtttacttttttgtgtagcaaatgttcattaattgcctactttgtgccaaattcaggcctatatcttgctgacgttaggttgtcatttttcttagttttctttgtgactattaaaacgttatcttctaatt

SEQ ID NO: 194854 - DNA, 431 bp, Homo sapiens
ttatttcacttagcataatgttttcagagttcatccatgttgtagcttgtattagaatttcattcctttttatgaatgaataatatgccatttatgtatttgccacaaattgttaatctgttcatctgttgataaatatttggattatttcctttttattgacaaatattgtaataatttccttgtaatatcttcatgcacttatatatatacatctagaaacagaatttctgggtgttgccagatttcactccaaagtggttatactaatttatagtcatagatgtaatgtgtttctctttagctacataaaccccatcatagaaacattttaacaaaaatgagatgtgttttataacatgctttaaaacttaaccatacattgtgaactctttccatccaataaataatattttacaatatgattttaa

SEQ ID NO: 194855 - DNA, 393 bp, Homo sapiens
ggaagggcctccaggaggctaagatgacactcagctgtgaggaaatgaggatctcagagaggagcaagaaggagaaactaacatcttatcaccatgatgtgccaggcatcacgccggaagcgtcatcactgttacctcgctcggaactcacagtcacctgcgaggagtgagattggggttatcatccccatttcacagatgtgcaagttgggcttagttacaactaaaagtttttttgagtaagactgccagcgacaggacctggggtcgggctgctgagagagatgaggaagcagctgttactctcttggacccagacctcctctctccgtgttgttgttgttgttgttgttgttctgttattgtccctgggtgctttgagtttcatttgtt

SEQ ID NO: 194856 - DNA, 268 bp, Homo sapiens
ttttcaaagtgccctcattgctaccttcagtgggcccaaaaacagccagtgggtgctacctctgcctaacagatctcaccaacaagtctctcatgaacatccaccataatacaaaactgagactggtctcaagtgtacctttcatagaacagacataaattttaatgtagtatagactaaaagcaaatgtattaagatgcagtctagcagtctgtctttccattttaaaagaagttaataatcatttaatttctatgtctaattagag

SEQ ID NO: 194857 - DNA, 215 bp, Homo sapiens
tatttaatggtgaaactgtcagtccttcactgaaaataaagagcaaaataaggttgcctactgtcatcactaatattagactcttcactcagatttctatatgacacaattggacaaagaccctatatatgtgtgtttatagaaaagtatataaatatatggccaggtgaggtgactcactcctataatctcagtgctttgggaggccaaagagg

SEQ ID NO: 194858 - DNA, 157 bp, Homo sapiens
gtcatcctctattccccatcaacccctgccataggcaaccactagtgtactttgtctctgtagatctgcctattctgagcaatcacataaacggaaacatacaatatttttttgtgtgtgtctgacttctcttagcataatgtgttcagggttcata

SEQ ID NO: 194859 - DNA, 480 bp, Homo sapiens
gacaggctgactccagattaactctggaaaaaatggggattatttcacttcatcttgttcaatgtagtgcttcatgcagtccacattttaaatgtgttatcactgcttataacctcaaaatagctttctataatctctaacaggaagttagtaaaaactagattttagagaaaatatttgtaagaggtgataaaaagaggtcagttgtaactaatatagttccatcttcagttacactacacatagttcaggaagctttctttatgttacagtgtttattgcatgaagaacaaccttaacccttaaataaggggaaactggtgaaggtgactaaatatagctgctttattagaatggctttaaaacctaaataccatttatttttagctcaaatatatacatttagaattagatacagaagttttagctaaaactatagaaagatgtaaaattaagaaaaaattccagtgctttgactat

SEQ ID NO: 194860 - DNA, 642 bp, Homo sapiens
ttgataacgtcccattgaacagatgaggacaccgaggctcagagaggtgcagtgcctgcccacaaatagggaagcctgcctttaaacaatggtctacctaaattctcaaattttctctatctctatgggcctggatttatgtccagaattttagctcttctccctgtttctgccactgtcttcaaattcaaactccaggtctttctgaacccaaagtttctcttttcttttctttcttttcttttgagacaggctgtcgctctgttgcccaggctggagtgcaatggcatgaatatggctcactgcagactcacactttgggaggccgaggcgggcggatcacgaggtcaggagatcgaggccatcctggctaacatggtgaaaccctgtctctactaaaaatacaaaaaattagctgggcgtggtggtgggcaccttgtagtcctagctacttgaaaggctgaggcaggagaatcgcttgaacctgggaggtggaggttgcagtgagccaagatcgcgccactatactccagcctgggcgacagagtgagactccgtctcaaaacaaacaaataaaaaacaaaaaaaagacaaaaaacaaattaacaaaaataggcaaaataaaaaattattatatgatgt

SEQ ID NO: 194861 - DNA, 454 bp, Homo sapiens
ttgataacgtcccattgaacagatgaggacaccgaggctcagagaggtgcagtgcctgcccacaaatagggaagcctgcctttaaacaatggtctacctaaattctcaaattttctctatctctatgggcctggatttatgtccagaattttagctcttctccctgtttctgccactgtcttcaaattcaaactccaggtctttctgaacccaaagtttctcttttcttttctttcttttcttttgagacaggctgtcgctctgttgcccaggctggagtgcaatggcatgaatatggctcactgcagactcagtatcctaggctaaagccatcctccagcctcagcctcttatgtagctgggaccacaggtgcgtatcagcacgcccagctaatttttgtattttttgtagagacagtgtgtcattttgttgcccaggctggtcttgaactcc

SEQ ID NO: 194862 - DNA, 286 bp, Homo sapiens
cctagggttggctaagccacctctgtctttcactatacatagggtttatgttaaagggaaactggctagatccatgtatattcaaatctgtgtgataatgcaccatcttctcacaggaatctcctagactgggagtccagatgcctacagtctaatctcagatctcatgagttctgtgatgctaataactcacttaacctatctgggcctcaattccttcatctgtaaaacaggggcactgagaaggtttgagctgaattagaattcccacttctaacactgcaca

SEQ ID NO: 194863 - DNA, 953 bp, Homo sapiens
cgggggttccttgggcagacaggcaacctcatgaacaaggcagcctcaggagctcctctccctcctcagtggctccgatcgcgtcacctgtagagcttcagcccagcgcgtgggttccttggcagagcatagaaaacatgactcagattttgaaataatggttccccagcttctgcaaaacaggagaaactggaactgaaattctcttcttcctaaagtaggctgactagtatggcttcagaagaaaagtactgttataatggaaggcctccagaaagaaaaatggttctttcccacatcaagacagtataaaattagtatccctacaaagacaatgttatccccagcaattcaactcagtgttcatcttatctaccacctggaccaagtttagcacctaaaatgatataatgccaaatgcctggactagtgtccactatactgaaggcacaaaataattattaatattaattcattctcctccaactctcagcctcagcagggagttcagggctaaagacagagaaaaagtacatgcaaataaacaaaagtgaccccaggcacaatggcttgtgagcttaaaataaagatgactccaaacagaaacctaccttagaggcaagcaattcctctcctaaacatctgcccaaaagaaataaaaacatatgtggaacattgctcataaaaacaaaaaagtggatactacctaaatgtccattaactgatgaatagtacaagatggcacatctatgcaatggaatattatttagcaataaaaaggactgaaaaactgatacatgctgtaatatggatgaatcttgaaaactttatcctaagaagccagtcacaaaaattaacatattgtatgattgcacttatataaaatgtccagaataggcaaaattattgaggattaatagttacctggggctgggaatgaaaatgggattaac

SEQ ID NO: 194864 - DNA, 533 bp, Homo sapiens
tgttgatgataaaataagattaatggtacatctaatatcctgacacttaatgcaaataaaaacttacatgtcataatgggaaaagcataaacctttggaggatcacatacctgctagcagttacttgttctagcaccttcgaatactgaccttctctatgcatgaaatgaagttaatttcaaccccaaagcattttttatgagaagtaaaaatgttacatgtgcatataaaatttatgtctcataaaatatcaattaaccatctcctgacagagaagtagtgtgtcatccaatgttagccttttaatttatacatgaatattgtttatataaaaaagtatatgatgcaacaagacaaggctggctaactcactatccatccaaccttccttcttcactaacagaaccctgattttatcagggatctacttttctctggttgaccaggtaactcacagtaaatttcattccatttcaggatttgcttagaaaaaggcaaaagacacaggtcttgctcacaagtcatcagcaatc

SEQ ID NO: 194865 - DNA, 847 bp, Homo sapiens
  misc_feature (660)..(660): n is a, c, g, or t
ctggattttgttgactgaatccctgtggtattatatgctcttctgcctctgtacttcctgtctattgatagataaacctagaagcttgtgagattgaggggttttttttggtctttttccagcaacagtactttttaggtggtgatgcattcttcctccaagaggcacacaatgtctggttctctatttgtggcaacatcagccactgatgagcagtacctacatccatgacagaattagggctgcaaaagggagatactctatcattcttcatgtattagctgaagtagtctatgaagggagacttcccctcatctaccatttcattacccggtggtacagtttgatgaggaaaggcagagtgagcatttagatctcttcctacatttaccagttctcaaaaacagctacttcatccagggctttatttaaacattttcctagacacttgataaacatcttttttgtgtagagaactgcgctgggcactctgacggctacaaaggtgagttgggcacagtgcctgcatttaaggagctccccgtctaatcaagcaagattcttgctcccatcagggagcacacataaaaaaaactaaaaaaaaaaaattatctgatgggacgaagaccatcttgctcccatcagtgggaacctgtgaantaaagagtcaaatgtatgaaagtcctcatggaaaaatgctgacaagcactaaaaatcactgtaaattccttggagagttctcagaattgcagaagttcagaaaaattactttggtctttcacatgtcaatattcaggaaagaggttctttctcttattacattcctccgggctgatggacgcagact

SEQ ID NO: 194866 - DNA, 472 bp, Homo sapiens
ttcttggaggatagcttatttgatgttttcttctatttcttactttctcttcccttccttcaagtcctccctttttgccccccccccccccccccgttttattgtaaattttttttggaagccttcctcaaatgattgttgatttcagactgcacattcataattaagaatgagtcattaaaggccaggcgcagtggctcacgcctgtaatccccacactttgggaggccaaggtgggtggatcacgaacgaggtcaagagatcgagaccatcctgaccaacatggtgaaacaccgtttccactaaaaatacaaaaaaaaaaaagccggacgtggtggtgagtgcctgtagtcccagctactcgggaggctgaggcaggagaatcacttgaacccaggaggcagaggttgcagtgaaccaagattgcgccactgcactctagcctgggtgacaaagcgagactccgtctcca

SEQ ID NO: 194867 - DNA, 711 bp, Homo sapiens
aggagagtcaagtttggaccaactcggaggctcattgtctttgacagacacccagctggtgaacctgtgtcctggaggaatgcaggagcagctgctcattgtattcaaacctttgatggaaggtggtttgaatgataatggttgaacagactccaaggctgagaggacgggcgggcggcttccttcagtgtccctgaggccaacacactcagtgctccgattccacagagggggactttgggtggtgctgggggcgttgaggaagaagggcccctgggcacagccagcagtgctgtcctcagtagtgatgacaaggaggaggaggaaaagggaaaagaggaggatatgatgacaaagatgatatttaatccctcaaacttgcttttagggaagttcctccatctgcatgtggctgtgtgtcagggtgattattagtagggttacgtgaacacggcacagtggtacaatgccatcagactaaattttttaaaagttttaaattttcattgtaactggcaattaatgatttttaaattatttttatttatttattgtttctttgagacaggtctcattccgtcacccaaggctggagtgcagtggtgtgatctcagctcactgcaacctctgcctcccagctcgagcgattctctcacctcagctcccaagtacctgggactgcagatgtgtgccacaacacctggctaattt

SEQ ID NO: 194868 - DNA, 470 bp, Homo sapiens
gggcaaagcctacatatacacagtaacttcattaagatgattctggggaaaataaatattttgtttacattagaaaaaaacagattaaaggcgaagtttaaaagatagtacacaaaccaatatctgagttttgtttgtggtcaagattaaaatgggcatttgtgtgtgttgatgtgtttacagagcagacatgtgaggtgtctcataaactgttttgttttgttttgtttgtttttaccaaagattagttttcaagtttgagtacagatcacctaatgatattagcattttcacatcctgcaaatattgatgacagtgccttagtgagaactcttccccaattcaaaattattatccatgtctcccagtcttgaataataagagcaataataatagctaaaatacactatgtgattattgaatgattaatccaaactaaccctctagctttctaactcatatctatatat

SEQ ID NO: 194869 - DNA, 453 bp, Homo sapiens
acactgatgaaagaaactaaagaaaatgcgaataactagaaatgtatcttgtgtctataagctgtaagattaatattgttaaaatgcccatattaatcaaagcaatctacagattttatgccatccatatcaaaacttcaatgacatttttcacagaaatagaacaacccgacaatttgtatggaactatagaagatgctgaatagccaaagtaatcttgagcaaaaagaataaaactggaggcgtcacatttcctgattttaaaatctactataaaattatagtagtcaaaacaactttatactagcataaaaacagacaaatagactaatggaacagaacagaaagcccagaaataaatccacacatttacagtcaattgatgtttgacaaaggtgccaagaacacacaatggggaaaggacagtctctttgataaatggtgttgggacaa

SEQ ID NO: 194870 - DNA, 135 bp, Homo sapiens
acaacccatatataaacccacacaaataatgtctgactgatttttgagaaaggcacaaaaacaattcaatggaggaaacatagctttttcaaaaaacgttgctgaagcaattggacatccacaggcaaaaaaaaa

SEQ ID NO: 194871 - DNA, 180 bp, Homo sapiens
tgaatatatatggtacgttgtgaatatgacttctcaattaccccaaatcagcctacaaagacatggcatgtgtgtgggaggaaagaagattgagtgggcggagccttgtaggtaccaattctttctgacataaaaaaaaaaatagcagtcctggggtgcagggggaaaattcttgaaact

SEQ ID NO: 194872 - DNA, 351 bp, Homo sapiens
gccaagactcagttctttcagccttaaaatggagatagtgttgtgtctccttcacagatgtgttgtagagccccagtgagataaacggtgcatggagagtcttcttaaactgtagagtactgtgcagcagaagagagagctggcttcaacacttagtcttgtgaccttggagctgacggctgcacctccctgtgcctcagtgcattcatctacaaaataggaataaacacatttcttgctctttcctttgtatttcattttatcttctaaggaaaccaacagtatacttgctatttcgtcgaggtgccctactttgaacttggcctagccatatgcaagggtaccgagctc

SEQ ID NO: 194873 - DNA, 390 bp, Homo sapiens
caaataatccatgaagaaaacatattagaattaataaatgaattcagcaaagttgcagggtgtaagatcaacactcacaaatcagctgtgtttctacataccagcaataaaaaaaaaaccctaaaatgaaagtaagaaaaataattccactttcagtagcatcctaaagaataaaatacccatacctaggaataaacttaactaaggaagtgaaaggtttgtccattgaaaactataaaacattactgaaagaaattaaagacctaattaaggccaggcacagtggttcatgcctataatcccagcactttgggaagctgaggtgggcggatcacaaggtcaagagatcaaaaccatcctggccaacatggtgaaaccctgtctccacta

SEQ ID NO: 194874 - DNA, 919 bp, Homo sapiens
aggtatggaggaggcagaaaaggctggaatacggcctccttctctggctggggggtgagtcctagccatggcagaaaagagcaaagccacatcaagcagagcagggcagaggctttgtccagaaaccctctaccccagtcccacccccagccttgggcacagatagttgggcctggcctgagctctgctggccacagccatccaggagccaggcgagcatgtgtgggtgtgtcctccccaggatggggggccctgagggcagacaccaagtcttccgcaccttcctacctgctccaccacagtgttggaaggcactacccactgccaattacagccaggcgcctttcctgaagccctggttcacttcattcacagcccattaccatgtacctactgcatcctaggagcttcacagggacaggaggggcagggagcattgtcatcacccccaactgtttgtgggtcaaggagaccaaaacaaagacagtctgaagaggggggcccctggaggctgggagttcctcaaagctacccagaggaagtgtggctggaggagagaacagaggatgggcagggattagggaagagaggattcactgcagcaggggagggggctgtcatcaagacacaagagcatgagggtaggcggatgtgctgaccaccagctcgagacccactgcctgggggaaagtggcaggaataaggtgtacctgcagagaggaggcagaaggattcctcctggggcaggagaggccttggggaaggaatgaagggagagtcatattttactgtttcttttactacactgttgaatctcatacaagaatgtattactcgtggcattaaaaaaataatggtgaaatctaaatcatgtgttgagtttagttaagagtagtgtactttttttttttttaagtaa

SEQ ID NO: 194875 - DNA, 346 bp, Homo sapiens
atgaaaaaaagagaaagatttgaaaccaacaatttagcttccatcttaggaaatcaaagaacagcattataaacaaaagaaataataaaaaatagaacacagaaatcaaaaaaattaccatagaaaaatcaataaaatcagctcattgaaaagatcattaaaatggattaaactctagccaggctagcaaaaaagggggaaagatggagaaaggggaagaaagaggaagaaagacacaaactactaatatcagaaatgaggccgggcatggtggctcaatgcctgtaatcccagcactttgggaagccgaggtgggcagatgacctgaggtcaggaattcaagacc

SEQ ID NO: 194876 - DNA, 225 bp, Homo sapiens
tctgcagcaacaggagaaagatacagcatccacaagtcacaaaaggtgggagcttttacaaagagatagatatcttagaaacgaaaatgaaatcatgaaactaaaagtagccaacaaagaaagtgctcatgataaggcggagacctccagagagtaatcctgagccacaagggaacagcagggagaccacagcaaccggagcactttctttgttgtctgcttcag

SEQ ID NO: 194877 - DNA, 239 bp, Homo sapiens
atgggtgctctagaggatcctctctctccacactgggacgggatccggaaagtatggcagaggaggaagtgttcagtcaagaatgggattctgaccatctcacatgccccatgcattggcagagctacccgtggcctgctggcctctttgcatgactctcaatgcatctcagaaggagatgctgaattgttctaatgctcccaaagcatctttctctgaggagcccagtgtgcttctaa

SEQ ID NO: 194878 - DNA, 504 bp, Homo sapiens
tcagatggatcccccatcaaccctaaatttattatgtaaacaaactacaacttgaccaggcagtatattcttgtaagaagaaaggagtcttctccaatcatagcagccagccttcagccaggggcagactgcagactgaccagatgtgtccaaattagacaaaggttgagctgtaaccaatcagcctatatccaatgccacttcctttttctgtttataaacgctgcttgcccactgttgctgggtggaggtctctgaaacctctctaatgtagatctctcatttaatggggagggtttggcctttaatcaccatcatccctgaacaaagactgaccaattggactcaaatgctattgaactatctttattgcatggactttgagttatttgattttgactagttgtttgttgaaactcctgataaggagtgtacttcagtttcttggcattgtccactcatagccatcataataaatttagggttgatggggtaccgagctcg

SEQ ID NO: 194879 - DNA, 354 bp, Homo sapiens
taggccccactgacttgcttttggtatcttaatgacatcaagctccttgcttccttagctccttgcttccttgaccttctcatcctttaggtttcagctcagatgtctacttaaagagattctctggtcaacctgtctattaatgtctgttccaacaaccagttacttcccttatagcacttataatttgtcattctgtttctgacttctacttcttatccatctctccagtagactgtgaattccatgaaaacaaggacggtgtataactatttgctgaataaattgataagtggatggacaggttctgtttccaaatttcattgactcccttctttgcttccctcccaggcc

SEQ ID NO: 194880 - DNA, 405 bp, Homo sapiens
gagaacttacagaaatgtgtacaagcccagtgacgttccaagactctcggcaagtgtcaacagagaacagacgtgccaagactctttctcacagtgaattctctcaggagaaaccaagccctgctaccgatgaacttatactccagacatacatggaaacaacttaccatgcctgcgagtcagcaccaacaacaaacagccaggttcatggttgtgaatttcggataatggaaagactatctaaaagagaacatgaaaggaacacatttaaaatgactaaaatacgccgggcacagtggctcatgcctctaatcccagcactttgggaggctgaggcaggaggatttcttgagctcagaagttcgagaccagcctgagcaatatagcaaaaccccatctcaatta

SEQ ID NO: 194881 - DNA, 265 bp, Homo sapiens
tgacgtatgatcaagccaccaaatctcagcatttctttggacaaaagacaaccttttttagtgaaggaaaattcacagcaaccaatctgggtagggattccaggtgattcttgccacctcattctcagtcattctcactagggttgattccacaaccacattataaactcctagtagaccaggccaatataattgctcatctcccatgacacccaagtgtcaataaataccaatgaatgaattgactccatttgtttgttttgca

SEQ ID NO: 194882 - DNA, 367 bp, Homo sapiens
gtttctagaacacacaacagcatttcactaacatttttatgaaactcaacaaggaggttccatgctcacagaacaagcattacttacatcaactacatatagccaggataggtgtgagataaaggcagtgcttaagtaagggaaaagacatcacttctgcttatcaaaccttattttctcactgactcacatacaaggaaatgggctgttcagaaaaaaaaagtacagcagtaccaagaacaccttgtactctttttcagactgaattttacggggctctaactacgcagtaggctctgtagtatgcaaggtcagagcctagcttctttattcctgtcctcctcaaaagtcagatagacagaaacta

SEQ ID NO: 194883 - DNA, 435 bp, Homo sapiens
tgaggccaaatgtattcaaataaaaaagaaaccaatctattaataagaaaaaagaaagagcagcatgggcagatcagagaggaagttcgcgctgacagcactcacacccgccaggcccatccccagcacttccaatgcaaataaacacagcttcaattccctgatcacttccatcacgggagtattagtatcctcccactttagagaggagactgggcacatggctcacgcctgcaatcccagcactatgtgaggccaagacaggaggattgctttaggccaagagtttgagaccagccttgccaacaaagccagtctctacaaaaaaaatttcagaaaaaaaaaagagaggagaaaactgcggcatggggcagaggtgcgataacttgtccaaagttgcagggagagcagctggctggcccaggatgggcccct

SEQ ID NO: 194884 - DNA, 204 bp, Homo sapiens
agttagcagtgtttgaaggctgaaccacataactctcacttgtcactatctcgcctcaagtaaatcactgataataaatctaagtttcctcatctgtaaatagaaggggatgaatcgggtcactgccaaggctttttctagctcagagtatatttctacacaacccttttaacctacaatcagagtttatatgtggagcatagc

SEQ ID NO: 194885 - DNA, 624 bp, Homo sapiens
aagctttactagcctgtaataggtgttaaaagcttaataatgcatggttataggcacgcctgtttaaaatgcctaaaaacaccctagcattgaaccacactaagttttagaaatctttcctcaaagttctgtaaattactattcttcagaaaaacagtacttcaacaaatttcattttgccaagtcagcaattacagcatttttctcattgtgaataagtcacaatgtaaatgctatcctgtcccatttactagtctttctctcgatttttcagtcatctggttttgctccagtactaggatagagcccaaaaaatgaaaaattctaatatccttaacgtgtcctcagtgacaaatgaacttggttatttccaaaagactacatgctaagtaatcactaatgttgcctattgcccttaattccaccatccattttaacttcctcgatgcttcttaaaattagtgaagctttgcttaacaaaacaaactacaaaaacaatgtttctataaactgaagatcaaaaattacattttcaaattaaccattaaaactatttttagtgttaataaataaaacttaacttccgtgtttaaatacagaagaacacatacagcattaacaatt

SEQ ID NO: 194886 - DNA, 532 bp, Homo sapiens
cttagaaccatgttgcagtatgagattcttcacattcagttcttctttcttcctccatccattttcagatatggtgctttgtggtctgaaggtcatccctgcttcctttcccttagtctttcacaggcatttctcccaacaggtagtgagaatgggttttgggttctggaaatggttcagtcacagtaatgatatcatcctgggttttatgtgggacacaaatatttcctggcacaaggtggccacacaaatgaggatttcatcaatgatgaaactgagaaaatgtgcaagtggagaggattgtcttgtaggtacaatgatttgggcattttaaagataggagaaaaacatgtctacaaggactgtggagttagctaattattgctaaattctgttgatgcccttcagaagaataatgagaaactgaggtcaatcaaaaagcaattaagggagaagtgtgagatccagtgagacactttggtagtttacaaagaggtccattctcctgcagtagaagagtggattcagagga

SEQ ID NO: 194887 - DNA, 487 bp, Homo sapiens
ggttccatttttgtgactcagtttctctagctgggccatctgtctagtccttttatgtggcagttcacccccagcatctcccctagcagacccattggcttcaattcaaaatctgcaccacctaagaaggaagaatagcatgggcataccaaactgcaggagctcctctctctaagcctgtttgtttctgtgactatgccccagggtagtgggaacaatgcctcttctttaccttgaggagtatcatcactgatgtaataacacatctccctctgtcttgtagtctaaacccagaaagggcaaagccaagacatttatgtctggttgcaacacttcctttcgctgtctcctttccttctctctcatcctattttcaaggacaagatatgtaggtttttctattaactctatatcatatctttttttttttgtgactgaagattagccttaaggacagacttggccttgatatgctaaatggagcatg

SEQ ID NO: 194888 - DNA, 541 bp, Homo sapiens
agtcttgccaatgctacattaacccatagaccatgagtattggttctataacaatcttattttctctgcaagctgtgtaagaactaaggccaacatgtctaacagcctcggctaacagactaaaaagacagatacgcctctagagtccatagacggaacagaggggccaagtctccctgatttgctctgtgcagaaggaaacgttcacggggaaatctccagcataggatgatccttcctggagttctgaactctcaaaaacgcaaatgggaaaagcaggcacagaggacgcactgagagaaggaactcccttccagctcacagtgtctctatgcagggaagatttgcctgcccagagggaagaaaatgatcaaactttcagaggtcttctaggctggtaattattgattacaatccaaattcagtgaataggtattttcacaggccatgtgaaggtgcagctctacgcagcgtaacagcttaaaatgagccttcctgttgctgccctatatttttgctctaaaaagttgtatttttctca

SEQ ID NO: 194889 - DNA, 345 bp, Homo sapiens
ggctgatggaggaacaggtttggagcatgctgaattgagattctagcagacttccctacaagtagagatgttaaagaggcaatggatatacaagtcaggagttcagaggagaaattcaggctagagataggagtcagtgatatacaggtagtatttgaaaccaggaactagatggatgagatcatcaaaagaatgcagatgattaaataaatgttaacagacagagagaaaaggggagataactgagccctggagctctcccaacatttggcggcttacaggttcaatcagccaaggagattgagaggtaaccagtgagatatgaggaaaaaaatggcatacgat

SEQ ID NO: 194890 - DNA, 248 bp, Homo sapiens
cagggataaccttacccaatacgctggggttactgtgaggattaaaaaagaaagactacagagcattgtgtttgactcacagcatgcacttcgtcaatcctgatccccccttccctgccccttagtgcccatgttaggcttgacttattggcacatgagttccacaaggtgccagatggcactttccatggtaaaggaatctataggtaaagaacaggctttgtctttctcctagtactgttaggatt

SEQ ID NO: 194891 - DNA, 490 bp, Homo sapiens
ccacctacagtccggttagtgcatctaaagtccaaataccactctacagtatgaaagtattaatctatctgttctactgtgaggagctgagtttcacaaatgagaaagagtgagcaagaagcagaaaccactttaatcagagtggttactgttctaacattccaaaactgaatttatctcacgtgtttgtgggactggtttcttttttaaaaggaatataaaaagcagttttctttttttcttttttgaggcagagtcttgctctgtcacctaggctggagtgcagtgatgcaatctcggctcacggcagcctctgcctcttgggttcaagtaattctcctgcctcagcgaagaatagcattatatagtacagtgatagaactcctgacctcaggtgatccgcccacctcggcctcccaaagtgctgggattacatgggtgagtcaccacgcctggcctattggtcctttttaataatatctgatgacca

SEQ ID NO: 194892 - DNA, 465 bp, Homo sapiens
cagggaggtcagataaactgcccaaaccaaatccaggcccagccagaatctcagctccagcctttgcgccttctgataaaacccagcatcgcttgaatttccagtacacgctgctcaagtcttcgttaagcaataaataaccacacaaccctacgtgtcatgccaagttccatatggccatccagaaagagacacatggagctggttcctctcacctttatgaccagtgaaaagcgcaccaacacgaagacacgcgtgaaaggacctcatctcctacccagactgacaagcaagggatttttttcactcaccgtcagtgggatggttctaagcaccgaggccaacccatttcacacgattatttcacaaaaagaaaccttctgtgggacgtgcctgggcgactgaaaagacagccagcaaaactgagaaccttgttctcaaatctataccctctcccaaggcagc

SEQ ID NO: 194893 - DNA, 275 bp, Homo sapiens
ggtgccttttctctgttgggatggcatgtgctcaggcccgggaggaggcctgctcatggcccgtggactacaggttacatggcaagtatgatcaatgccaccaggaatagcagcagctctctggaggctgaaagctattataggcacccatgatgctgggctctaatgacagcccagagaggaggctgcaacacgagcttgtcccctgagactcagagctttgccccctacaagaatctgtccttcatgaccagccagcatctggtacttgcccc

SEQ ID NO: 194894 - DNA, 319 bp, Homo sapiens
tgtattaaaagagttgccagcaaacttttcctctttagggccagattgtaatggttcagactctgagggccacatacagtctgtgctacataattgtctttatgttttgttgtgttttctttttacaactgtttgacccctgtaaaactgtagaaaatagtaagagtagatggcgggagcatctaggaagctatcagagtagtctaaggaggacctgatatggcttgggagagaatggccataatgagaaagaagagacttgccataagattttagagttgaattgacaaagcttgcttctagataggaggagaggagg

SEQ ID NO: 194895 - DNA, 314 bp, Homo sapiens
gacgcacattaatcactactatttaatcctaccctgtctaattagtctatataatctgataaaaaaaattagaggtataaaaatccaaaggaagaggtaaacttatcactagttgcaggtgatgattataacctagaaaccccaataaaatcgcttgaaaaaataccacaaacaataatggaattcaataacacagaaagagagaaagtatacagaaatcaaaagcctgaatatatataagcaattaccagttagtatctataaacccatttaatagcaacaaaaaggagaaaatatcctggaataacaagaaa

SEQ ID NO: 194896 - DNA, 429 bp, Homo sapiens
atagtaggttcagcatgcactgaggatgagataaagcatggtgtactgggcactgctggagtaaatggtgttggtagcaatgaggtagaaattaagctgtaaggttagcagaggccaggacatgaaggatcttatcctcctatgaaagggttgagactttatcccacaagttttgtggagttgcttaaggagataacaacatggctagacatgcaataagttgaagataaatccgattagttcactaggccaatggaaacctggaaacctgagatcttttaggggcttcgccaagtcaaaattattttcataataatgttgccctttccacactcattccctcaagggtacagtggagtttcctagacatatatgacgtgataaaatcattgctctgatgactaatggaacatgatattgtgttttaga

SEQ ID NO: 194897 - DNA, 598 bp, Homo sapiens
attgttattccttaccatttcctatgctcagtgttttcatgtacagttgactgttggataacacacattgtataacccattaacatttcaaacatcatgcttcaaactcagtttatcctctttgaaaactctccaccgagcagttaatccaatctcccatatttgtattcattactgcacatttctctcaaagttcaatctctctttgctatataatttctctctaggcatatcacagtacctgataaactcaataaatatttgtcaagataaattgaaaatcataactatgtccattgttactcgtgtaatatgaattcataaatgtgactgtaaaagctaatcttcatttgcatataaagtttgttctctacagatacagccttcatgtaagtgactacaaagatttgcttttagccttagctcagatcattcaacttagagtttgtgttagaaaaacagttttctttttcctgaggctacgtgttaatttggaatattacctctccacagtgtctcatattacccagaaaagatgactgttttctcttttttttcttgtgaagcctgtcttaaaggtggactttgatgccacagc

SEQ ID NO: 194898 - DNA, 393 bp, Homo sapiens
ctttctcctctttatcaagatcatacacacccacaaatagacaagtttaattatgctcattgatacctctctactacaaggggcaagaaagaggaagaacgaacaagggtagatttgtctcgggaaaaaatggttcagttttttgtgtgtgtctcaatggttcgaaatcccagtggtgtttggctgtgtccaatggttcaattctcatctcctcttttcccagaatgatttatgtcttctctgaactctttttatgtttgtacttaactttcatgtgaataagatgcttatctatttcgtgtgtgtgtgtgtgtgtgtttctgagtaagtattgactgggaaaaagagagaagtcaatcaaaagtatactgtgcaattgagagaggctggccc

SEQ ID NO: 194899 - DNA, 190 bp, Homo sapiens
tttatgtcttgcaggaaacattctttacaatgaaaaaaaaaaggatcatactcttttaagccattttttgtcacttgctaagaagttatactgagaatgttaagaacttgaaaaatgttttagaacagataataaactttgtgttttggaaatcctgctaaagtatcgtgttttgagagcttaattttta

SEQ ID NO: 194900 - DNA, 364 bp, Homo sapiens
gggcaaatgtctgtgagtttggagatttgcaatcatttctgtaacactcagaggtgctaataaaactaactcagggacctcctaaacatgttacttttaaggtatgttcaagatgtttttaggtatttccagatatttcctcctcctacctccattctggactacagaaaataaacatgaaagtacaatttcaaagcaaaatgggatcaacagagtgaatataagtaattcaaaaccaaacaatgaattacttggagttcggtttgttcaaaccatgagaatgaacataggctggcagttttcgactttgcttggcatgattctgcaagctgacaaattaccttcatttttatttgatttgact

SEQ ID NO: 194901 - DNA, 414 bp, Homo sapiens
cccaaagtgctgtacttgccctccttgaacctagttcagggtgtgatctagcaccacaccacatggaaccagtttaagaataaaaataagtatgtatttcttgagtacctgctgtgcagcaggtgctccacaaacattatctgattggaatttcattggaattacacagtaactctgaaaggcaggtaacattgtcaccattttacagatgggaaaaactaatgttcaggaagattaagcagtggcttaggataacaaagctttttacaggataatgctcaactataagtaggctgttgagtctcagttacttaacctgtcatctgtaaaatggggatgaataatatttgttctgctaacctctcgtggttgttatgagaaactgttacaaaaatagatgtgttgcagaagcga

SEQ ID NO: 194902 - DNA, 486 bp, Homo sapiens
agccccattaaaaataaaataggcaaaggatttcaacagacatttccccaaagaagatatatggatggtaataagcacatgagaagatgtcagcatcattagggaagttcaaattaaaaccaccatgtgataccactacatgtattttagaattgctaaaattaagaagactgaccatatggggtgaggatatggaggaaatgaaattctcatacaatgctattggtaatgtaaaatcaaactaccactttggaaaacagattaaagtttcgtgaaaagttaaacatgcacctaccacatgtcccagcctctcagttctaccagaaaagaaagcagatatccatacagagatttgtacaccaatgttcatggtacatttattggtaaatagccccaaactggagacaactcaaaagttcatcaacagatgaatggataaacaaattgtgatatatccatacaatggactattactcagtaaaaaag

SEQ ID NO: 194903 - DNA, 204 bp, Homo sapiens
cttaaagaagagaccaatgaataaatgagaaagaaatggaggcaagagtcagcaaggtagatgttatctagtttcaaagcagccttccagttccagattccagggttttatgaagcaatgatcttcttacattaagtcagtgacagacacccctgccctgtcaatgccatataataatcatttttcttttgtgtaagctacttt

SEQ ID NO: 194904 - DNA, 455 bp, Homo sapiens
tataggcatgagccattacgcctggctaattttgaatttttaatagagatgaggttttgccgtgttgttcaggttggtcttgaactcctgacctcaggtgatccgcctgcctcagcctcccaaagtgctgggattacaggcatgagccactgtgcccagctgattttttataaatgttaaatcaacactatattcctgatgtaaacctaacttggtcttgatatttttacccttttcaaatattgctagctttaggttgctaatattttacttatgttttcacatatttataagtgagattacctgtaattttcccttttcttactgtccttgttaggttttagtatcaaggttgtgtgaatttcataaagcaaagtaatgtattttttctgttccctcaatgagtttgcatacaactggaattaattcttccttgaatattggttagaatttgc

SEQ ID NO: 194905 - DNA, 393 bp, Homo sapiens
gcggaggttgcagtgagctgagatcgcaccattgcactccagcctgggtaacaagagtgaaactccatctcgaaaaaaaaaattgtctcattacataggcaagctttactacagtccctcgactaaatagctgagttcgaatataattcatacctgaaatggtgcatttgcagtgggaggaggttaggaacatggagagagtgtcgtatttcttcaagtatatggacagaacattcctcacgtgattctcaaacgtggtcccagaactgcagcctcagcagctcctgggaacttgtgaaaatttgaaatttttgagctccaacccagcccagacctattgaatcagaaactccaggaaagaggcttacaagtgtgttttaagaagccctctac

SEQ ID NO: 194906 - DNA, 411 bp, Homo sapiens
ttcccacgtgaagtttccgtaactagatggggggataaggcttgggcagaattcccagccatatctgtaaacagcaaggagagctcctccccctcccttctgctcccctggaatcttgcccttctataatagcatgcaggacatcgtgcagtagtggtttttctgtgtgcgaatctctcattagactgggagctttctgaaggcaagggcaggggttatttgttgttcatttttatatccctgatgtttagcacagtgcctaggacagcaatcaagagatgatggttattccatttgttcatccattcattcaacaaaatcatgtggaggttcagagcagggagagataggctttgagagaatatgtgaggccttctttcagaagtagccagtgccagtagcacttgctct

SEQ ID NO: 194907 - DNA, 302 bp, Homo sapiens
ctgtctcagtttcctaactagttgggactataggcatgggccaccgcacccccttaatttttttattttttgtagagacagggtcttgctctgttgctcaggctaatctcaaacacctagtcttgaactcccggtctgtaactcctgacctcaagtgatcctcccacctcagcctcccaaagtgctaggattacaggcatgagccaccgcctcctcactttggtctttatctccatttgcctaacagatctttccactaggccatcaccacagattcaccagctccattcccctacaccaca

SEQ ID NO: 194908 - DNA, 604 bp, Homo sapiens
aagaattcaaagggatgtacgttcaaagtgagtcactgaagcactatttgttatagcagatgactagaaacaggtatccattgagaaggaattggcttaatggattaaggtacgtcctacagtggagtagtacacagctgtaaaaaaggaatgagaaaatagactgctgtagagggatctccagataacactgttaagagaaaaaagcagaagatatatatagactaaaaaggagggaaagatgaagcatacctgcaattaattctgtttcaaaaagacacattcaaaagataaaacgttaataagaacatagttacctatagaaggaggtaaagaacaggtgaaggcaataggactggaaatgaggaatgaaccttgatagattgatggcataaccaaacaaaatctgtttcatatgactttaatgactttctaggcctcctgatacaacataaaggcaaaagagccacagagacatcttaaattgcattcagtaagcttattaataagatttgatacatattttgaaattattatatatgtagtacagggtaaagaaaataataaatcatgttataatatttaggaataaggattccagcaa

SEQ ID NO: 194909 - DNA, 413 bp, Homo sapiens
ttggggaatggggagcatattttaacatttctgaatttgccatgggagtgtcagggtacctcttactgatttctttagtagattgtgggattaattgttcattccatcttatttctgtcacaaatccaggaactgtatgctaagtgccccattcactcaaactggatacactttacacaagtacatttggtgattacctaataagagacaaacttcaggtccttgtggagtgtcttagtccattaagtgttgccataaaggaatacctgaggctgggtaatttacagacaataggtttatttggctctcagttctgcagactgtataagaagcatagtgccagcatctgcttctggggagggcctcaagaagcttccaatcatggcagatggtgaagggggaacagatgtgtg

SEQ ID NO: 194910 - DNA, 321 bp, Homo sapiens
cagagcaagactctgtctccgaaaaaaaaaaacaacaaaaaaaacctcatttaatatacattaacactgaactacgtatcagtcgctagcactgtaacgcatgcctgaatgaaacttatctaacacatgtatttcctccataaggcacatcacagccttcttgcacttagaacacaagatagcactttgtactacacttgggagtcaattttaaatagcaaaatcaccaacaaaaaggagaaaaatgcaaaaaatgtagttatactaactagaccgcaaagaggccaattgtttatactatgagagctgatgcaagaagac

SEQ ID NO: 194911 - DNA, 265 bp, Homo sapiens
tacactccccaaaagtgttttcccaggaaagccctatttttttttcagcgaggttaataggactaaatctccatggggaagggtcaagctctttgggaaagtgcatcataggaacccaccaagagttgacttcatcagcctttctcagctcttcttttgcctgccccaaagattacagaacaggagtgtttgttttctcagattcatttgtgataacttagtcattttaaggatgttcatgtgtccattgactttttttttcttt

SEQ ID NO: 194912 - DNA, 439 bp, Homo sapiens
agacctgtgtgcatgtgtatgcatatgcatgtgtgtgtgtgaactgtatataggtgaaatctaggaatgatccacttagtttcagcaaacatctatgctcaagggcctatgctgctcataagacttcacacctacttgccctcaataagttattgtcccatggaagaaaccaatgcagatgatataacaacaagcatggagggctactggcagggtgaggggaacatggccaatgaaccgttcctggaggtgacacctgaaatgataaactgttgtcattactaattttctgcctctgtctcctgccagactgcaaactctttgatggcaagaaacaagttctgtttaactttgtactcccatggggctgtttctacagtattggctgaattgatttatccctcacagccacatgcaatttggctcaaatcccaaggct

SEQ ID NO: 194913 - DNA, 458 bp, Homo sapiens
atgtccttccattagaaagaataacatcctcaggccctactcttcatttgtatcacaaagaacattttgcttttaaacaaactaattattgtatctattagagtaagatagggtcatcctaagtatcacaaggaggaaattctcttccttcaatatttgagtaacaccttttacaagtccacatcaccttttcaatcacctaatgctgtgccccagccagactggaaattgctttcctttgtccacttcagattcaaaggcctatattcctgtttgtgatcacggaaggttaaaaaaatcagacaagcatctgtgacacttcaaaacaaaaccctgaaaacattcactcccagtgatctccattgcgaccccttctcacacacttccatgggctcctgcaaaatagtgtcacgaaaactcacagtgaaaaatgactggtgcataaacaattcacacac

SEQ ID NO: 194914 - DNA, 415 bp, Homo sapiens
caaagaagggtgatcttcaaatgttaaagacaacaaagtcaactcaaaaaagctggtgctcagaaacttagcttactaagagggtgatcactgtatgctgggcacagtcctcactccctggagagttctcactctaccgtggatgttttgcacccttcctctctttttaactcaccatattcctgtgagttcacatgataactgtatgagtttcctcttgctgctgtaacaagtggccacaaactgagtggcttaaaacaacacgccttgtaatcccagcaatttgggaggctgaggcaggcagatcacaaggtcaggagttcaagaccagcctggccaacatggtgaaaccctgtctctactaaaaacacaaaaaatagccaggtgtggtggcaagcacctgtaatcccagcta

SEQ ID NO: 194915 - DNA, 510 bp, Homo sapiens
ctgaattcagaggagcaacagacaatacaacattagttgaagatttcaataccccaatatcagaaattctttaaacaaccagaggtacaatacatatggaaaaacatacagaaatgtacagcttagtacactgttgcaaaatatacattcacaaaactactatacaaattaagatagagaacactgccagaacctcagaagcttccagtgtactcctttctaaattctctcaccccgacatccctagccaaacaacttttcttcataacttgaaggagctaaataattgaggttgtcatacttctataacactgtggaatgtatgcttgcaacctttagaaaaccaagtatctaaaaatgatttttaaagagctcttctaagttctattctagacctgaaatattttatggtctatgctcaccgaattctgacttactagctatagttaacagttccggattgcttttacctgctaatcatttaatccttatgatcccactttacgccaa

SEQ ID NO: 194916 - DNA, 342 bp, Homo sapiens
cttcagagtaaaaaaatgaaaatcactttcccaccagaatcaaaaaagcttttctaccactctaaacagattattgtttatttgcataggtcattatttatattactttaactagactttatgagttcacttaactatcttttcagagcacaaaactgaatgtttacatttcaaaaacttcaaattccatttctctgatctacccaaaattattagctttttcatttacaagctgtagtacaattcttagggtttttatttgcttttttttttttttttttttttggaaaaggattccccgcctggccccccgggggagaggtgcaagggggaacccgacct

SEQ ID NO: 194917 - DNA, 390 bp, Homo sapiens
cctttggacaagcgctgacacttcttttgcctattcttctttgacactttattcattcaggttccaaacaatcttgcctttaatatgctctacagatgacatttcaactggcaacatccttcctcagatattttgtttttataaaggcaggatgtggcttcttcattctgacctttgggcacttattattatgaaaatacataagtgaattataaaaatccatttattgactcacatgttggttcaccatataaaatcagcaaaaatgtcaccacaacttctacataccacaccccaaaaggagaaacttcacgtactaccatactattaagtagcctcagagatctctacccactgttttaatgctgagttccacaatgaggtcatgtg

SEQ ID NO: 194918 - DNA, 244 bp, Homo sapiens
agaccctgtctctacaaaaattacaaaaaaattagctgggtgtgatagtgtatacctgtggtcccagctattcgggagcctgggaggttgaggctacagtgagccaggttcctgcgatccagcctgagttactgagtgagaccctgtccacatccccacaagaggtaaacttatgttcatcaaaagacatgtacaaggatgttcatagctgctttatctacaataaccattcactgcaaacaac

SEQ ID NO: 194919 - DNA, 474 bp, Homo sapiens
caaaaaggggaaaaattagccaggcatggtggctcacacctggggtcccagctgcttgggaggctgaggtgggaggatcccttgagcccaggaggttgaggctgcagtgagatctgatggcgccactgcactccagcctgggtgacagagcgagaccctgtctcaaaagaaaaaaaaaatctgtcggtagcaaaaagtaacagtctcacgctgttactggctgttactagcagtgtcgcaggaaagcgacagacttactttatttgtgaagaaatgtctgcatgtacccgagtctgaataaccacgatttctttttcagggattttcacaaaaaaagaaaatggtgttccattttttagtcgcttattttttaattttagagacagcgtgtagtcactttaaagtgaccagctaatcacttattcagccgcagtgttctagcgttttcctcatccccaccaacatttgatcatt

SEQ ID NO: 194920 - DNA, 509 bp, Homo sapiens
agatatgctattggttggtgatgaaagaaggagcttgcaccagaatataaattatttctgtcagctgattttattgttgttattgtgtccccgtaacaagatttttctaaaaatttatctttgcctgaacatccccaaaacactgtgataaagaaagtaaaaatggcattctgggtagcactactctaaggtttctccaagaagagaaattaaaaaaaaaaaaaatgccaggcacggtggctcacacctgtaatcccagcagtttgggaggccaaggtgggtggatcatgagatcaggagttcaagaccagcctggccaatatgatgaaaccccatctctactaaaaatacaaaaattagctgggtgtggtggcagctgcctataatcccagctactcaggaggctgaagcagagaattgcttgaacctgggaggcggaggttgcagtaagctgagattgcaccactacactacagcctgggcgacagagcaagactccatctcagaaa

SEQ ID NO: 194921 - DNA, 680 bp, Homo sapiens
ggatcagtgatttgcttagttctaacatgtagctgggacaatttatagaactgattccatgaaatgatctcttcaaaatcatgggtggtcaggaaatggacacatgaaatcacaaaatacattgttacagttaagtcacaactgtggtgtagagagaaactcctttcctcaaagtccttagaaaattccattgcatactttttggaatgttttagccaagttaaggctaaggctaagagatgtagaaagggaaatagaaaattgaagacagtggtatccttgtagttaagaagcagaaaatctcagagtaaaatttgtcatataccatttgcaaattaatatcagatgctctaaattcattttgtaaaactatttgttagcttatctataatttatttatttaaaaatacttcattgaaataaaacaaatgtgtgttggctttgcatttactattctcagaagtatgagaaggtcagttactggtatcagtgtttgttctcccttaggtgattctgtttatgcatatttgacttactatagaagttatcatttttgtaggtctaatgtcaatttgaattaaaatgattcatttgtctccatcagtgtttctgctatcattgatttctttctgtcagtattttaaacaatagcatcactctgtggaaagtgaaatgaatgt

SEQ ID NO: 194922 - DNA, 373 bp, Homo sapiens
gtattctgtaagtatataaatattatttgtatccatctgcaacttgctcttgttacactatattgagatggttttgagatgtatccatgttgatattttttgttgtagttcattagttttctgttgtacagtattctattatgttaatatacttcaatttaattatctcgtcctgtcaatagacacttaagggtttcttttttagtttttcactgtttaaaacaagactgcaatgagtattatgtttttgttcttatacataagagcttctctaagtatatatctagagtagaccttctactttctagatataagcaatttgctcttcaaagtagttgttatccgttcatactaccagcagagttcctactgc

SEQ ID NO: 194923 - DNA, 728 bp, Homo sapiens
tttgagcagggaatttggaaaacattagttgagacaatgagatatatactgcagagaaatctaaagaaatcacgtttgcagaaatatcttcacagaaattggtggcctcttcagattttcaatagacaacaatatattaggtttgagcaaaagtaattccgtttttgacatttctttgaacggtaaaaagcaaaaccgcaattatttttgcaccagccgatactagtagttactgtcggatatattgctgcatgttattgtcagtgaaaagtaatgtcttctattgttctaacgtcagccagtagataatgattactgataactagtggagcaactaggtaatagctggcaaagagctgacttttagagtactgagatctttgttgggaaaatgaattttaggaggtgtccacatgatgggaacttactcaagttgggttggagaattgaggaattgagtgtgtgtcttacatgatagatgttaatgaaggtgaaaggaggaggagtgtttgtttagtggggagaggggcagatacaggagttttttgctggtttggaaaatgttaggtcaatttggacctgggaaataggttgggtatgacctggtggaataacaacttagaaaaatggtattaatatcttctaagaagtcattctgaagattcattatcataaggtttagatttttattttaaatggtaacagcgatacttcattgactatgttaa

SEQ ID NO: 194924 - DNA, 343 bp, Homo sapiens
aaggggcttgacagattatgctgtaggctttgaaagcttttgaaaacctgagggagtctttttttaagtgattactttgaaagagctcatttgcatatataaaacctggatttggggagcccttaagggtccctttaagtgtcattttacatcataactgctaatttactacaataagtgaccctaggctaatttaaacgtagattgaaagattgaataaaatatattttaatttgctaggaatcttagccttaagggtagttagtgtattttaccctctctgtgggatgctgggctgttaaaccaacaaggtgtggtccactttcacaagcatattaacatt

SEQ ID NO: 194925 - DNA, 781 bp, Homo sapiens
tcaccatgtacagtctgtgtttctgtgtgtaagttttgataaattttaactttttttttttggagagggagttttgctttgtcacccagggtggagtacagtggtgcgatctcggctcactgcaacctctgcctcccgggttcaagcgattctcccgtttcagcctggatttgtgtattttatggtagtaaatcataaaagactagtatctacatatattttatgcattcatgacatacctttttaattttttccatatttctaggctatgtggttcatctgcaagttttttcaaattgttgcaaatctccaaaaaaattttcaagtgaactcgtgcagttcaaacttgtgctgtgcaagagtcaactgtatttgcttattttctcaaaaaggaatgcctaaaggataatcaagaaactaatgaaactgccagatgtggtggtgcacacctgtagtcctagctactcaggaggctgaggtaagaggatagcttgagcccaggagtttgaggccatcctgggcagtgtatcaagaccccatctctaaaaagaaatacgaatttttttttagagaagttaatgaaattgatcacatggccatgctcagtggctgacacctgtaatcccagcactttgggaggccgaggtgggaggatcatttgaggtcaggagttcgagaccagcttggtcaacatggtgaaaccccatccctactaaaaatacaaaaaatagctgggcgtgttggtttgtgcctgtaatcccagctactcgggagggtgagg

SEQ ID NO: 194926 - DNA, 435 bp, Homo sapiens
aggatcctcagtcggttctaccatgctgaccaggccggtctctgcctcccgggttcaagcgattctcccgtttcagcctggatttgtgtattttatggtagtaaatcataaaagactagtatctacatatattttatgcattcatgacatacctttttaattttttccatatttctaggctatgtggttcatctgcaagttttttcaaattgttgcaaatctccaaaaaaattttcaagtgaactcgtgcagttcaaacttgtgctgtgcaagagtcaactgtatttgcttattttctcaaaaaggaatgcctaaaggataatcaagaaactaatgaaactgccagatgtggtggtgcacacctgagtagctggtatacaggcatgcgccacatggccttgataattttttttttaatggtagaacagactggta

SEQ ID NO: 194927 - DNA, 439 bp, Homo sapiens
ccaatcccagaggagtcaataccaacggctagccagcctggatagccaaggaaggggaagagcaacccagtctcaatgccacccacttactccactgcacacagagactctgtggtgggcccagctgggagaggggagaaaatgtaagttcaatcaagtttagagttttgggttacaatttgaaatggacattctaatttctggatagagtctgagatgatggtttagcatgaatgcaaaggtctctattgcctaacagtacccagaaaagtcataagatgttctttataaataaagtttaaagggacagtttgaaagcaaataaaatgtgttttacactttgggagaccaaggtgggcggatcacctgaggtcaggagttcaagaccagcctagccaacatggtgaaactccatctctactaaaaataaaaaaaaaat

SEQ ID NO: 194928 - DNA, 196 bp, Homo sapiens
gcggtgactggtccttgcgcagagtggtccttgcacagaggtagccaatggaccctcgaggctgtaccccagacaccgcgaaccgaatttgctaacatcttcagccaccgtggcctccgcgtgttttgtgggcccatcggtgttcagtgagggattccgtgtgtctggcaatgtgtgtcaacaggtgttggcctga

SEQ ID NO: 194929 - DNA, 361 bp, Homo sapiens
agtatctttatgctgctaactctcaaatatgcatatgccacctcggtctcagtttagaactctggatttgtaccagcataatgtgttgggtatttcatgatcacatagtaagcttgaaattaaacacattcagttgccccctcagtcctctctaaacatgcatctatatctgtgttttctatctctggcaatactctagccaaaaatctggacacctttaactcctctctttccctcacctcccacttccagtaagtcgcagaatagaccgtcaattctgcaatctccgcaatctctctgaaatccctccagttctctctacctcgccctgccactcttccttcaggacaccattatctct

SEQ ID NO: 194930 - DNA, 286 bp, Homo sapiens
tgacttggttaatgactctattttctgaaatctgagaagccagtcctgggccctatgggtcatggctgcagaaggaaacacagtccccactcttgaggaattcatctgcttttgggagaggcaggatatattcaagagaactaaaaaagttggaaaagtaaccaataacccaaactgtatccctagtttctgatctttgtgagtacaaagttatattctttctttacagcaacacacacacacacacacacacacacacacacaccccagggcacagcacacaggg

SEQ ID NO: 194931 - DNA, 500 bp, Homo sapiens
atcatgtacctcatgcttcactgtctctgcacctgggaggcactcttgttatcccatttttaaaaatttacaagtccccattatgcctcagaaaatcttgttttcccattttacaggtgaggaaacaggtgcagagaggccaggtgcttgccagggtggcactaggcagggataaagcgggccagcggctccagagtctatgctctctccacctaaagttaagaaaacagttacagagaagtaagaggcagtgttaatatcagatgaactggaatgaatgggccaaaatcgtatttaaaatgcatgctaatacagtctgtaaagactgtcacagttatgaagccttgctttcccaagtaacatgctcactatgcgtaaaccagaagcagctgggcagagtaccaggagcacagtgacaagctcctgtctgtgacagatcattgactaaagatcatgtgattaaaaggtgacatggaatagaggcatcgcatctcagaatc

SEQ ID NO: 194932 - DNA, 571 bp, Homo sapiens
aattaaacatacatacgcatcactaaaaacaggaaaactgcttcgctcttgtctgatcaaaataattctaactatattggtggtttaacagcagagcatgacataaagtttatcacctacggtgtgtgtttttaccttgggcaagtgattaaatgtgtcctctgataaaaaatatggttaagaacatatactccagaaggtgttttaaggaatagattaaaacatgtatattaaagcactttgtgggtgctatataaccattttaatgattactatcctttgtacaagagattcttgggtagttaacaagattagaagtgaaaatgactgaaacagtaatagtaaataatttctcatatatctgacatcttcagttatgcttcaaataatttacaaggtttgtgatttatcccctaaaaaaattatttagcagtaaaaaattagatgtctgaacatttcacatggataccataaggccaaggatcaataaatctaatgaaatactcacaccaggaaacgcagtttttcactttgtattattttgttgctcatagtcacagttgaaacatac

SEQ ID NO: 194933 - DNA, 272 bp, Homo sapiens
cactctgcagcaacaggagcactctgggcttgagaacccttggtatcctttcatcttcttttaagaaaatgctgagaaaacaggcaaacttccctgggaatgatgggcgggcccagacatattccagatgggcatgattttggttcatgttgcaacaggctggacagcttgccgttgttcacaggtcatccgctagacaacagagcagcttatcttcgcgaagttgaaggcacaggaaggcttatggcctgacccttcacctacagatttga

SEQ ID NO: 194934 - DNA, 195 bp, Homo sapiens
gattaataacttgttgcatgtggtttttgtagagtgacagtgtaagaagccagactgtgcattacaaggagtgactgagaactgaggacatgaagatggtgcaagcatttttctaagctgtctgaaagggaaggaaagaagggaagtaagacaggcccttgagagaggtgaatagctgcggagcacttaaataca

SEQ ID NO: 194935 - DNA, 492 bp, Homo sapiens
attcagcagaaagtggctgcttgcatagtatgaggagactttataccaaaacaaagatgaaggtcatctaaagaaaagaatacagtggtagaagtggaaaagcttattgatacatacaatcctagataagagtccaatatggcccaagaggaggtaaaataattagtctcctctactcagctctgcagtgctgtagactcttccaacttcaggtttattactgtcgaaaagagaagcagaggctacctaagtgggccagaacacctaccacataatgagttaggctgtaaaaatggtattatcactaaaaatttgacatctacgaagtttttatgtgttctctattcataacatttttagggcataaggatagacaaatgtctttctagagattacctgggataaacactagtgtggcaggattagcaaatgctcatattccagggcatcatgcttccaccccatttaaataatctgattgtttcattactc

SEQ ID NO: 194936 - DNA, 433 bp, Homo sapiens
agcctgggtgacatagccaggccctgtctctacaaaaaaaaaaaagttaaattagtgaggtgtggcggcacacgctacagtcctagctacatgggaggctgaagtgggaggattccctaaccccaggagtttgagactgcagtgagctgtgattgcaccgccgcacttcagcctgggcagcacagcaagaggccatctctaaaaaaataaatttaaaaaaagaatgtgttgtacacggacaagttactgcatgctagagatacagtgatgaacagaactgttactctcattgctaaaacatgactgatttcaggcaaggtgcagtggctcacacctgtcatgccaacactttgggagaccaggtagggaggatcacttgagcccaggagtttgcaaccagcctggacaatatggtgagaccttgtctctacga

SEQ ID NO: 194937 - DNA, 608 bp, Homo sapiens
cagcactaggcaaattattgaggcagaaaatcaacaaagaaacacaagaaaatggccttggcaaaaaattcctgactaagacctcaaaagcacaggcaatgaaggcaaaaatatacaaatgggacttaagtaaaaaacttctgcatggccatggaaagaatcgatagcgtgaacagagaatcttcagaatgggacaaaatatttgcaaagtatgtatgtggcaaagggctaatatctgaaatttagaaggaactcaaacatctcagtcataatgagaaaaactcaaataaccctattaaaagtggtcaagtaatatgaagagataatttttaaaaacgacatataaatggccaaaaagcatatgcaaaaatgctcaacattactaatcatgagaaaaatgtgaattaaaaccacaatgagataccattttataccagtaaaaatggctattaataaaaagtcaaataataacagatgttggcaaagatgcagagaaaagggaacacttacacactgttggtgggaatgcaaataagtacaatctttatggcaatcagtatgcagctttctcaaagagctaaaaatatatctaccatttgatgcagcaa

SEQ ID NO: 194938 - DNA, 498 bp, Homo sapiens
ggtcccatcaccccacccctgtataagccacaggaagcttcctgaagctgtcaaagggcgctcaaatgagtgtcccacttctatggagccaagggctgaagaggccatgctagaagccgctgtcccatcaaggccccaggcctgtaccacagccaggtccctcctgctagcagtttggcaagaagggtccttggcagaggccccaactctggattaatattacaccaagagaacccaaacaaatggctcctgactttcacgctccataaagttctgaggcttaaaataaagatgagtttggaggggagggggtgtcaacaatagtcagcatagcagagccacaggatgaaacactgtacagccacttaaaagagtgtttaaaaccacaccgttccattaaaaattctcattatgtagtgttacaccaaaaagctagattcaaaggtatgtaaatcagtaagatcacaactagtttttaaaacttgtgcacattaaaaa

SEQ ID NO: 194939 - DNA, 359 bp, Homo sapiens
gattccaagctttctagccagttattatcctatctacctaaccatcactacctacctcctctaggccaatggccaaacaatgcatcaaataggtcctagaggaataactacccacattaccactaaggaactcaactataacagctctgcctgttatgttctccctgatacggatcttctactcagagtaccccatttacaacaactatagattccatgcgccactccttaacaaacctcagtaccactgactcctcagtaggccactagtctccaaaagagttatgagctacataagaacatggttctcaagcctgtttccttcctagcacacctaagggttacaacatgtaacttct

SEQ ID NO: 194940 - DNA, 251 bp, Homo sapiens
aggtggtggcgccaaggtcgtctagctatttatcttagttctgcttctttccaactttttgctttctcccttttctcctgtcttataaaccaggcaaaaggggaggttggggagaagctgggaaggacaacaggagaagtggtggcctcattccatactaatatttgattaaataacccattctatgtaattttagccaatttaaatggcaaataataaatgatcaattatatacatacataaaacttcct

SEQ ID NO: 194941 - DNA, 539 bp, Homo sapiens
agaagagggttgtgtgttcaactcattcaattctgtaagcattgctgaagcaggtgctgtatgccagaccctagatgggctacaagcacatacggatacataggaaagagcccctaccctcagcaagctcactgtcagtaaaggagacagaaatacatcaatcaaaggaggaagagaagatgaggaattcacagaaaggataatggagtttctgtacaagatttaccagaaagagagtggtgtgtagacatgcctggagcagacaccttggagccgctgacagaaggtgaagcagtccaagaaaatgtggaaacttttccgctgctctacacagtccacaaacctgtccattttatttcgttgaagctttgtctgagagataaccaaatagacagtcaaagtaagttatctcagccacatatggggagtggatgctgctgaattgtgattaattgggggagccatataggtacatttggcatgatctgggcctatgcggtcttacaatccctgtataaaactagacaatgaaaaacaga

SEQ ID NO: 194942 - DNA, 413 bp, Homo sapiens
tgttgacagacttcagtctttgttcctcccatatgacttcagttagtgaaaaatcagggaggggatcataggtaattgtttttttctttggcgagtctggactttagccagatgagggaacttctgggaacaacttcattctgtgcttggagagagacagggaattgagagacaggagtggggagaaggtcaaagggactttgaagatccttcagttgagtatgtcaaaacaccgtatttcaggcgatcagtttctgagcccgaacattgcacaacctggacccctctgtgcttgattttaagaaaaataaaaatgagtccttgcaccctggctccctaaccagaaaaatgcaccttcaaccttgctcagctcttgactcctggcaagttgcacttcctcctgtgctcagggg

SEQ ID NO: 194943 - DNA, 385 bp, Homo sapiens
tcccctcaggcaacaggtctctcaaatcacctcagatagaagtttttaaatgacctttaaagagagagcatctttctaatatttaacaatcctgatatttaagtaaataaaaaataaaatctcctttatatctaatctgaatcgcttaaggtacaatggtacaataacattcaggttttgttttatttcatatcatgtcactaatttttgaaatgatatatctgatggcgatggtggtgaaagtaaaactgcatatgtatatagacaaacagcattaactaagcttcccacacaaactgctgttacataaaacctgtaggaagtaattctaaaagaaactttgtatcatagaaatatttacatttagtggtagaagtgaaatctg

SEQ ID NO: 194944 - DNA, 633 bp, Homo sapiens
ttagccctcagcaattcaagtcctcattaagcactcacagatgagagtgttttttagacaaaattgcaacattctgcctaatttaaatttgctagaatttgatttattctaaataatcttgcactatactaaaataagtgtgattcaaatacatttttagtaatgagtagttaagtaagacaaagcaagacatccttcacaatagagatacagagagatccccagtcaagactccaatgatattaagaagtgtttctcttttataagaatatattctaaattaaatgaagcatatatacacacatatggtgataaacatgcattatgaactcttcaaatattcacattaaggtcaagaaacaataaaacttaaaaaatgctaattcagttatgacaaaacaacaacaaaaaaagtttccaactgtcacagagatcaggaaagattctgacccagtggatttatattcctcgtccttcaatttccctagtatgattcttgattcttggacaagcccacctttagctcctaaaacatgatggttacaccacagtaatatgaaactcaactcctatctttacctaggactatggctaaaatataaaggatcacagaaagacaagaactgtttcaag

SEQ ID NO: 194945 - DNA, 289 bp, Homo sapiens
atccagaaaactttctcctcattgaaatgtttctgtgacaactgtcttcttcctttcctcctgtttctcttgaccagacctgagtcatttcgcctcctggatatctctgtcttgtaggcactcaagcccaatgttaatttttgtgtatgtgtatttttttttttttttttactttaagttctgggatacatgtgcagaatttgcaggtttgttacacaggtatacacgtgccatggtggtttgctgcatctatcaacctgtcatctaggttttaagccctgcatgcatt

SEQ ID NO: 194946 - DNA, 616 bp, Homo sapiens
tggggacagggtctcactctgtcacccaggctggagtgcagtggtgtgatcataactcactgcagccttgacctcctgggctcaaaagaccctcctgcctcagcccaggagtttgagaccagccttggtgacacagtgagaccctgtcaagaaaagaaaagaaaaaagaaacgaaaagagaagagagaaagaaagaaaagaaggaaggaaggaaggaagaaaggaaggaaggaaaaacaaaataaaaagaaaggaaagaaagaaaagaaagaaggaaaagaaggaaggaaggagagagagagagaaaggaaagaagggaaagaaaggaaatgaaggaaggaagggagggagggaaggaaattaattatatttttaaaaaaatccttgtagtcagaccaaatcagaatccagctcaggtgctacacagtttatgcctgaccccaagttcatgaatcacaggcagtcccacccagaagatgtagatatgtacagcacactagaaactgaagcagactgcaaaaagagactgcatagacaactatgagatgtgtgaagttgcaaataattattttaaaaatcatgtaatcaagatatgaacaccaatgagattaaaatc

SEQ ID NO: 194947 - DNA, 629 bp, Homo sapiens
aagtcagggcaaggtgaatgtacaaagatgaagacatgacagtaggcaaaagctatgagacagagaaaagacatacaggataatagtggagatacaaacagacacccaaatccaaggacaacagtggagttccagaggcaggatccataaacttttactgatgtggtctctagagctatcttggatccagaatgaaaatctggctccaatttttatgagacgtcactccaataagactcctgtttttccattttcatgaatattatttccaatctcatttcacacatatgctttcaataagctatctcaccccaacccaagctagcttgtctctggtctgtgcaatcaagaaagcatacctggccaggtgcagtggctcccgactgtaatcccagcactttgggaggccaagtcgggcagatcacctgaggtcaggagttcgagaccagcgtggacaacatggtgaaaccccatctctactaaaaatacaaaaattagctaggcgtggtggcatgcacctgtaatcccagctacccaggaggctgaggcaggagaatcactggaacccaggaggcagaggctttagcgtgcagagactgcgccactgcattccagcctaggtgacagag

SEQ ID NO: 194948 - DNA, 783 bp, Homo sapiens
tttatttagcaaatgtggttgtgatttttttccagtgcaggggaattcgttggccttgtcaatctcggtatcattatttttagtagtctttctgagactttagcctataaaacagttttgctgaaaccccaaactctctaaatattacatggcaaatttgctttcttttggaaacctcggtgctgatgggccagctgaagtgcaggtgagctttttcagggaagggtgggacaacagtacatcctggactctagactaatactactcctaagaggcaatttgctaaatcctactgatttattttttttcttttttctctttttcatgttgtagtgtccagtctacttcttactgggtattgcaaaaatgaattttcttgctctatcacccaggaacattgtgttttgggagctgggtctttcctctttaacataattccattccccattttgtagcaaatcagtctgctcctcctctaatacctaaaagtcaacaaatacctgcctcaagccccaggtttcccatcttctcccgaaggtcttctagcatcggtttggttagcaatttcctgccagagccacctacatcttgattattttggtcagtctttcggggatttcatttcagacccccttcgagaaacactgtagcccaactgatcccaggggttggtgaactttcagttttattttccctgacggtgttaacgcccaaacttttcacctcctaagtcaaaaaggactttgactctagctcatttcctactacctccaacgtcagtta

SEQ ID NO: 194949 - DNA, 400 bp, Homo sapiens
ctgctgaggctgctgacattatggagcagagaccgaccaccccgtgtgctccttctgaattcctgacccacagaatctgtgactccaagaaaacgtttctttggtcccactagatttggggagacttgttctgtagaagtggtaatggcaaccatgagttgaatgaatataggaaaagtagaatgaaaagtgtgcaaaggacagtgttgagtcggggagagtagagtgaaaagaagggagtgaaagagtcttggggacagatccatactgagttgctgtgctactgtgagtcctaacaacagcacccatcaagtaagagagttttaaatcagtggttttcaactgtgggttctaactcattaaaaggacgtgaaatcaatttagtgtgtcacaactggca

SEQ ID NO: 194950 - DNA, 388 bp, Homo sapiens
tcccctagataaccatgcacactactataaccaccctaactcctgacttccctaattccccccggccgtaccaccctcgttaaccctaacaccaaaaactcatacccccattttgtaaaatccattgtcgcatccacttgtttattacgtctattgtctagcccctccactattgaatctccagtgcctagaatgccaagcacatagtaggtgctcagtagatatttgcagaagagatcattcttttactgttccagatattttgatagcagttttctgttggagctgaaagcatcttgaaagcatgatggatttcccttgagttgccttggtgtcctatgccctgcattttcaagacagtcaaccatgtcttaaactcacagtcagt

SEQ ID NO: 194951 - DNA, 185 bp, Homo sapiens
tgctgtttactgatgatatgatgatatacctagaaaaccctaaagactccttaaaaaactcctagatctgattaatgaattcagtaaagttttagcatacaaaatcaaggtacacaaatcagtagcactgccatataccaacaacgaccaagctgagaatcaaatcaagaactcaacccctttta

SEQ ID NO: 194952 - DNA, 1217 bp, Homo sapiens
gccttagggctatgggagctggagcggagaggagagaagcaccttgcctttgctggtgtttttcccgcagcagatggagtctcgctctatcacccaggctggagtgcaatggcgcgatcttggctcaccgcaacctccatctcccaggttaaagcgattctcctgcctcagtctcctgagtagctgtgattacaggcgtgcgccatcacacccagctaatttttgtattttttagtagagatggggtttcaccatgttggcctaactcctgacctcgtgatctgcccatcttggcctccgaaagtactgggattacaggtgtgagccactgcacccggcccaaacatttctttttcttttcttttgagacagagtcttgctctgttgcccgtggctggagtgaaatggtgcgattatagttcactgcagcctcaaactcctggccttaagcgatcctcccatcctggcctcccaaagtgctgggattataggcatgagccgcagcaaccactcctcacatttcttgagcatctgtgatgtatcaagccagatgctgggcactgaggttgcagaaggcattgttcctgtcttctaggagccccaggctagcagggaagacggatgtgtatagagttaaccacaataccaggcctcaacttcccgtctgtaacacaggtggaccatgctagattgtcccagcctgccctgtgcttcattagccggtcaacagatccatctcaaatacctcccatgggtactcactgattgctttaacccaaaccatggcactcttgaagactttccctcaggaagctcaaggactatgcatccttctgggtcagaactggacacacagccaccagtgctggacaatggcggcggctcagggacacactggagccctggcccctgcagagctcccagcatgggtgggaagagagatgcaaatgaccacacgcgggtgaggagactccctcggtgcggctgggatgagccctagacactctcaatcacccccacgatgaccccttcccagaggtcccctcagtcatctgccctgaaccaagctcttcctgatcctagaccctccaccctccctctatcttccagggcttggtgacattccaggcagaaatttctgacccttttactttggtccctccctccccagcccagtctctggtcaaactggattcctggctgttcccagaacgagc

SEQ ID NO: 194953 - DNA, 619 bp, Homo sapiens
acaataactcacagccatccaaagaaataaagaaaactggtaaaggtaactagataagtaaatacaagagtcagtagtattgtatttttgatatggaacttcttttactttgaatatgatttaaaagacaacttaaacaataattatcaatccaagttaatgagcaccatattaattcattagggctgccttaacaaagtaccacagactgagtagcctgaacaactgaaacttatttcctcctatttctggaggctagaagtccaagatcaaggtgtcagcaggattagtttcttctgaggtctctcccagatgcctgccttcttgctgtgtcctcacatagtctttccaccgtatgcatgcatgtctgtgttccaatctactcttcttatataggtaaccgtcatgttggattaaggctcacccatatgatctcacttaaccttaataaccacttttaaggacctgtctccaaacacaatcaccttctgagatactgaggattaacacttcaacatatgaatttagggaggacacaattcagcccataaaaagcacacagtgggccgggtgcagtggctcacgcctataatcccagcactttgggaggctgaggtgg

SEQ ID NO: 194954 - DNA, 192 bp, Homo sapiens
aagtcgctcacaaactcaaagatccataaacatccattctaggcaaacaccatttcactaatctgcccactttgtttcatattgggtattctgctctatttcaaggtaattttttaaaatggcaaacaatttaataaatgttctattttagcaaaactgggagttttgtagctaagttgccatgtcaaaacg

SEQ ID NO: 194955 - DNA, 354 bp, Homo sapiens
tttagagagcataggacatctaaatggagacaacaaagattaaaggagttgtagatattgatggcatgataacactgatgacatcagataagcatgtattgggtggagagaacatcatgtggaaatgtccagagtaaaagcaatcatggcttgttggagtaacaaaaaaaatgtctcaatatggttgaagcatacagcaatttggataacagagcaggagatcagttgctgggccttgtaaactttgttaaggaatttaggtatcatcttcatagcagtgggaaaccattgcagggttttaggaagaggtaaggtgatcatatctgtattttagaaagatctccctggctatat

SEQ ID NO: 194956 - DNA, 380 bp, Homo sapiens
tattggtggtgctggcacttcagataagaatctgtcatgcagaggctccaggggcaatttgcacttggaaaatctcgcagactagtacttaggaaaactgataactgccgttttgaggtgtctgtgttttctgttacattccccggatactctcagggtaattgtagactccaagctcaggattactactcccaagtaatgtgaatcaagcattctgagtccatgaggtcaattcctgcagagacttgaactcacttcctcctccttgccacattgatgagcagttcctcggaatgggtgggaagactgacctactcttgagagagccccaggacatgctgtgtgtgtgcgcgttttgagtgaactgttccaagcgagtc

SEQ ID NO: 194957 - DNA, 510 bp, Homo sapiens
cccaaattctaataattagtcttttaatgtacttttatttggaggacaacatgtcacagaaaaaaaatttggtttaatagtgtaaatttatgtaacactgaagaaggtgttactttaagaaaatggatgaacttttgacagttgaattcattaagtgcatatttcttaaaccttggtaaaattgatcccacatttgtggctaaccttgtaagtattatggggaaggagaccctccaattcattttaaattgtgattatatagcatttgcataggcctgagatgttttccttaagttcgactattgtgtatatgatattctaatgtgttacttaaaatatgctttcaaacactgggtataatgaatttgaagtgaaacatattttaatgagtagtcttactaaaaataataaacatgtacttaaaggaaacttaaccattttcccatgtggcataatgtctttctgatgtcttagattattgagcctcaacaggcttgctctctgtgaagg

SEQ ID NO: 194958 - DNA, 305 bp, Homo sapiens
actgaaactgaacgccacacccactaaggccttatgaggaaggaagaaaaaagtaatgatggctttccatgacttcagcaaacatctctaactccgttagtatctgctgattctgttccctattcctaattgcctataaatgtatacacaactaccatattatagtgaatgcaacaagaattagttaagtactcacaagctgtcaacaacactacctttcttctactacctcacacctgacactcagggtttaaaaaaaaaagctactaaaaatacaaaaattagccaacgtggtggcacacgcc

SEQ ID NO: 194959 - DNA, 230 bp, Homo sapiens
ctgagctcggtacccgtcagacgctgaactatgtggaaaagttcgactgtacagcaaactagagaggacagcacaatgaacctcaaggtacccattgcccagcttcagcgattctctacatatggccaatcttgtttcatctgatgcccacccatttttgtcacaatctcacattatttgaaagcaaattccaggtgtatcatttcatgcacacatagttcagcgtctga

SEQ ID NO: 194960 - DNA, 318 bp, Homo sapiens
tgctgggtttacaggcgtgatccactgcgcttggcctgcattgtgtttttattctgaaggctggcttagcctgtgcatgttcaagtagagaacatggtctcttacagctcctgaatcacagtcctagggggaggggctgacaggaccagcttgggccaatcactgtatgggcaggaggtgcagccccatggaagaacatggttaccctgattgtaaccatgtggatggtagggaagagtcagttctcacaattagcaggagtgatgttatagctcttgcagcctccagcctggtgcaggcaaggtggaggagatgttc

SEQ ID NO: 194961 - DNA, 647 bp, Homo sapiens
tcctcactcatttctctcaatgtcctaaacataaattatacctgggagggttgatacaattaccaaatcctagctaaactctttcagattttggtttagtgaacctctgtaaatgtctggaaagcagcccctttaatatgctccacagctttccagtaagttcccccatatctaacattggagaataatgcattagataaccataaattcctttccataagagaaaaattactccaaaattttgtaattaactaaaatcaaacaaactttctgaaactaagttattgctttataaaaatagacaaatagaaaaagttaagtaatgagccataaagtaaaagaaaaatctttttgtgtgatttcaagataataacctctccctcaaaaaaacaaaagcaacaaaagaaaaaagtcatatatatgtacacacacccacaggttgagaggttttcttcatcttccctccccttttcaaacagagttttccttaccacataacatctagtgaatcaaaatctcacatctctgaattgctggaaagaaactggatgacagattaagaaggaaaaagtaccagtgcagtggcttgtgactgtagtcctagtgctttgggaggccctgagcctaggagttcaagaacagcctga

SEQ ID NO: 194962 - DNA, 273 bp, Homo sapiens
agccaggacatcccaagtgatctgagaatcccttctatacagggcccaagcagtcactcactaggacattgtctttcctagcctaatgtccctaaggtcttttccaactctgacattctttgaggggatgatccttttaaacttcttactagcaatcattaactaccaagttgcatggcaatgagctcagctggcttgaggctagtcagaccataagatcacatgtttcatccctgaggaaggctcttgctgtatttcctgaacttcagactc

SEQ ID NO: 194963 - DNA, 284 bp, Homo sapiens
gacatgaaatcgtgtaacacacctcctccccacggtcaaaaactaaaaacacggaagctaggaaaagacactggaatgaacctctagagatgaagatgacgctgtgtgagacgaaaatcacactgggtgggattcacagaagaacaggcattcagaagatctgtgaactcagagaaacggcatgtcaacaactcaaacatgagcaaaaacactgagtgtggcagggagcaccgagagagaagatcactggggcaaacaccgagtgtggccgtggggtaggaggt

SEQ ID NO: 194964 - DNA, 377 bp, Homo sapiens
taacattgtaccgctacactccagcctggggcgacagggcgagaccctgactttaaaaataaaaaggaatttctgataggaagagcaaaatactccgacaaaggtagatagatatgacaggtggttggtataaccaccccataagttacggatgcgtaattaaaggtcaaactggttacagtgtatccagttgaacccttagatgtttggtgttttccccttgactttgctcataatgtttcctgaggaggttggggctaacacatgctaacacacatgctttgttggattcacagagtgagttttgttgttttaaatacatagttttatcttaagttggagggtctggaaattcttggatggagaacagacagtga

SEQ ID NO: 194965 - DNA, 134 bp, Homo sapiens
tctggaaaatatgaggttattgggagcttatttttcaaaaaataaatgtttaagaaagtgttctgaccatgttagtactggtgggtcttttttgggcagaggactcagagttttgtattttcctgaccccgttt

SEQ ID NO: 194966 - DNA, 391 bp, Homo sapiens
ctggcatgcagacaaggccgcccctgcctgccgtggccttttggtggcctgggggctctgaagcaagaccctcggcctgtcgccctgctagaggcctgggcagggcagggggatctcggggaggacttgggctgggcagactcgggcctttgagagtagctgttccggggaggggattggctggggctggggatgcagtgggcagcaatagctgaggaggcctgggggctgaaagctaagagctctgggcccatcctggccgtcctgaggtggccccactgcctgcagaggtgctgggttcccggtcagcttgtggtggccttgggcactggtgggaccaggtggctgtgttgggccccacagcctggtgggagatgtttttgcttcagca

SEQ ID NO: 194967 - DNA, 576 bp, Homo sapiens
agcccaccgcttgtaaagccaagtccccgtctctttggggcctggagatcattggtgcctagggaagaaaggaggggctggttttcctagatctaggtctagttagttttttgcttttctagctttttaattatagaaaaggtcaaatatacgcaaaagtaaagagaagaaagaattcctgtgtagttattagctcagggccagtcttatgcgttgacagccctgactactcccccaccacagagagctctcaactgtggaggttttctcttttaacagctttactgagatgtaattacatgccgttctgttcacccacttccaggatacgattcagcaggttttcttctattcacagaggtggacatcccccgccacagtctatttcaaaaccttttatctcaccaaaaagaagcaccaccccttagccaccactggtcccccagccccaggcaaccgccaatccactttctgcctctgtgtatatgtctctcctggacatctcgtgtaaatgggtgataggcagaccctgtgaccggcttctttcactgtgttgtttttaatgcctggttgaac

SEQ ID NO: 194968 - DNA, 794 bp, Homo sapiens
actggactcaagagctcgctctgcctcctgccgtgcccacgcctgctcatctccagccacgctggcctccagcgacgcagctgtctctccacctcgccatgctgacgcccacccaggctgccggtgccctgttctgcggcctggggcagccaccccacagctttcagggctcctcctcaggtcctcagccaaatgtcgcctctccaagagatacatccccaaaccactcatctaaagtggacccttcccctctgcaagtcacatctccttgtttcgtctgcagcatggcacgcagggggaatgtatttagttgtttgccactcgtctctctctgtgtgaacataaatcccgtgacagagagaagcctgtctgccaggacaggcactcagtaactatttgtaggataaatgagtcccctaacacctatgtgaagagagatcacatggcagggcaacttccgagacggaggccaccagaagtagacagtagctcccaacttggggactaggtaatttgagggtgagggtgtgtgagtgaaggtgtaagggtgtgagagtgagggtgtgtgtgaggatgtgtgacagtgagggtgtaaggtgtgtgagcaagggtgtgtgagggtgtgagagagggtgaaaacgagggtgagggtgagggtgtgtcagtgaaggtgtgagggtgtgagaatgagggtgtgtgtaaggatgtgtgagagtgagaggctgtaagggtgtgctgagagtgagggtgtgtgagtgatgatgtgtgagagggtgtgagtgagggtgagggtg

SEQ ID NO: 194969 - DNA, 541 bp, Homo sapiens
ataactcttagaaatcttgatgctataactttaaaatattagctgctagaaatttggatgtcacaaaacaatttgggaaagatgcagccaaaactttctccttgacctctacaaacacacacactctcacaattcctttactgcctgttgaattttcacaatgaaagcattcttcctgagcggaaatgaaattaagcttttctgggtaatcccacacttttcctaatatgtactgacttcagacaaatacatgtttcacagagtaaatacagcccaagggcccagtttattgttggaatcttttatcatttccctggcattctccctttactcgtagggctacatattttctcacctcctttaattctgcacaaagccaggataatgtatgatttaggttagggtacaaacatgcaggaatagagtattgcaggctctggaaaacagccccacctaaaactgctcctcaaatcctactcgtcatctgttctctcctatggagcctgtcctgaatttcacacaagaaagctcaaggccatca

SEQ ID NO: 194970 - DNA, 158 bp, Homo sapiens
ctttttttcttaaaagtactttaaaaaggaaatttgtttgtattttttatttacattttatatttttgtacatatagttagggtcagccatttttaatgatctcggatgaccaaaccagccttcagagtgttctctgtcctacttctgactttacttg

SEQ ID NO: 194971 - DNA, 676 bp, Homo sapiens
agccagttcatctatagtaatgaggcatatggacataaatgcagataaagggggctctgttagggggtttgaggaagttctaatctggcagcttttgttttctccatgaacaagtagcaaattcatcacaggagagggagattgaaaggaggaagtcaagtagtgggcgagtgccagatgaatagactggacaagtagcatgtgatttctgaaaagcattaaggacctcctggcagttagggatcgcgaacttgaagtgaaatcagtaagcattgttgtacaattttctctagccatgctcagttgcatgtttgctggtgtggagcagaacagagggttggatttaaccaggattgagttttagccaatcatgtgtgatcaaagagggcaaaggactcattttaatgattttgaccatggaatttaagctgtgtaggaagggaagtaagaatatgaggaaagtgaggaacagtgacaggtggaaggattaaccacagaagcttgttggagttggggtactagttggaataggctgcatatagacaggagtggtaattggagatgggatgcctgaactcaagattatggaaggtattgttgggaaataacaagatcagagatacactctgggagtgagtggccgtggtcacaatcactggggtagaggagatcaaag

SEQ ID NO: 194972 - DNA, 297 bp, Homo sapiens
acattggtactctagtatcccctaaaggtgaatagtgacattcataaaaatgtgtattggaactccttacctctgccctcttcttcctctcctctgccttccttcctgtctctgtttccccacctctgtccactcccacttttgtccttgttcctaacctctgcccaccttccaacctctggctattccttcacctacatttcatctgctggttccctactggctcgtttccctcagccctgctgttctttaaaaaacaaacaataacaaaaccaaaaaagcctctttacgtatgct

SEQ ID NO: 194973 - DNA, 589 bp, Homo sapiens
catccgtgaaattaaactctgtattgctgtgtgagtaattatggggcccttctgtgctgaggcagagggtgaggggtaaggtgttgattctcagcgttagtgtagggagtcaggtctctctcctctaccctccttcttcctctttctcctcactttttctccttccatccaaattggtcagacctatattggtctgtcctgggatcccatgacactgactctgagcttgcaaattgttctctacttttttctgccagcatattgggtaattaatgccccttctttccacctttcttcctctcttcctttcctcctttctttctttcttcctttcttccttcctctctctctctctctctctcctttctttctttgacagagttttgctcttgttgcccaggctggagtgcaatgatgctatctaagctcactgcaacctctgcctcctgggttcaagcaattcttttgcctcaacctcccgagtagctgcgattacaggcatgcaccaccacccccagctaattttgtatttttagtagagatggggtttcgttatgttggttagtctggtctcaaacacctgacctca

SEQ ID NO: 194974 - DNA, 346 bp, Homo sapiens
tggaggctgaggtgggaggatcacctgagcctgggaaggctgaggctgcagtgagcagtggttgtaccactcccctctagcctgggtgacagggtgagaccctgcctcaaaaaaaaaaaaaaaaaaaaagacacaaagggatgtttggtgccaagacatgaagaatgcttgattcacctggcaatgtctgggataaaggacagaatcaccaggtgggtccccagatgacaaatagttctgagtagacagtgggggtcccccttgaaggctcaattagaggaagcaggttgttgcagtgatggaccaggaggggcaaggagtatgtgcatgatccacatcaacccat

SEQ ID NO: 194975 - DNA, 599 bp, Homo sapiens
accagcctctgcctcccaaagtgctaggattacagtcatgagccactgtgcccggcctctgtgaaataactcttaaattcatgttttctacctagatttctccttgtctctggtcctaaatatccactacctcttacaactccattttggtgtaattaagacaaagcaaacttggcacatcccaaactgaactggttattttactccagatctgttcttcctcctgtctttactgtctcagtaaatggctgctatctatctcagttttcaatgtattgacttttctctttccctcatcaggtcataactgattagttaccaagttctatcactatacatcttaaatacctctagaatttgtctacttttcccatccctgattctgctttcctagttaaggccacaatttcatcttgcttaaaacaattgtaatgatttgctgctttacatctcctgccttgtcctgccttctatacattctctatactgaaggtagaatgtgctttccaaaaagcacatcttattatgtcattctctcacctgataaacagtgactaacaacataaacaccatctctgccttcagggagctttgggtat

SEQ ID NO: 194976 - DNA, 535 bp, Homo sapiens
gtgtttgtgttcaagtaacccttattttacttaacaatggccccaaagtggaagagtagtgacatttggcaatttggatatgccaaagtgaagttttaatgtgcttcatttaagtgaaaaagtgaaacttcttaataaggaaagaaaaaatcgtatgctgaggctgctaagatctacggtaagaatgagtcttctatctgtaaaactgcgaaagaatgaaaaagaaattattcatgctagttttgctgccacacctcaaacagcaaaagttacagccagagcaagataagtgcttagttaagatttaaaaggcattaaatttgtaggtgaaagacatgaacagaaaacatggtttaccgaatctttcatagctaccccctttccctccactgacagcaatatgttgcaccagaaacccatgagcaacaagggatcccctaaaatgactgacacagattcgggaatacagaaggtcaacagtagcctaatgctgtgtcacaatgcctacgtgatgcacctcacttaatatcatcac

SEQ ID NO: 194977 - DNA, 264 bp, Homo sapiens
attcatatcatcttaacacaggaatactggttttgcagatatcgacaactatttggactcaaaaaagacaagttttggaaggtggaaagaggcatacaagcacaaaacatcaaatcccatgtaaagtcagaaagaaaaacaccaactctaaccctgtgtcctcacagagaatatcaacatcttcaaacaaaaacaccccaaaaaaaggttaataaataaaccagatttcctgtcctctccactgactaatcacttaatgatgtg

SEQ ID NO: 194978 - DNA, 594 bp, Homo sapiens
agataaaccacccaatttattatgggcaagtattggtccagacacttccccaaagaagctattatgaaaagccaataagcacatgaaaaaagtgctgaacatcattagtcatctgggaaattcaaattaaaaccacagtgaaataccactacacacccaatgggatggctaaaaatgggaaaggctgacaacaccaaatgttgaagatgtggagcaactagaatgcatgcatttgtgatagatgtgtagaatgctacagtcactttgggaagcagtttagcagtttcttttttcttccttttttatggtaaaatttaccattttagatctgggttttcttcccttcattctcttcatatggtatatcacactgatcttcatgtgcggaaccaatcttgcatttcagaaatagattccacatagtcattgtgtataatcctttaatatgctgctgagtttggattgctagtattttattaaggatttgtgcatcagtatttacaggggatattggcctgcaattttcttgtagtgtctttgtctggctttattaggataatgctggcctcatggaatgagttaggaagtacttcc

SEQ ID NO: 194979 - DNA, 529 bp, Homo sapiens
tgaacagaccaagacaggcttgaagttatgtccagctattattaaagatcttttggctgagctaacaatatgttagaaaaactaaaatggttttgtttgcaaaaacaaaacatatttagataacaagaacaaaaaattacatattcattttttaaactgaggtttagcttagatccagtaaaattcacccttcttagtacacagttctatgggttgacaaacacatatgatcatgtgtaactagcaccacagtcaagataaagaacagttccaccatccaaaaaaactccccatgccggcccctggcagccacctacctgttctgtctctacagttttcctttgaaagaaggtcatttacatgggacagtattcagccttttagacctggtgttttcattagcataatacatctgagatacatccatgttattgcatatatcaatagtttgtcctttttgtagctgtgtattacactattgtatgactttatcacatttgggaaacatttgggctatttccagttgttg

SEQ ID NO: 194980 - DNA, 573 bp, Homo sapiens
aaaaaataacaacaatataataaatttagtttgtaaaatgcttttgaactaagagcccaagactaagggcaacaaactaaacaaattaaaagaccatggtggttagccgggtgtggtggcaggcgcctgtaatcccagctacttgggaggctgaggtaggagaatcacttgaacccgggaggcggaggttgcagtgagccaagatcgcgccattgcacttcagcctggggaacaagagtgagactttgtctcaaaaacaaaaacaaaaaccatagtggaaactgggtgagacctgtagttgtcattaagtagtattttatgacttgcttgcattaaacagaaaattgccaactttagaaaagggaccaccagtacaatttgaacagtaagttgtgttagggatattgtctaagctgtccactaggtgtactaaaaggaattttttttttttttttttgccataaagcatggatattttattctaggaaacggaaaaaacaaaacaaaacagggaacacatctttccacataccattccaatttaactgacattaattcagaaaagctagagca

SEQ ID NO: 194981 - DNA, 209 bp, Homo sapiens
gaaacaaagagtcttgccccaaatgagaaatcatctccacgatgataatagagaaagaaagaataactattttattaataaataagctttagaccagaatgtgatgggaaataaaggcaaacagctaagaggttgaaaagagagaaagaaacgtcactgttactatacaacccatttagtacatgttttcaagataaacactaatcagt

SEQ ID NO: 194982 - DNA, 224 bp, Homo sapiens
cgccttggcctcccaaagtggtgggattacaggtgtgagccatcacacccggcctaaagatttcttaaaacagtgctcaaaagtgctaactgagaaattgataaattgaactgtattgaaaacaagaaattctgttcatcaacagacactgtcaagagagtgggaaggatagttgcaatatatgtgtatatccccaacaggacttgtattcagccaatacagag

SEQ ID NO: 194983 - DNA, 167 bp, Homo sapiens
ttaacctgcgaatatataatgagttggagaaaagaaaactttaaacagatgtcttcccaggtagtatgtgtatctttttggttgactatactctcatttataattccaatcactagaccttaatcaccacagacagacctgatctgatcaaatgcaacaaagcacac

SEQ ID NO: 194984 - DNA, 238 bp, Homo sapiens
gaaatggcagtttacatgcttacatttttcatgtttacaagttttacatgtttacaagtttacagtttgcatgtgtgattcatgatctttgccatgatgtaactcttaaaaatgtcaaagaggtacgtcataaacagtagaaataaatattctgacagatcataaaaagggagggaggattgaagttttcctaggtgtagtataatttttaaaatagactttacttttgcaacagttt

SEQ ID NO: 194985 - DNA, 428 bp, Homo sapiens
tcattccgccggcacggtaatgcatggaataaagatggacatacaagtgggcattgcttctggtgagtctgcagtatagtgggtgatagggatatgcaaacagaaagttgtttttcttgggagatggcactaatccaccttgcctagaaagaagggaagtcttgctgaactgtgcatcctggcatgtatctctgccatcattcattattttcacctttgataatgaaatttctgacaatacagggtgttgttggagttcatttttttgttgataaaagtattactgtaatcaaagaattccttgcagaagttttgcaaccctcaaggaaaagtgataaaaaaacagaccctgcatgatggattgcaggtttcagggaggtgggagttgtccatcctttcgcgttggctttgcttttgtttgtgtaacc

SEQ ID NO: 194986 - DNA, 514 bp, Homo sapiens
tggctgagtccccacgttatccatgtttctaacaaaaagaagaaagaaacaatgactgcttgacaatgacggctaattcctcctttcttccccatctggatgtgttcacaactttctatcatccaaatctagacaaactaaaaataaaaacctacactttgtgaccaaagtcttccttgattagctgttaactgcttttcatttggactcaggaaggctaaagactaggccataggaggagtgactaacttattctttagtcaaacagcactgatgcagttgtcagcaatgcccctgtgactgaggaaagtattgttttacaaagtttttaatattttatggcataataacagtgaatcatattagaattctggtgtaggctgggcacagtcactcacgcctgtaatcccagcactttggaaggcctaagtgggtggatcacctgaggtcaggagttcgagaccagcctggccaacctggtgaaaccccgtctctactaaaaatacaaaattat

SEQ ID NO: 194987 - DNA, 406 bp, Homo sapiens
tgactaattaatctcctcctaccccacgaccaactcattcacatagccattcccttaggatagaaatggactgttccttaagataggccatccataaccatccaataaaacatggtgataccctccctgttttccttctcattgaggcctgttcactgctttcacagtacacagtatttgccagtttgaaactgttttatttttctgtctctctgactttatgaagaaaataacccaagatgttttgtccaatacttaaaaaaatagcccagaacacagtccaggattaaatacctcatgaataacaaatatccctagaaagccctagaggtctgacttttttttagaatctggtaacttaagacttccatagtttttcccctagcgtaagtagtattattcactg

SEQ ID NO: 194988 - DNA, 486 bp, Homo sapiens
ctggactcagcagcaacaccaaatcctggaccaggcaaaaaccacccaagactgaggggctcgtgccagagcggtggccacagccccaccccaccggctcaggggttcttcccagcggcgctgatcatgaagtcaacatgcacgcaagtcgtctcaggaaacttcttaatgaaagtgtcggccacggtggtgtgtaggtggctgagctcagattgcagctgctaagacaccagccacttaccaagagaaagccaggctgcttcaaacccagggcccacggcaaaaaagcatcacttccggccggggagtctggaagccacgccttgtgggaggtcacactggcatctaggccttcgcctgcattgcagaaggagagccgggtccccctcctggagaaggctgtgttccccagccccacaccggctttgccaccacacaggctgttgaggcaggaggcggggctgaatggtcgctgagacagagatg

SEQ ID NO: 194989 - DNA, 481 bp, Homo sapiens
aacttaataacatgaccttgttaaaaggcacctgtaaacactgcccattaatatatcaaccgccactgcctaggctacaatactcatgagctctcagcaggaataaccccaaagcccccctaactggctttccacttcctgtccaacaagacaatctacatattccctactcacctactcaaaaaatctcaaatcattccttaatggtcaccaaatggctaaatgagtacaacagtccttccccaactgtatggctcctcacaggctccatggtattggaactgatagctaaatgacctaagaaggatgggggaaagctaggctagaaacaataactcgacaaacttatgaaagctctttcgaacagtttctaaaactcatttaaaaaaaaaacaacctataaagagtacactgaatttaaaatagatatatttgccagaactaaaattaatactaacagaaattatattactttctactt

SEQ ID NO: 194990 - DNA, 291 bp, Homo sapiens
gattaattggctcagggatgaaaaggtctcttctgaagcaagagggagggttggtgcacagtgatcacttcattattggccctgtctcaccctctttggaggagtggacagatgaccctccaagacggctgggtcttggagagactcggcctttctgtggagtccagagttgctacttgggaatggggagacaaaaaattcaacacaggccatgcacagtggctcacacctttaatctcaactcgctgggaggctgaggtggtaggattgcttgaagccaggagttcaaga

SEQ ID NO: 194991 - DNA, 683 bp, Homo sapiens
agttgcctggagctgcagagctgaggatctggctctatgagtagctgaggtgagagatcaggaattgggggtggggtgaagctcagcagtcatttgttctggccccttcagggaaccaatggctgtgttccaaatggccctatcaccctatggcccccaaactccaactcagccctagaggctccagaacagggaagagggagctcatattcaacagcattcctagatggattagcctttcagcctaaagtactcttggcactctgtgcgggagggagttggaaagaaggaactgaaaacatgggaaagttgaaagttgattttctaactcctgcacaagaaatgttaatcccccaagaatacaccacaatcctcagagaaagagggaagggatcataatatttaaaatcttaaatctttggacaccactattacaaccaaccccccaccactgacgatttcacagataaacacgctaaggctcagatggttcaagtgacctttccaaaagcacagagccgactattgtcagagcataaattagaacccaggtctagggattcaccatccaccctgtctgttctccaagcgtatcatattgtcttcaaaggcaatcctctggggtacttattggtatgaggaaaaaacaccagagaatgccatgtagttacacagcctaacat

SEQ ID NO: 194992 - DNA, 711 bp, Homo sapiens
agactaaggcagtgggaacacattgcaagtttctaagcaaaaggatgacacagcatactgcactgatgtatcagcagactcgaacagtgtggtgaaggtggaaggctattgtcttatccaggtctgaggctctgttcaggaacctgaaggggaagaggagtggagtaggagaaggtggtagtagaaatggaaagggcaaaactattaaacacaatatccacccacaggcagcacaagcccatctgcaccctggagggaccagagaaggagctttttccttggatcaagttagaagaaatccaaacaacagagaaaggtgagatgattcttggaaagataggagagttggcccacccctggctggagatacaacttaatcacagaaccattgctagaaaagcctccacactcaaaggtgtctctgtcagtgtgtaggagaaaccctaccacagtacctgggcttccaagactcatggggcacccaccatgcccagcttgattaaagacaatggtgtttattaattcatccatttgttcatcaaggttgcatgactattatgtgccaaagaataagcagaacactgctctttaaatgttcttaagtgtttatttataacaggttgttaggttgagacagggtcttgctgtgtcaccagtgcggtggcgcaaacacagctcactgcagcctcaatctctcaggctcaagcaatc

SEQ ID NO: 194993 - DNA, 139 bp, Homo sapiens
ccaccgcgcccggcctgataacgttttaagaagagatgagatgatgttgaccacgcagcccacaatggcaaaccattaataacaatttgcgaggaagaaattcatcttgctcatgaccttattgaagaagactgatgat

SEQ ID NO: 194994 - DNA, 492 bp, Homo sapiens
ggcacaccactgattccagccacactcagttttttttcttctccttccaaaaatgcctgattctttctcacctctgggactttgcatgtgctatttcttcttccccgagcaatctttctttttctctcctgcctagatatctccaactattcttaagatcttagcttaaatgtcactctctccagaaagtctttgctgacgcagattgggttgggagtccctgagttgtcttccaaaacataggcctcatcatgttgtattgtaattacctactcacttcatagtctctcccattcgatatcggagccatagggtggaggttatatttgtgtatctattctattctcaacgtgagcaaaaagtatcatgtgattgccttgcagaggtgggcctgggtgagatcacatgggattttataaacaatggaagtgactcttgatatcctctatgctgatggtgatgattttagtggtcgctttcaaggtgaacatt

SEQ ID NO: 194995 - DNA, 196 bp, Homo sapiens
ctataataatcacccaacacattgttgctatcattgttttgagcaaagagttattagatcagttaagaatagggaaaataacagattttatgttgccttcgttttttccttctgcaacactcttttctttatgtagctatgagtttccaacctatataattttcctcctttctgaagaacttctaacatttcttgc

SEQ ID NO: 194996 - DNA, 111 bp, Homo sapiens
aaagtgctgggattacagattgtgagtaggcagtatgtccggcctctaccaaacgtttaaagaagaattaacacgaatccttttcaaactctttcaaaaaactgaagagaa

SEQ ID NO: 194997 - DNA, 1016 bp, Homo sapiens
tttcaagcaggtagtaggagtaggttttgttatttacagagctattcaacaaacgctcttttattagctcatcaatttgccagtcagacaaatggagtcaagctcccatccaggaggttaggagagaaaacactcagatttcacatcacttcaccccacctaatgacttcactttccatttgacttgttgtctggctctgttaattattgaactaaaaaaatgtactaaccagattgaagcggtagtcttcactcccactaaatatgcagagattaaccacaatgcagatgatctggaaacataaattaattttggtcatagaatttttgaggtagaagtatagtaagaaagacttttctttactaaatatttagtggtctctgtcttagtccatttttactgcaataataaaacaccacagtctgggtcatttatagataatagaaatttacttctcacagttttgaaggctgagaagtccaagatcaaggttctggcattgtgtctgatgagggctttcatgctgcatcttcacaaggttaaaaaagacaaatgctatgtcttcccatgatggaaggcagcagcgcaaaaaagcgcctaaactagttttctctagccccttttttaactgtacaaaaaataaataagttaacattattaagttactacttcagtccttatgttgttttttaaaaataatcagtttgaggccaggcgcagtggctcatacctgtaatcctagcactttgggaggccgaggtgggtggattacctgagctcaggagtttgagaccagcctgggcaacatggcgaaaccctgtctctactaaaatacaaaagaaattagctgagcgtggcgacgtgtgcctataatcccaggtacgtagggggctgaggcaggagaattgcttgaaccgaggaggcggaggttgcagtgagccgagatcgtgccactccactccaccactccactccagcctgggcggcagagcaagactccatctctaccaaaaaa

SEQ ID NO: 194998 - DNA, 857 bp, Homo sapiens
caggctcagcagggagctgctggatgagaaagggcctgaagtcttgcaggactcactggatagatgttattcaactccttcaggttgtcttgaactgtgtgactcatgccagccctacagaagtgccttttatgtattggagcaacagcatgttggcttggctgttgacatggatgaaattgaaaagtaccaagaagtggaagaagaccaagacccatcatgccccaggctcagcagggagctgctggatgagaaagagcctgaagtcttgcaggactcactggatagatgttattcgactccttcaggttatcttgaactgcctgacttaggccagccctacagcagtgctgtttactcattggaggaacagtaccttggcttggctcttgacgtggacaaaattgaaaagaaggggaaggggaaaaaaagaaggggaagaagatcaaagaaggaaagaagaaggggaagaaaagaaggggaagaagatcaaaacccaccatgccccaggctcaacggcgtgctgatggaagtggaagagcgtgaagtcttacaggactcactggatagatgttattcgactccgtcaatgtactttgaactacctgactcattccagcactacagaagtgtgttttactcatttgaggaacagcacatcagcttcgccctttacgtggacaataggttttttactttgacggtgacaagtctccacctggtgttccagatgggagtcatattcccacaataagcagcccttagtaatccgagagatgtcattcctgcaggcaggacctataggcaagtgaagatttgaatgaaagtacagttccatttggaagcccagacatagg

SEQ ID NO: 194999 - DNA, 205 bp, Homo sapiens
ataatcatggattttgtgtttctgggtttaaaaagactttacactaattgaggaaatttgaaaattcagtaaggtttgaggaaaaaaaaaaggaaacaatcctgccccccagaaacaaccaccgttaaattttatttcagaatttttaaaatgcacagatatgtagattttttttaaatgatattaaacggcctgtgaacctttg

SEQ ID NO: 195000 - DNA, 775 bp, Homo sapiens
ataataacacatcgagatttggaagatttttgtagaatcaatttcacggccttctatgaattaaaacaacaacttacttaatgactttggaaatattgcttaactaacagcctttgagctattttgatgaatagaaaaacaaaagtcattgcccactattgctaaagtatgaatctcaaaaaggcaaaattacaactctcatgcaaatataaaatgaacacatgccaatgattttattcaactaattatttaatgcaggaaccactaaggtgttaaagccagttcaaagaacatttgagcagctagatatctataggcaatttatagaagaatatttggataagattgttgggttagatacaaaactggttaataaacaacagggcaataaactgtaatattgaggttgtcttttccactggacagaaattatttgcatctctgctggacagaaactacaagttaacctctgcccctattgagctgtaaaatagcccaaccaatagaaagtcagacccctgtaatcccagcactttgggaggccgagatgggtggatcacgaggtcaggagatcgagaccatcctggccaacatggtgaaaccccgtctctactaaaaatacaaaaattagctgggcatggtggtgcacgcctatagtccgagctactcgggaggctgaggaaggagaatcgtttgaacctgggaggcggagattgcagtgagccgagatcatgccactgcactccagcctggggacagagcgagactccatctc

SEQ ID NO: 195001 - DNA, 793 bp, Homo sapiens
atctagagatccccgactagtccaacattccattttgctagcttttaatttgcttcaaaaagtacctgtagtttcagctacttgggaggctgaggcaggaggatcatgtgggcccaggaatttgagactgtccggggcaatatagcaagaccctaccctatgtcaaaaaaaaaaggtgtaacaaaaatgtcatcacattactgtagaaataggaccaccttgtgacccttgaatagtttgttttccactctgctttctctccagctaaagaggcatggtgctttctctccggtagataaaattgagtagcgtttaagtagtactagggtgtgttattcagattgctaccctgaagtaacaagccttgtattctcagtggcctaacacaaaggatattgtttgtgttgtgtgtatgtgttttgctttgtttttgctgttcctgtctttcaaaaaggctttgcaagcaagattgaagtctggatggagggacaaaagtttaccttcttgggatacatcgcaacatatagcttttaaggtggggagggagagataatttatacctcacacttaattggctctgattagaaaggacacaatgacacaagttattttcattcataggtctttagccaaaggaatcacatgacccctcctgtttctgcaagggaggctgagaagtgtagagaacgatttggatatttggatatttcccaagcattgctgcttcagctgtaatttacagtcatacattctcagacaaagctggagcaactctagtacttgacagttactt

SEQ ID NO: 195002 - DNA, 271 bp, Homo sapiens
gatgggagggtagatggccagaaggataaatggtaaagtgggtcggtgatcgatatatgaatgaatcaatgataagtatgtggatttttaaatgtcattttggctccgaagacccaaaactaggtccaaaacagaaatcatcttcaaccagttatatcttatatcctccttgcattcctgtgaaagcattagtaaggtttctatttacctcttgaaagacaaggtctccctcattcattctgatcgcacatagtcagcttgtaataaaaac

SEQ ID NO: 195003 - DNA, 306 bp, Homo sapiens
caaggaagctagaaatctgaaaattaaaggaagagttgagaaaaaccacatccgcgactgcctcctttccagcaactgcctcttttatattttggggtgctatttgtttggaaagactttgctaatagtttgaggagactacaacacaacacaaggcaggcttgcctgctaagccagctagaagtttaattaaatacaattgcttgctgtgtgttcctttcccaaatggtttcatgcatattcatcgttgtaattatggaagtgaaaaaatccacgcctaattattccgtgctccccatctttcac

SEQ ID NO: 195004 - DNA, 345 bp, Homo sapiens
gtctgttgactgaatctggcccatggtcaattgatttgtgacctccctacattaggcacttgttggcacctttctattgcattataactgtcctgaaggcccgaggtggaaggggagatgcagaataaggcggagatggaacaatgagatgacaagagatgaaagacttcaagaaggatggatgattgcctatttcagagattctgcagagggcaaagaaatgggaataagaaaaggctattagattaaagtaaattaattatttggcacagcactacgtctacaggctgtgttctttaaagaaatgatcaaataacatgggaaatagttaagcaaattaaaata

SEQ ID NO: 195005 - DNA, 253 bp, Homo sapiens
aaggaaagtaactgtatgttgaattcacccaaaagatttagatagtgttgtaatcatagctttatgtaagaatacagttctatttaaaaagggaggcagtgaattcagttgatgatctgctgggtcatgatacttcaaggggatggcttaagaagggaaaggtaaagagcatataaaatatttttcccctcttcaaaaaattcaaaaatatttctgtcttcaaaaattgtcatgttaatttaagtcttactga

SEQ ID NO: 195006 - DNA, 141 bp, Homo sapiens
aggggcccttgagatgtcaaactggggagaatggtagaagttttcatggttccgaaaattagagaggggatccctggcaaggaaagtctccttaccacaaattggtccctatcagagaattgctgctcagttcagatgata

SEQ ID NO: 195007 - DNA, 576 bp, Homo sapiens
atccgcttaatcaaaaattttttaaagcctccacttaggtctgcaggttactttgctcactatgtggcaacgggatctaagcttcatatttgaaacacctcagccttctagtgccacctgcacctctctgccactttggctcctgtgaacttagccttgattttgacattttatggtcgtcccgaggtctgtgacatggaaggcatctgtctaaggcacacatttgaattgggtgcctccttttctttcccccacttcctaaagttgcaggggtcaaatctactcccatcatgctgagtgtgcaaaccagcctacttttatgtgaagccattctctgccctgctgctgatatacgcctatcccaagacagtttttaccacacaggcattcatgctgtggaacacagtatggtgatttctcaaaaaattaaagataagactgccatatgacccagcaactccacttctgtatatatatatatgccccaaagaattgaacgcagagactcaaacagatatttgtacacccatgtccacagcagcattattcacaattgccaaaaggtggaaacccaaa

SEQ ID NO: 195008 - DNA, 670 bp, Homo sapiens
ctttatagtgtcgatggtcgttacaatttggtatgttttcccagtggctcatactgtttgtccctttccatgtttagtgcttccttcaggagctcttgtaaggcaagaatgtggatttatttcttgtaaggcaaatatgtggatttatatctgggtgctgtattctatggcctctaccccaagagtcattacttttaaaaatgcaattcaaattagcataaaacatttacagcctagggaaaggcttatggcattagaatccttatttataggattattttgtgtttttttgagatatggtctctgtctgtcatccaggcagaagtggagtggcttggtcataattcactgcagccatgaactctgagtccaagccatccttgtgccttagtctcccaactagttggatctacaagcataaatcaccatgcctggttaattttaaataaaattttttgtcgagattatgttatcactatgttgctctggctggtttcaaattcctggcctcaagtaatctttctgccacagcctcctatagtgctgggattacaggcatgagccaccatgcctagcatagagtattacattattttcaaagtcttattctaagagccatttattgactttggcctaaataactcaatattatatctctgaaacttttttt

SEQ ID NO: 195009 - DNA, 617 bp, Homo sapiens
ataagcacagcacttttttattattactttcatgtgaaaacaaatacaaataaattacagaataaagtaaaaaatatactttaatgaaattttggctcgtcattaacagaataaagctacgtagtgattactcttattgggcaagaggggtaggagtttagaatggggtatgggttgcctctgttctcccttgaggagtgattttaaaggaatgtgtagaaagcattatactggaactaaagcatcacaaacaaaaacagcattctttttaaaaatacatctataaagaaattaatgttttctacttatacatttcaatattaaacaatgttccttaaagctaacctgaatcatgtaatcaaagactaaaattaagttttcccagaagtttattttctacaagtatggaatagaactcagcaaggagaaagaagataattaggagtggcctgaacgcaaggttccttaaagtaccagttggtttctgagaatcataaagtaagcacctgacataaaagatcttcatttccctactaaatatttcaagtatgtctgatttctaggtcattgctcagggccttaattccaaattgagaaagatttctttaatgttcctc

SEQ ID NO: 195010 - DNA, 353 bp, Homo sapiens
acagatactggcaaatggctctctgggaaatttgaactaatttgaattctcaaaatttcctcacacttctgctcacatcagacatcatcacactttatctgtattgccctaacagaaaatgatacgccattgtcatttcaatttcatatttctttgattactagtaaggcagagcaacttttcaaacagtctcagcttacttgttatatttttcatggattgcctaattcacactttctcctattttaattggtatgctcatcattttcttactgatttgtaagaattctttataaattaatgattctgcctctttgttcattatatacaacgcaagtatttgttagatgtat

SEQ ID NO: 195011 - DNA, 481 bp, Homo sapiens
ctgttacaaattctttttcctgagttgcaaataaatcatggaataattcctggaaacctatcacttccctatcagcttctcattgacttaaacttttaaggcactgggttatttccttctttaggtcttttaacagtggaaaaccaaaggatgtctccagcaagctgatgatttcttctgttgaaattccaaacacgaatacccccacctgggtcgagtgggtttgaggctgagccacacttgctcttacaagctgggttatgcttccaatggttgggttaggatcatctttgggtcgtttgagcaaataaaacatggtggcacaaaactcttggatacatacatggatgaaggtaaaacactcacctcacctttggagaagtttcatacccacccacattaagccctcagactcagataacccattcctccagagatcccatggcaaaatacaaatgcatgtgtccaaattccctctgca

SEQ ID NO: 195012 - DNA, 316 bp, Homo sapiens
ttcacgctcactttctgggtagcctcctcaaatggcttaagaatatcacaaacataagtcattagagtccactgaagggaggtgagcacaactccactggctctaccaagactatggtgaactgagtagcaatgctccaagagccattttaacatataaaaagtagaaatccaatggccagtttcgtcctgcttcaaattcttccatggaagttggtgatcattttggaactcttgcagtatctgacgggccttgaccgaatgactaaaatgatgacaagttttcctggcagccactaacatattctcaatgcttt

SEQ ID NO: 195013 - DNA, 197 bp, Homo sapiens
ggacaacaaaatatcagagaattgttttttgtttcactttaaaatcaaatactagaggtaaaataattctagaggataaataataagcatggacaacaagaattttttttgtacataggttagggacaacaaaatatcagagaattgttttttgtttcactttaaaatcaaatacttgctgtgacctatcttcatgt

SEQ ID NO: 195014 - DNA, 472 bp, Homo sapiens
gtgacggtgtccccttctctgtccacgttgcaagaagctatactgtactcaccaagtctttaaatcttgaccacttcaccaaggaaggtatgaacctctccattttacaggcccagttcaaaaagcaacgacaaaaatcaacaccagcaaacctttatggagttctaattattgacctggcctgccagggtccttcagagtggagttggggtgggtgcgggagaggggtcaaaagccagccctcaggagggggccacccgcgcagccctctctccaccatcagggctcttgcagacccaagggcctgccaggagaagcagatgggccatggtaaatctgaggggccattgggatgcccagactgtcccaggtcaccccatttctgcatttttgttcattttgttcaggtggccctgaatgttgtgccctcctcttgggaactgtaagtaatacaatcttcctttcaggcagt

SEQ ID NO: 195015 - DNA, 562 bp, Homo sapiens
tcttctgtttgttcgattctattgctgaaacactcaaagcattttacatttctctatctgtgtccttaatttccagaggttgtgattgctttttatttatactttctatttcacaaaagatgtttcctttcatatcctgcatcatgtttttgatttctttgacttggacttcgcctttctctggtgcctccttgattagcttaataatcggccttctgaattctttttctggcaattcagagattttgtctggaaaggacaccctgttcaacaaatggtgctgggataattgtaagccacacgcgaaataatgaaactgaatcctcatctctcaccttatacaaaaatcaactcgagatggatcaaagacttaaatctaagacctgaaaccataaagattctataagataatatgagaaaaacccttctagacattggcttaggtgaggatttcatgaccaaaaacccaaaggcaaatgcaacaaaaacaaagataaacagatgggacttaattaagctaaaaagcttctgcacagcaaaaataataataatcaacagagtt

SEQ ID NO: 195016 - DNA, 233 bp, Homo sapiens
tatttgttgctactgcatgtctacaattatctccaatttcttttaattaaaaaaaaaaatttaaaaacaggtctgccctgctccagaagctgtcctctgaaccagttttctagattggtcatatttcccttttcatgcttgctgctaggaagctcagagcaaaatgtatgccctctctctaacaagtgtataggacttcctgactacacttctaggtctttctgttcctcttg

SEQ ID NO: 195017 - DNA, 334 bp, Homo sapiens
caatctgggtattgttgacctttcaggaggatgattttctgctctctttaaacaagcccgcatgacccataagggatccagcctgccttatcccatatggagataagtgagggtttgtctgtggctttggagaagagatgacctacgtgtgtgagacagcaacagaagtcgtgcttgttagcatagattctcagagagagaaggctgtggctactcctagcctgttgtaaagaagcatttgtgtttggattgcagcaggggagagtaactattttggtaaggacgaccttcctgagaaggccatttttccagcagaagcaggagttgtgagaag

SEQ ID NO: 195018 - DNA, 146 bp, Homo sapiens
ttacaaaaaactcatctccccagcaacatatgccaagcagttctatctgtgccctttacttggtgcaggcagaatattcaacagcatcttatgtgcaagggccaaggctgctgccttacacaactcgagggggcggcattccaact

SEQ ID NO: 195019 - DNA, 399 bp, Homo sapiens
gacccttttcctcaacccccagccctatcaaccacgggtgtattttctgtaactattgtttaccttttacaaaatgctataaaagtgaaattatcagtatatagccttttgagtctggcttttctcagttacaataatacatttgcaattcatatatattgttgcaatacagatgtataatatattgacctcaagtgatccgcctgcatcagcctcccaaagtgctgggattacaggtgtgagcctgtacatacatctacattagtcatatgtttcctttttattgctgagtaataagccattatatggatgtaacccagtttgttaattcattcacagtttatggacatttgagttgtttccatttgaggacatctccgaataaaatatctgtaaaca

SEQ ID NO: 195020 - DNA, 212 bp, Homo sapiens
tgcccgcctcggcttcccaaagtgctggtattacaggcgtgagctaccacgcccagcccgtgatctcattttctaaggaaaataaatgtataaacaccaaaatatcaacagcagttttctttagatgataagattatagtgctttacattttctgtattttcctcatcattcctaacgtatgagtaaaaccgtgtcataataaagtctctct

SEQ ID NO: 195021 - DNA, 123 bp, Homo sapiens
aagattatagcatcagatggaaggaggtgtgatggcaataccaactacaagggatgagactcatcaggccacccttcagaatcatagccagcacttgtggaatgtatacaaataccaggcatg

SEQ ID NO: 195022 - DNA, 174 bp, Homo sapiens
ctgcattacagaactagtttgtgggttagtgacaaattcttaccacatatggcagtagggatgttctttgggctggaatatttctgcgtgtcagtaatacacttcctgctttcagaagcactgaaagtcagtattgtgaattgttcaaattctacacaactacattgctgaaat

SEQ ID NO: 195023 - DNA, 323 bp, Homo sapiens
tgtgtgagccactgtgcctggccctgcatatctatacttatgccagtactacacttgattactgtagctttatggtaaattttggttactctagattctttgcatttccataaattttggtattaatagtgtcagtttctatcaaaaagcctgctggaatttcagtttgtgttgtattaaatatacagatcattagggagagaattgtcgtttaaaaaatattgagtcttctggtccttgaaaatggtgtatcttattattttttaaggttctttagtttctctcagcagtgttttgtagttttcagtgtaggaagtgttgga

SEQ ID NO: 195024 - DNA, 538 bp, Homo sapiens
aaaatcaaagacatgaaacttttcaaatgacaaagatcctctattctttcaaaagccatgataagccaggaggcactatgagaaggttgataagtgcacaggaacatatataaatctaaagaagtctatggagaagtcatcatattagcaaaaacgcatcatttggttgagctttccagctcaaatatccttcaaatacgtcagtgagagacaattgcaacaaaaaaagaaaaagaaagaggcagtgctaggcagcaaaggaaggtggaattttttcgttatgtcaggacccatcagttctgtagttcacccaggaatctaaggattaaagaacaatccaatataactagaaatttactggcatcatatgtccttaaaaagaataaatactgcaaagaacaaaccaggccacagaaaatgctgttctccttctgactaaatatggtcaagtctcatgaatctgggtttccactcttggaaatgtttgttaaatctgtgtgcactgggctgaaggctcactctgaattttttattagtg

SEQ ID NO: 195025 - DNA, 654 bp, Homo sapiens
tagcagatttgatctgaaacggtataagacagatacttttaaatgcaccaggaaatgtgaactctaaagacatcaaattaatcttgtgaatgcagtagtcactctctttttatctttctttgtaaattggaatttctaccttccattaattgcctttgatttaggtgaggttatggggcaggtaaaaatctcattagcataaactagcataagataagagtgaattgtggagtcagactgcctatattcaaatcttggcttcactatgtcttttagaagtttcttagactctgtgttcttaagtttcttcatcactttgcctctgaagagtaacagattattgtcctaaaatgtgaactctaaagacatcaaattaatcttgtgcatgcagtagtcactctctttttatctattctttgtaaataggaattactaccttccattaattgcctatcgattaaggtgaggttatggggcaggtaaaaatctcattagcataaactagcattagataagagtgaattgtggagtcagagtgtctatattcaaatcttggcttcactatgtctttaagacagtacttagacactgtgttctaaaattcttcatcattgaattaagggcaaggtgactgactggacctacatgccccac

SEQ ID NO: 195026 - DNA, 618 bp, Homo sapiens
aggctcccatcagaaatctctacagacgtcggaaatctatagagatattagataagcatttcaaggtaacttatttcctcattttaccttatggtaacagccctatttacctcttacaagcgttctacggtgtatcaaaaagaccaacaacagtaagaggtttgcatagcactgtgtattccattgagaaaagtgctacaaaaacacaagatagcattttattaatttattaaatctgattccttgagacacatacaaagcggtgttgatggatgaaccaacaaacccaagattaatagcctggtttactgcactcttttctccttccaagccacaagccaaaataaactcaccctcaatttataatgttgcaaaatgtgcttctaagcaccaatgcctgaatccactgtggttattaaaaggatggttgcatccatcgggatgggataggttatgctgtggtaacaaagaacacctaaatctcagccctaaggatgaccacaatggtccctctggggtcaagaaggtaagcccagcagccccatctttctcattttcacctgacaatctggttagccaactctgtggcttacataagtttgaaagatatgaccctct

SEQ ID NO: 195027 - DNA, 318 bp, Homo sapiens
tttatacttaatctttctaaatatacttgtaaaaatgtaaatgttagatcgttcactgataggcaccaatatctttaacagaaaaggttaattcaaacaaatgtcaggctaaactgacaacagaaataaaactggtcttcccaagttcagttccttgtggatttgttatattgctacatattacacctagttttatgtgtctagatgctctgtatctagtatactcttgagagcctccaaatattaatatttctttttttttggagattaaggatagagagattaaggatagagagattaaggatagagagatgccgg

SEQ ID NO: 195028 - DNA, 396 bp, Homo sapiens
ttttccttcctaaatgtaaacatccagtaaataaaacatacatgatattctaggtatagaaacatcagtaattcacttatgaaagaggtacattttgacgtatctggtggtaaggtttttgtcttacatataaagcacttcaccaaaaacaaacaaacaaaaaacccatactgttattatttagagctatatttcttctcccagtttcctcagttgagtagaaactcaccaatttctgtagaattttggttataggacaaggctacaggaaaggtctgaaataactatatgtcacttgactagggaaaagccttctcttgaggcttggaggcagtcatttatcactttgtacttgaaggcattcctctgcagacttctttcctagagtcttcaggg

SEQ ID NO: 195029 - DNA, 335 bp, Homo sapiens
gggtaatcagtggccacagcttgatgcctacctctgtttgactccaaagtggactcaggggtcagatagatccagagggtgacagaaacctcatcctggagactgggggttcttccaaggcttgttcttgtcactttttttttttttttttttgagatggagtcttgctctgttgcccaggctggagtgcagtggcgcgatctcagctcactgcaagctccgcctcccaggttcacgcctcccaggttcacgctcccagctctcaggaggctgaggtgggaggatcactcgagcctgggaggcagaggttgcaatgagtcaagatcatgccactg

SEQ ID NO: 195030 - DNA, 1033 bp, Homo sapiens
agagcgagattccatctcaaaaaaaaaaaaaaaaaatgaaatccgttcaagtattaggatgatgggactgtagatgcatttcctcccattttagatttttaattttgctgttacattcctgcaaaaaacaaaagccaggcaggaaaagttcccatctccaggccatcccgtctggcagatgtcccaaggcaggaatggcctgaactcctctctaccagtggccaactctcctgctccaggcttggttctcaggctttgagaacctcagggcagaacacctttttccaccccagcaagcaaaatgaataggtaacaattgtgcccttgttttgagcaacaggagcagatgggacctacactggtgggctggcctgggaaaggtccagggctggcttggcccgggcagcaaggctgaggaaggtgatgtggcggggaggagaccccagggctgcaggcatgccctgcgttaccctctgcacccctttcctggcctcaggaactctctgtgggatgcgttagaagacctgctgacaggccggataaggccaatgagagagggaacggagaagaggggcacctgggttcacaggccttaagaaagaatttagttacttatttaacaaattaaacaatgtgtgtcacgcatgtaggtctgggaaatgcattattaaaaacacacagtgcagaggtgcagcaccagcatacgggtggatttgggactctaaaatggctttggttgtgtgtggtacaagggagaatgtatacatgtattacgtgtgtagttttttaaagtacacatatagaggaaaagatgagacaagtctgatgagatgtcaacagcaacaattcttagttgtgggtgctgtgaatttcccagagaggaggagagtcctttagctgggcatggtgatttcagcactttagcaggctgaggcaggatcacttgagcccaggagttcaagatcagcttgggcagcatagcgagatccccatctcaatagatggattagatggatggataggtaaatagaga

SEQ ID NO: 195031 - DNA, 760 bp, Homo sapiens
gcttacacatcagtaagggaaacatgaatagggcattatttgagtatctaactgctatctctttctcattcccagctaccagtagaaatatgagatctagtatggatgatttttgatgggggcgggcgttgatgtgccttttaaatattgtagaattcactatgttaggaaataaaataatgacaggcatctgtttttttctgaaaaaaacacaaaattcaggtcctgtacctgccattttaccacctgcaaggatttgggaatccatttaagtttcacagcttttatatctgcacctgtcaagtcaggatgagataagttctgtggaagtgttttgtgaaccagagaatttgacaggtatgttacgtttatacttcattctgcatcattcattcattattgaattattcagtccttcgttgagaacatactacaatgaccacagcagggtccctgtactcaaagagctccctgtctagagcgggagacagacttgcccaaaggtatgaggcatgagctgcagctgaggaatgtgctaagtgcccagcaatgtggaaacacagttaattctgtgggaggaggtgtagagaggaggagaacccatgagaggtggaaaactaagaaggggacaagggttatccaaaggaagctttttggactgcagtatgatgttgggaactttttggtacatggggatagttccctataagaatgaggacgtctttatcctcttttactaaactgagtgctgctataaata

SEQ ID NO: 195032 - DNA, 601 bp, Homo sapiens
ctgtcccaatgtgccagcagggaccgtttccacccgtgtttctcacatgtgtgttactgtgacagagtgacatcagagcctataccgggggggcaggatgcgctcgtgtccaggacccaggctttgcgtccaggtgttgttgcagtcatcctaggcccgagcctctttgattctcttcggctcgggtctgttggctcttttgtttaatagaggagcgatcaggagcctggagggagcagggagctgatgctggtcgcagattgtggctttgtgacatattagccacggttctgaatttatgtgtctgtgaaaggaggatgatcatacctatctcacgggtgtttgctcagatgcccatcgcagtgcctggctggtgggagtgcacccctggtggccactgctattctcattactaatactaatgttctcagcatgacttatttgagaagcgagtttttgtgaagcccgtggaatgaatcagctgagcattccctgctgccgcatgctggggagggcaggtcaccagggatatggcttggcctgcgccgcccactgggccttgcagtgggcctgtccgtttaggatgccagagctcttgcgt

SEQ ID NO: 195033 - DNA, 332 bp, Homo sapiens
ctcaccttggcctcccaaagtgccgggattacaggcgtgagccatcaccacaccccggcatgtcttttaattttttaatgaggtcattagaaagatatccaaattaattatgatgtctcacaccttagttgataatgcttagtgttttgaaaatagaagccatgttattatagttaaaagaccttaattttacgtcattttactaaacgaggtggtaaaccgtttattaaggactgtgtgccctgttataagcgatgtaatcttcacaacagttctataaaataggactgttatccccattttacagttgaggaaatgaggcatagagaggt

SEQ ID NO: 195034 - DNA, 428 bp, Homo sapiens
gtatgtaaactttagtcacacatgtggccgttaataaacaggttctcctccattgtttttaatctctcagtaggccttaatgaaaagaaatcccaaaggaacagggtaaagcctctattaatgatgacattctcagctgggcacggtgacccacgcctgtaatccaagcactttgggaggcggaagcgggcagattacttcaggttaggagttcaagaccagcttggacaacatggtgaaaccccatctctaccaaaaaatacaaaattagctgggcatggtggtgcgttcctatagtctcagctattcaggaggttgagatgggagaatcacttgaacccaggaggcggaggttgcgctgagccaagatagcaccactgcactccagtctggatgacagagtaagaccctgtctcgaaaaaaaaaaa

SEQ ID NO: 195035 - DNA, 387 bp, Homo sapiens
aaattataggattccagatttcataggctcttaacaatctggtattggtagattctttctcccaaataatgaaaagaaaaaaaaagtatgattattgtgaccaaattaatttgactttataccgtttttgccttctgttagtatttagcattcacacaagtgagaaaaaccaaactagagatcatagagttttccaggacatttaaaaaatggtaaagtttttctgttcacacatttttgtttacacgttttttaaccaatgtttgtcatttctatgttggtacctgattaaatttaaaagttgtatgatttttttttcattttaaattttcattgccaacattcaatataataattctcttttgaaggattttgtcttatatacta

SEQ ID NO: 195036 - DNA, 639 bp, Homo sapiens
tactattgatcagatcctcccaaagaccctgacatgaataactgcctttctaaggcacaccataaccctttctagggaaactgctgtgcccacagcccctgtctttgaggtagctgtgtattttgctacttggccttgacacccttttttctccaccccacgaccagatcaaggccactggattgagagtagctacctgataacctgacccctcatgattctgtggccaggctttaaaaaaccaacgtatcaatctgaactaaaaaatatagaaagaatttgcctgttgttgaaggataggaagaaagtagagtatagccaagccatgtttatgggcaacacaagggaagatccaagaatggctctgaaggcaagtccatgttttcatgagtgccattctaggaattacatgtctcatttagtatgccacatgtattttcaaaataatacacatccccttttatgtgtttacttgattgagcttctgttccttccaaccagaaaaagcctaactaaaattgccatgctcaaaacttcgactgagttcgtcaaataaaccatcaatcggaaaaatgcaagtttcaaaatgagaaaaagtctgttggctgagcgcagtggctgaagcctgtaatcccagca

SEQ ID NO: 195037 - DNA, 439 bp, Homo sapiens
ctcccaaagcgctgggattacttgcatgagccactgtgccagctttctcaccacttctagtcaacgctgtactaggagttctaggcagtaaataaggaaaaaaaattaaagacaatgagattggagaagaaataaaattgtccttatttgcatatgaaatgatcctatttgtagttctattatgaaatccttattcttaacctaagaatttcacagtaaaactactataacaaagtttaaggaagtaatcggatacaagattaaaatcaactatatatctatatactagcaataaactgaaattaagagaactctattctgaatagcatcaaaaagagtaaaatacttaagaataaatttaacaaaagaagagaaagatttatacattaaaaactgcaaaatattgcatggagaaattgaagtagatatataaatggat

SEQ ID NO: 195038 - DNA, 309 bp, Homo sapiens
gtgagctatgatcgcaccactgcactctagcctgggtgacagagtgagaccctgtctcaaaaaaaaaaatatgtacaccaggatggggaatcagagtttacttcactaaaagaaataagtacactgtcaccagaggaaaagttgctgatgttattgactatttgcttttagaaatctccctccctagacattcagggcactggcttttctggttttctgaaccctgttccttttgcttcttcattaccttgttcttatccattaaatgtttgtgctccctggagcactgttttgcgccctcttttgagc

SEQ ID NO: 195039 - DNA, 404 bp, Homo sapiens
gacagctttggccctcttcctttctctgggtgtgagcatctgtacagtgtcagcaggacaattatactttttacaggcaatagtggcttagagtcaaatgatgagccttcccgtgttatggctacatggctgtgatagcaagtggaattatgcacctgcactctaaactcgtggagtcattctggatgtttatctctgcctatccttgaccaaagtacaaccatgttccttacagggggattggttccaggaacctgtttggatgccaaaatccatggatgctcaagtccctgatataaaatggcatggtatttgcatataacctagaaacaccctcctgtgtactttaaatcatctctagattatttagaataactaatacatgtaaaggctaggtaaacagt

SEQ ID NO: 195040 - DNA, 181 bp, Homo sapiens
tggtgtaaagttagcgcttgatacatgtttttaccttaagaccacagtttctgagattagcgttggtgtgggaccattaggcccacagggaaagtgaatatttttctgattagctatagaacaatctgaacgtgtaaacaagggaaaataaaaagtgaatacaaattattgttgccgaaga

SEQ ID NO: 195041 - DNA, 382 bp, Homo sapiens
aggagataatatacctcgactgatgcacacctagcaagaaatgaaataggaagtcacacagattaggaataaactatttagtaatctgctttttaaaaaaattattggagtttttttttctaaaaatagtcgaattataccaaaaaacagagtaaccgcaacatgtcaaacaatgcaaagtcctatgatgaattaaaagaaaaacaaaaatgtaccaaatatgttactacaaagcaactgttcaagtgtgctaaaaacaggtgtcttctcccttttcagaggctcccctagtcatttgcaatatattttgcctacttctctaaaaatcaaaataggtcctaataagtaagatacaggtcttcaatcccaacagcaactaagg

SEQ ID NO: 195042 - DNA, 286 bp, Homo sapiens
ctaacctctgtgtgcctcaagtttcttcacttgtggggtaaaaaacaaacagaagttaccacttttgctgtacagttatatggcttagcattaatgtatgtaaaatacaaaacaagagtgctgaaaaagtggtagttctactagtctgctataatcacaataaccttaacaagacaggaggacattgtaccatcaggaatgtgatcacaatgaaattttagttgaaaccatccccctcttttttcttttattcattcagctttcccaagttgaacatccccgcttt

SEQ ID NO: 195043 - DNA, 374 bp, Homo sapiens
taaaatgcattacatgttaatatatatttatgtttgagtgtgtatgtttgagagacagggcatgagaggagaaggacggaaagagagagggaagaagagacggaggggaagagggaaggtggaagaaagggagagaaaagaaggtggggaagaagaggtggaggggaagagggaaggtggaagaaagggagagaaaagaaggtgggaaagagacaggagaggagggaaggagagagaaagaaaaagatctggttaaaattgcactgacttcatcctgccaacaattgctgtgtctgtatggcagtactctgtctttaacaaactcgtggtgctatacagagagacaacacattctatatctattttatgtttgt

SEQ ID NO: 195044 - DNA, 517 bp, Homo sapiens
agaaaactgtattatttggcaatcgttgcttatttctgtccttattttctgtgttgcctaaccaggaaagtgaagtcttaacagctcgggcgatgtggatttgtgagggtattttctgggctgttgtggctgccgcagctgctgctggctcatgaatctttctagcattgcagatacctagacttgatcctgcagagtaattgaagtggtcagatgcttctccagctctggcttattatgagcttctgtaagacaatgtaggaaggcaacaataactttccagactacttcttccttgccagctaaaagcatgtgccagaatagattgtagatgcatgagagtctttgttatagtgacaaatagatcttaaggaagggctatgagttgagaataattgctaattgaattgatatgtcatatcttttccaagtcattcttttgtaccacattagtggatgacttaagtagcagtgctctcaaaaagagtgcttctttagcccgtctatcgctacaaat

SEQ ID NO: 195045 - DNA, 333 bp, Homo sapiens
ctgaggagcaggggtccctcataggaggggtctgaggagcagtggtctggcccacccgggctcgggcagcctctgtttagctgcattctcccgtctgcctggcagccacttgtccgcaggtgcagtctggccccagcggcaggtcacaggacggggcagggagagccatggcagcccgtgggcgttctggagtggggccacctggcttcttgcgggccttggcgctgctccagctttcctgtgggttctactgggcctgcagtaggggctggatggtccgacgatgggcgtgggtgataccactaagagtctgaccttgcagtgcattgcaat

SEQ ID NO: 195046 - DNA, 270 bp, Homo sapiens
agatttaccagaactctggcctttgccccctactgttgtccctcagaatgttcctttgttgttgaagtatcttttctgctctgtgtagaaatctcacacttctctggttttagtgtcagcctcttttccaaggtctggttcagcatcctactatcatcttaattgtctagcaatggttttctctcatctcccaaaaacccaatctctcttccaaatcctgctgtctctgctcatggacctacctcacagttgctttgacttagattcctg

SEQ ID NO: 195047 - DNA, 580 bp, Homo sapiens
tggtcatccaggtgccctttaagacatttggatgcagtcatttatcatctgtatgttgtgttccttcgtcgtctttggactcatttcataatttcctttcttgccttttacttagatgcaaaaatctaaccttatctccagttcactaattttcagtgagttgctgactcccaagttctcagaaggtgattgaaaaatgagcagttgatgtggtaattgggtgttttgaggactaatcagctacaatcaggtaaacctccagggtggctgataaccatatgctgactggaaggagggtattagtgctaatcagtggtttactttcagtgggctctactgaggctccatcctaaggaataaaacaagctgcaagcttataacggagatgaagagtgcagcaggcatgccgtttttattagagttaaggttcagtacaaatccaggatggctttctggttttaaacagggaaagtcactggaaaagctggtgtgaaaacaaagaatgacctagaaatttggtgcccatttatgatgctcccccttgcacataagtgggtagttagaaatgcccagatcaata

SEQ ID NO: 195048 - DNA, 442 bp, Homo sapiens
atccttgtaatctttgtggtgtaatatgagtaattttataatttgctaatgtattaaaaagtaaaacaaaagaaaatgactcatctaactctcatggatatgcaaacacaacatgagacaaataataataatcctcatacagtgaatgaataattgtttctttaaaaaattaatataatcagagctttaggccaagctactttcaaactgctttagaaataactaaattatatgacaatttttttcctagaggagtcactggtagtattaggacattttagactctcttctaataaatttgctatggaatgaatttctcattctttagggagataatgctgttgccctgtcagcagtctgaatccataacaaagtaagatttgtgttaatacaacatttatatagtgaaatcagtttctctaaaatacctttcctgacctcc

SEQ ID NO: 195049 - DNA, 584 bp, Homo sapiens
ggcaatgaaaaggaggcctagcatgactgactgcattttgctcctaacccttcctaccgtgtggtgacatcttccaggctaactgctttttcttatttctgcacataggccaagctatctatgggagggatttagcttacagtttaactttaaagcacagatgataataatcccttccccaaactaactcctgagaagatagagaggttgtatacacaagtaacagtgttatgctgaagatttataagagaagtgtgacctgacaaaggaccaacaattttcaccatccccttgggctctcactgcagcccatgtctgtcattgtcagacctcttcacctcaatcgcctccttcttcctcccttccctaatgtacaaggagccggaaaatagtattaatttaagatggttcttcaggatgttacttcaccatctgttcagtttggtggctctctggaataaagtcaccttccctgcccctacacctcaactctcgacttattggctgtcatgcagcaagtggtgagtgcagtaagccgagatcacaccactgcactccagtctgggtgaccctgtctcaaaaaa

SEQ ID NO: 195050 - DNA, 459 bp, Homo sapiens
ataaattaataataataagaagaataatctttggagacccaggtactatccttaggccacggcttcaagtgctaaggaaggtgacatcatggcctgatacggctactagattacatccttatttcaggcaggaggaagaataaagaatggtgagggccttctaattgcatcagctcattttaaggagtctttctggaatttatttgcatcgcattagccagaacttagttatatgtcacacttaggggaacaggaaactagggaatgtcgtctttattttaggttgccatgtgcccagccataaattactaaggaaaaggggatgaaaggctttccttctctcttccttccttccttcctttttcttccttccttcctttttctttctttctttctctttctttctttctttctttctttctttctttctttctttctttctttctttctttctttctt

SEQ ID NO: 195051 - DNA, 483 bp, Homo sapiens
cagtgtagactaatggttaggagcacgtttagtaagagctacttactgtgtatccttactgtgttatctctttcagcttcagtttcctcatctgtaaaatagggaatattatttcccatcccttaggattgttgtgaagattaagtcagatgcagtgtataaaacctggaaattcataagtagccaattaatgagtggctagtattcctctcccctaccacaaaggtaaaagttggcattttacagcaagaagatagcctgagatcaggagttcgagaccagcctggccaacatggtaaaaccccatctctactaaaaatacaaaaattagctgggcatattggcgcgtgcttgtaatcccagctactagggaggctgaggcaggagaatcgcttgaacccgggaggcagaggttgcagtgagctgagatcatgccattgccctccagcttggatgataagagcgagactccatctcaaaaaa

SEQ ID NO: 195052 - DNA, 514 bp, Homo sapiens
aaagatgtccactctcgccacttcaatttaacattgtactgagtgttctaaggcaactagagaaaaataaaaaaagaaattaaaggcacccaaattggaaaggaataagtaaaactaactatttacagatgtcacaatctagaatacagaaaattcctaaagaatccactcaaaaaaactattagagccaataagcaagagttcagcaagatttcacgatatgtgatcaatatacataaatcaactgtatttctaaaattgtagcaagaagcaaaaaaaactggaattatgaaaacaattccatttaaaggagcatcaaaaacagtaaaaacacttagaaataagtttaacaagtgcaagacttgtacaacaaaacatttttgaaagaaattaaagacaatctaaaaaaatggaaagctatcttgtagttcatggatcagaagatttaatattgttaagatgataatactccctaaattgacctacaaattcaatgcaatcactatcaaaatct

SEQ ID NO: 195053 - DNA, 564 bp, Homo sapiens
aaggttgggaggaaagtaaatggtggagacaatgtaagagcgctcgaacctacctaccaaatagacaaatagatgttttctacccattttgatgtgggtcatttttacataatcacaattcattaccaccatgtacagttgtgtactactaaggaagtgaatggagcttctgttacccagcagtgagcctgaagaggactgtatctgcccagaggacagggccatctgggctagcaataggaggcctgtcagggcctcctgttgccactctggtcctagaaaaaggaattaagaggccaggcacggtggcttatgcctgtaatcccagcactttgggaggccacggcaggcagatcacctgaggtcaggagttcaagaccagcctggccaacgtggtgaaactccgtcagccaggtgtgatggcacacacctgtaatcccagctactcgggaagctgaggcaggagaatcgcttgaacctgggaggcggagattgcagtgagccgagatcgtgccagtgcactccagccagggcagcaaagtgagactctgtctcaaaaaaaga

SEQ ID NO: 195054 - DNA, 562 bp, Homo sapiens
gcgcgagcttcatcaacaaaaaacattatctagggggcactatggtcgcagctactcaggaggctgaggcaggagaatcacttgaacacaggaggtggaggttgcagtgagcagagattgcaccgttgcattccagcctgggcaacaagagtgaaactccatccccccaaaaaaataaaaataaaatgatgaatgaagaaagtaaatgtctatgaagtatggaacaatgatggtgcattggagagtttctcttacttctttatgtccctcccttccctggaagctggaaaagaagctgccagggatgaacacctttgcttctcctcatccttggaaaccattaaaactgcgtctgaatctttgctgcactcctagagtatggactggaaaatagcccaggggagtcaaaatcctgactttgattcacaaacatgcttgaaagaaaaaagaaaggaaggaaggaaaagagaaattgtggctgtgacctaaccatagctaaaaaaatctctttgacttccagtggtttggtattaatggaagcgtcgcgcaggggatcctctag

SEQ ID NO: 195055 - DNA, 510 bp, Homo sapiens
attgtggtcctactaggcaccaggatctgtccagatgtagagaaaatagcgttgaaaagatctggaagatatcattgtaatggagctgataattgattgggatgaatggaacaaaggatcataaaaatgaaaagtaaataaactgaaaacggagtgaaatgtgctattatgaataaaatgggctaatgaggtggagatttagggagtactttgggttgggaattcagagtctttcctcaacaggtgacatttaacctgagaattgaatgatgagagccagctatgtgatcaggttgaagagaattccagatagaatcttttattttgacttaaaacttcatttaacttttatgttggattttataatacatgcatgcttctttcagtgtaaatacactgtggacttttcctccgacattaatgtcatattcattgagaagtccattcagacagccttctccatttagttgctttgacttcagttcattttgtcacttcttataaactagc

SEQ ID NO: 195056 - DNA, 696 bp, Homo sapiens
gagattgagtctcgctctgtcacccaggctagagtgcagtggcacgatctcagctcactgcaacctccgcctcccagattcaagcgattctcctgcctcagcctcccgagtacctgggattataggcgcatgccgcaactcctggctaatttttgtacttttagtagagacagggtttcaccatgttggccaggctggtctggaactcctgacctcaagtgatccatccacctcggcctcccaaagtggtgggattacagaagtaagccacagtgccctgcccctgtcatatctaattttggataagaatccatgcaattggattcatcagcacacctgtttgtcatttgcaatcctgtagcagtttcgtgcacggtgttatgtttgtatgtgaagatgaatgttttatgcccctcaattatcagtaatgaacaaaccacactaaagaaagagtgtaattatcttgctaatatccctatagaaaatattacaaaatagttgtaaaaagaggcaatcaaagagtatgctggaaaaaaatgcaggaaaagacgtattacagagttgtattaagcagtgaattcataaaaatattctgatagttttctagattttgtgctgcttatccacttttcatttgtaattttattataatttattttcctattctaaataaacatttgttttaatctaatttta

SEQ ID NO: 195057 - DNA, 226 bp, Homo sapiens
ataaaaccatttcaactcaaattttaatccagtaaaaatcaagatctattattcctaaagtgaaaagaaagtcatcccaattactttagattaaaattactatgttaagaattagcacttcatcgtcaatgctatttgaaacatttagttatccacttcaactgtatctttcaaggcctaatatagaatgacaatttgttttcttgaatgaaactgagcaaataca

SEQ ID NO: 195058 - DNA, 263 bp, Homo sapiens
caccactcctatagatcagtatagtattggccaggtatggtggctcaagcctgtaatcccagccactaggtagactgaggcaggagaattgcttgaacccagggggtggaggttgcagtaagccaagattgggctgcttcactccagcctgggtgacagagtgagactttgcctcaaaaacaaaaacaaaaaacacaaataatagatgcatgtttaaattcaaagtttgattattgttacccagtactgatccttgagagcac

SEQ ID NO: 195059 - DNA, 580 bp, Homo sapiens
tctttatcactgagctggacactttcaggtgtgtattattttgatggctaaaaatatcctgtacaagtactttcaccttctgcaggaacttaaagtaacttcaacagaagcacaaatgttccataatatttaactttctgccatgaatcttaatagcataaaaatactgaaagagcgaaaaacaattataaaatctctgcatttatatacagtaagactaacgagagaggaaatcatcaagaaacaatttcaaaaaagcctttatcacattcaagaactatactcaactgtttacttaccaagctacaagcaccaagaaaaaagagaaaatgagtgacaaagaatgagtgttgagaaaggaaacagccagagagaaagcttggcacagatcacactgattgtattaggatgttaaacacaggtgcaaagcacacatcaagagagctgctagaacagctgaaaaaggaaagaataccctgtatatgccaagagacaattttgccaactctgacttcagtcctttaaaaaaaaatacctcttttctgattatagaaataatacatgtaacaatgtggaaaat

SEQ ID NO: 195060 - DNA, 148 bp, Homo sapiens
acgaaatttaaaagtaagttagtatagaaattcagactcttgcacaaatggtgctctatggctgatcacccaggaagattgccattatacttgagttcagcttactagtttgtggttgatgatactttcacatttaccttcattgtct

SEQ ID NO: 195061 - DNA, 613 bp, Homo sapiens
ccgagattatgtgcatcagttttgaaacatttctctgtactgattctacatcaatactttgaagagaactattcctccattcccaagaggcttgcctccactcctcttgtgcttcccatagttttttcctcaaagtcaagtcaccttcaatgtcagagatctctgaaagcacaatctgtgtaatttcttccacattaacagaatgcatatgagattgagaatcactgaaacaatcctgataatgtgaatatgctttagctttgttagttaaacttgcagcttcccctgagagagtctggatcatttccattgctgttgacacttgagtaccagcacataacagaagaggagttcttatctaaaaaataagagtaggactttctaagagaaatcagtatgtctagaacgtactgttttactggcagtgaaagcattttagtatataatctaggcttttacctgataagtgagtgaaactggaactatcattaccatttggcccagacaaagataaagattggcccagaaagatttcagggggttttagtcccttttatgccatgagcccatttggcagtctcttgaagcctatggtaaaagtcaccagccatgc

SEQ ID NO: 195062 - DNA, 560 bp, Homo sapiens
agcagggacaaaaacaaagatatgaatctaggtggttttaacgtgggtcatggggggaggagatatttgacagggatatggaagggggagaaagtagataagggatgccaagcatgtcagaaacaggaaagcaaatattgtcctggggggaagcatgataagattatatttacaaatgtatgttgatcatgtatatttaaacgtaattttaaaaagaaaaagttctgtgattaaaaagtaaaattttcccagtctggccattccttttctttattctccttgcttcttgacttataaatttattttacaacttagaaaaaatacaaattgactctccatttaattgatacatttgttttttttttcttttaataggtgaaaacacttttcaaatccaagtttataatttcactgtgcaaggtagacagtaactttttaaatactacttgatcatatcagaaaataaagttttccttaaaaggaaaacttacagattttctccactgtaaatttcagctgagattatataccagaaattggtaccagaaatgccctgaaga

SEQ ID NO: 195063 - DNA, 263 bp, Homo sapiens
ggtctagatctcctgacctcgtgatctgcccgcctcggcctcccaaagtgctcggattacaggcgtgagccaccgcgcccggcccaaagtgactcttatactccattataattatgaatttggaaaacaataaggatattatatgagtctgctcaggctgctgtaaccaaagaccacaggctgtgtggcttaaacaatagaaatttcttttctcacaattctggaggctggaagtccaagatcaaggtgccaggaaactcagt

SEQ ID NO: 195064 - DNA, 268 bp, Homo sapiens
atttctgatggaaacaagggccattccccagagacaggggagcagcccggtgggcaccttcagagggcttcaggtgagggcgtgttctcatgtgtcgggaagggtggaggctgggtcatggagtaggcagcctctcaatgacactctccaagagtctctttttcagcccagtttactttagctcaggcatggggactcgtacctgtaatctcagcactttgggaggtcaagcaggagaatacttgagcccaggggtttgggtcccacc

SEQ ID NO: 195065 - DNA, 490 bp, Homo sapiens
attttgattacattgctggagagctctttccatcctttggtgtgtcattacatttagatttttcatggtgcccaaattcttgtgctgtttccttctcatctggggacattaacatttacaattttgtaattattttcatacaggtgaatattttatttttgttttattccctatatattttttttcttttcctttccctcttcactatagggtgtgactcttgagagtactgagcagggtcttttggctttgtttctatagccctatgcacgtctgtcactaggttttatactgggctgtgcagtttgacctacaagccagtagatggtacttacaggtaacagccagctgcagccaatgtggctgagtatatacttgatcttgttactgagataatctctctgtttcctcaggaaatgggctgattcatgaagtacacagtggtcttagctccctgcttagtcttgggggactggggccaagataggca

SEQ ID NO: 195066 - DNA, 436 bp, Homo sapiens
ttcccttccccaccccaatacagggcttggttctcagccccttttgtccttaccatacacattcattcatgagatgctatgacaaattcagtaattcctatcccttgtctccaagtttagtgagtcatgagcagtgaagctgatgctaaaaagaaatgtcacacctggatgggactgttgaatctactcaatgcctcacctcagaagtggaagttgctgacttcaatattttgtttttgtggtctcttgagggaaagaccttttgatgctggcttcacaagtgacctgccagtccagtttcactagcgcttaccaagtgataggtaacacagccaaaatttgtgattctcgcttgaacccaggaggcagaggttgcagtgagccaagatcgcaccactgcactccagcctgggcgacagagcaagactctatctca

SEQ ID NO: 195067 - DNA, 649 bp, Homo sapiens
aagatctggtccctgcccccagcctggcagaaaaaggcatgtctgtaaataattaagagccatgcaatggtccagcaccatcataacataacgtacaattagcacaccaaccaatcacacttttttccaggaaggcaagagggatgatagccaagtttgaggcaggttaatattgtcctgcgtgtgcttgtggaattcagaacttttagacactgaaatatcattttcactatgaactctattacacgattttccactgtcagaaactcactcttaagagaactcagacagttctcttaaaatggtctttttttctactaccgtttggttattagtcaaggatctctagagaagcagaagaaacaggatacaggagagcaagagggagaaaaacacagagagatcttaaggaattggctcaagcgattatggtggctggcaagtatgaaatctgtagggcgggctggtagaaattctagtaagagttgacattgcagtattgagttcaaatctgcagagtatgccagaataggaaacttggatggcatttgtatgttacatttttgaagcagaactcctttcccaggaaatcttggcttttgctcttaagggttgcaactgattagataaggcccacctacattatgga

SEQ ID NO: 195068 - DNA, 2258 bp, Homo sapiens
  misc_feature (773)..(773): n is a, c, g, or t
  misc_feature (781)..(781): n is a, c, g, or t
  misc_feature (784)..(784): n is a, c, g, or t
  misc_feature (789)..(789): n is a, c, g, or t
  misc_feature (809)..(809): n is a, c, g, or t
  misc_feature (867)..(867): n is a, c, g, or t
  misc_feature (883)..(884): n is a, c, g, or t
  misc_feature (910)..(910): n is a, c, g, or t
  misc_feature (993)..(993): n is a, c, g, or t
  misc_feature (1020)..(1020): n is a, c, g, or t
  misc_feature (1034)..(1034): n is a, c, g, or t
  misc_feature (1073)..(1073): n is a, c, g, or t
  misc_feature (1137)..(1137): n is a, c, g, or t
  misc_feature (1188)..(1188): n is a, c, g, or t
  misc_feature (1413)..(1413): n is a, c, g, or t
  misc_feature (1467)..(1467): n is a, c, g, or t
tggtagagagacacaagattattctaaaatgtatatggaaagcaattccaaaaaagaagagtagaggaattgccctccctgatgttgagaaccgtacagctacagcacagcgttatacggctcctggcagacaaccagtcctgctgcagcgaggtggggacaaggccgggagcagctcacttcccagtagaggccatccgatggcgccagggcacggggcagctgccgtcctcatggcccggggtaacgtgggcacagggtttcctcatcccactgtgctctgtgtctcccctgagcccggtgattttacgcacctgacttcgttagtcttctcggcaatgcccagcgtgcagaccaggctcgagaggtgtgtcggtgtgcccagggtcacgcagcttcctggtggccaagccgaggttagaagctagttctggtgggtgcgaaagcccccgatgtcggcagctctgccaccaggcccgcacaagcaggtggtgtaagaggggaggcgttggggccggcagtgctcaagtcaggattgagccgtctatctggaaggtctgttgagggtgtgtgctggtggccgggaggtggtggcaggctgactacctgccattttcctgcagtgcctaggcccaggagagggagcagcccccggtcaggacccagctgcaggacaccccatcctcatggaccttggttcccgctctccgtccccccacaaatgggctcccagcataacttcccccgagggctcctttcctctccccacacanagccctgntcnggagnggcgcttgcagcacaccaangacaggaggattgggcttcagggaagcaggcgcctggagctgtgtccagttaggtgcntggcgcttgcagatcnnagcatggaatattcatgcctcccccngcccagcagctgcggcttctcatctggaacaagggggtgcttctcccaggaaggccagtgggagcaggggtgtgtctgagaangccgggcgctctgccctcacgatggcngctgatgccacagncccggcctctgtgcccaggccactctccagcctggtgangtctgttctgggaaaagagagaagcaagacagatgtgggccttgccctgtggggccagggcacnggcaggaatcccacttggggttaagacgctgcagtcacccctccaggtgcnggggtcctctgtggccgtggcgttctaggagagatgggcagggagacgctggcgccctgttgtgtagcttgtccttgtgtctgcttcacaggctcttccactgtgcaatttcctaaaattttggcgaggcccatttatccattttaattttattctatggattgtgctttggtgttgagtgtcagagctctgcctcatccagatcctgaagatttcttttttaanataattctgtgttttacatgtaagttcatgatacagtttgagttaaattttatntgagatgtgaggtttcggtcaaaaaaaatttttttttaactaagtgtgtccagctcctccggctccagctgtagcaaagacaaggctgcccttcctccactgaagcgcctttgtgacttttctgtgacttttccgtatcgattaatagggtcatatgttgtttattctttagcctgttgatatagcagattacattgattgattttcaaataccaagctagcctcgtacacctaaacgaagtcccacttggtcacggcataatattctctgttagaaagtggcctggacgcgtctgtgggtctctttcgagttcctctgttctgttctgctggtctccacatctcccctccagcgctgccccagccatgtctgtctgacgtaggagccgtataacgctgtgctgtagctgtacggttctcaacatcaggaagggcaattcctctactcttcttttttggaattgctttccatatacattttagaataatcttgtgtctctctaccaaaaaaaaaaaaaaaaatgctggccgggcatggtggctcacgcctgtaatcccaacacttggggaagccaaggcaaaaggatcgcttgagcccaggagttgggagaccagcctgggcaacacagggagaccccatctctatgaaaaaaatacagccatgagtggtggtgcgcacctgtagttacagctacttggcacgttgaggcaggaagattgcctgaggctgcagtgagccaagaccacaccactgcactccagcctgggtgacagaataagaccctctttcc

SEQ ID NO: 195069 - DNA, 120 bp, Homo sapiens
acataccatcccaatgaaaagctttgcactaggaaaaagtttcctcaaggatagctttggaaaacagaggaaaacgaaacaaaattgcaccaccctgacacagtgactattatgaactat

SEQ ID NO: 195070 - DNA, 626 bp, Homo sapiens
tgtctgtcccgctagagtcaatgtgccgtaatgtcaacctaccttcggccgcagtataattctgcggggagccccccgaatactctctgctggcagttgtgatcctcctggaagtgaaccacgtttatctgcattctcttaccagtttgcttggtgactcagtctccctgggtacactgccaaaaccaacttctagaggaaagtctgagtcctgggccgcagtgaccccatgcagacatggccagccacctaggaggcatgtcagggttgcaggggcccttgaacacttggatcttgcttgttttcatgcttagccatggaactatgtcctagaacatgagtagctttgtttcttgccagacaattcctcagtattgtgcagacccagacacaacaagatgaagaaaactctagacgtctgtgaggcccagataaacccgatggaacagccctgggcaaagccccattcagggtaggggaaacatggccactactaatgcctaaaccaccccaccccatgtctcctctctaagggtcttctatgaccctgacaccatcttcttccaaagcgtggatgaaaaaggaacaggaggcgagcgcagtggctcacgcctgtaatcccagca

SEQ ID NO: 195071 - DNA, 352 bp, Homo sapiens
tgctgggattacaggcatgagccactgcccgtggtcctatttttatttttgaaaattaattatttttgcttcatttctttttatgggtgagcagtattccacagtatggaacaaccaaattttatttatctgttcgttggcggatggacacttggattgcttcccccttttggccattatgaatcatgtttcttgttccttttggtttggttttcccgagaagctctttgcagcccagctgtctgtattcctctagcttggctatttggaaagcaagagaaagcgtagctgagcgtgggtggatggctgggagcgggtgtggggaggggatgcaggaaaggggagtttcagg

SEQ ID NO: 195072 - DNA, 784 bp, Homo sapiens
aactctttaatggtgctgacaggtatcaaatataaagatattacaatttagataattgaggagataagaggaaaagggatctgctccgtcagctcttctgcttacatgggattggaatcatttttatggctcctttcataacttgccatgactccaagcctgttctcaccataaagtttgtgtaaatgctactcttcatgtttaaccttgtggtgattcatctgttcagtagagcaggctgcaaatacttggattattctatgtacctttcagcctcttccaagagaggctacttatgattctgaaaaagtggtcactattccctgaatgtttagaatagtcaagagccattcatacagagggaaaatagtttcccaggtgtagctgttccttaattcatgtacgcatgtttaaaatttatttttgatttctacttcatcttctcttactgtatgacctttttagtgctaacctacttaagtatttctgtctataagtgtttttgtaaaaaaatgaacagactttttttttacccttctcagataagtctataatatttcgatctgaaaacagacagaaaagcagcagtctttgtgtttgtcaccttcattccatcctcttctttctcctgaaaatgcattggtttccttcctttacacttatttcctcgtacttctttgcttccttatgaactgtaggcccttgtgtagctatatagtatttttacacctgttttgtctgctaatacttcagcctaaccttgatcactttctcctgttcctta

SEQ ID NO: 195073 - DNA, 508 bp, Homo sapiens
tcccagcactttgggaggacaaggtggaccacctgaggtcaggagtttgagaccagcttggccaacatggcaaaaccctgtctctactaaaaatacaaaaattagccgggcatggtggtgcacgcctgtagtcccagctgagatcgtgccactgcactcaagcctgggtgacagagtgagactccgtctcaaaaaaaaagacagggaggaagcacgagagaggttcagagtattggtgtttctctatatcttaatctgggtcaaatatataggtatttttttccttatttacattgaaggactggagtgagtcatatttatacaggtgcatttttatgatttttcatcaaactataatttgtgcactttcagtatatgtgatatactttaattttttactgtatgtatttgaggtgtatgacatgatgttttgatatactgacttatcttgatagacataatgaactgattactatcaagcaaatgaacatacccatcatctcatata

SEQ ID NO: 195074 - DNA, 575 bp, Homo sapiens
aacctcacaagtcaacttgttccacagctaagggagtaaagtggaaaatctggcaacatggtgatttactgagagtcctttgagaggcctgcagttccagaagactcaggaaagatagttctgacacctggcattctagaaaacaggctgtctcttccatgaatatgcctggattctctttgtctctcatgtcaaagaggagtggaacagctgcccctgtcagggggcccttttccaaggctcctgcttgctgcagtccccaggataagctggggcttccccactccctgctcctcagagacattggtaccatccaggacagatgtgctccagacagaggggagggtctccaggaccctccccactagacccccaccactgttccaaccctgtgtgaatctcagacaccacgacccctaaccaggtcttggtcaatcaccctcctcactttcttgttttggtcttaagtgtccaaaacactcagactttaattttttagtaattttttaaaagatgacatatatggaaaagtatagaaatcctaaagaacagctcaatgaactttcataaattca

SEQ ID NO: 195075 - DNA, 276 bp, Homo sapiens
aagagttaaggaatggttatgacgacatggagttggtgaggggcagctcctgttcctaaaactttattggtgaagggtatagtactttgagaaaagttatttttaggtgagggaaaagtgccagaagaaagggagagattaaaaattcaagagagacagggggatattgatgacagaataaggttctggagaaggcaggagggtgcagggcaaccacagcgagtccacctgccaacacctccacggaaagagagacccgcctagatagacagactc

SEQ ID NO: 195076 - DNA, 484 bp, Homo sapiens
cggcctctgcagaaggaccagcgcggcagcggggtccccagagagactccatgactgagcagcaaggagaactgggcgttctcggcgaggatccacagaacaacagttccagaaaaagccagggcgcatcgggccgcggcgggttgggataaggaaccgcatgtaagctcttgaccatctgtttaagaagctgtgacatgcgggactcgtggggcagtgactgccggctccacactcatgggtccggcacacagctcatctgcaaatggaagactctccagtcacctcaactggacaaaaaaacgagattcagtttctttcattccacgtgttaatcctgtattccagtatactttttttcttttcttttttttattttggggggatggagtcttgctctgtctcccaggctgaagtgcagtgagctgagatcatgccactgcactctagcccaggcgacagtgcgagactctcccaaaaaaaa

SEQ ID NO: 195077 - DNA, 359 bp, Homo sapiens
gctggcccaacaatttcagtggccaagaaattttatcatcccaggcacaacatttcttgtttgcttgatgtcaattccatgtacagtagtccttccctgagctttcactttccacctttttgagttacctgcagtacaacacagtaagatattttgagagagagagaaaccacattcatctatcttttattacattatactgttattattggtctgttttattattagttattgttgttaatctcttactctgcctaatgtataactatcataggtatgtaggtatagggaaaaacgtagtatacacagggtctgatactatccagtttcaggcactcactgtgggtcctggaactatc

SEQ ID NO: 195078 - DNA, 274 bp, Homo sapiens
actttcctaaaatttctgtgccttctcccacaccatacacagatctgcaaagcatcagggtgcaccagtggttaagactgcatatttgatcaaatctttaaagtctgtcacatctgattatgtaatgctgttccctaaatctgtagcatcctaccctagttcaggaagacaatctggtacactgaaaaatgtatctttcagcttcaatcacaggttctaaagttagagaaatctgtgttagaaacccagctttcctgttttctagcattgtatc

SEQ ID NO: 195079 - DNA, 270 bp, Homo sapiens
tgtattggtggtgctgacactgggtgagaccaaggagaaattttaaagctgtgtgtcctggggccgggggtggtggctcacgcctgtaatcccagttcagaatctcggtgcgtccacaccaaacaattccatgagggctgaagagacagagctgaaaggcttgtctgacatcacaaaagacagaaaagtgagccccattttcatctctatcctgacaatgttcctggcttgatttcctccttccagcagacagaagaatcagggagcgca

SEQ ID NO: 195080 - DNA, 381 bp, Homo sapiens
acttctcccatcaggattcattagcctgtttcagcctctacgccggcaggacaggtcccagctgcttgtcccctgcagtgaggccagttggacaggtggagcctacagggaccctccctggagagcaaagggcctccccagggtgccggccagggaatccctgctttggccaagctctttcccacacatgcctggggagtagggaagggtggtttccagaaaaaatgaaacctctggccaggcaaccatggctttcaggtctggagtgcatgggaaacggaaagtcaggaccaaaccctcagtgtttttcctaagacgatcatcctttggcagagagggacctttgagggactctggagagagagctgagggacagggtgg

SEQ ID NO: 195081 - DNA, 366 bp, Homo sapiens
gagataaccagtgagtcaacaacaccaacgactgaaaagcaaaaaggaatggagatgagaaaaggcacgtcgcgttcaacaggtccaaggtccaagagtacctgaaacttgtcactcttccactgtttcttggctcagggaatggtaccactgccaagttttgctggttagaaatatagaaggtattcatgatatctgcctcccttatgttcattatccaaatcatcacataggcaacagccaaaggaaaaagcacgtcaagtagagagaatcacatatgcaatgtttctatgttgaaagacaacatggtgggttctggagattaaagacctgttagtttgaaatagaagaaggggatagttcatg

SEQ ID NO: 195082 - DNA, 450 bp, Homo sapiens
tgacttgggtagagtgatgtctggttggtgctgcctatctcatataagccagggacaaatcaatgccttatttattccagcttggcttttggtctgtgcccatacctggtttatgccttggacacatgggaaaaaagattgtgttggctatttgagatctcttgagattccatgtgtattttagaatgagtttttctatttctgcaaaaactgtcactgagactttgatagggattacattgaatctgaagatcactttatatgactcaaggacattttttttaaaaaaagatcactttggagagtgttgtcgtcttagcaatattaagtcttcaatccatgaacctggaaagtctttccatttatttagagcttctttaatttctttcagcagtgttttgtagttttcagttataagtcctgccttccatggttaaatcatttctgagt

SEQ ID NO: 195083 - DNA, 181 bp, Homo sapiens
tccatgtggactgaattagtatacctttgaaggtattgtagaatccaggaggagacgtggagtattagaactaggtgctaagtggaaaagatggatttgagagagataagtaataaagttgacagaatttgtccagggggaaatcttgagcaactgctggtatggagcctcggcgtgtgca

SEQ ID NO: 195084 - DNA, 388 bp, Homo sapiens
aactgagaactcctgtacacaaaaatactaggggaaagggcttaaccactgggtcaaaatttgcagttgctctgacatgcacaatcaaagcactcgaagagatatgcctgggaaataggattttattgatatttatgggtaagtttgtttactacaagccttagccatttcttctctttactttcttccttttagcaaaacacactccgcttcccagtgcccaacatgggggcacaggacagggactattgtgctccaggcttccttgcagcacatctcaaccagtattggctacaactccagcaccacgcaccaatttcaggaaaattagagttcagccctttctttctctccattttcgtaatctcacagaggcacagattgcagt

SEQ ID NO: 195085 - DNA, 157 bp, Homo sapiens
ccagctctgccacttactagctctgtgatttatggcaagttatttaacctctatgagcctcagtttccttaacttgccctaaattacatagcttgtattgatcccactctcagcaaggtattacactagttttctcataaatactgtcttttagtcc

SEQ ID NO: 195086 - DNA, 608 bp, Homo sapiens
gcacaccgcttgatagtggtggaaccagaactcgattattttttttgaaagtttttaaatcccatgttttttctttttggtgttagagctaatactttcatttgacttgttttctcttcttttaagcaaatttaatactccttctggatttggaaaaccatttcctacctggtttcaacccataggagaaaaaaatcattctccttcaaggtgcaacactggtaaaagtaggattttgcaggccatatctgattaatcaaatgatcagaacggtctatgattagagataagatagactcttctatgatttttattgctaacaacaaaccaatttaaattatacttttggtgtttcaagcttagtaagtttaaagtgtactaaggacccagctgcattctgttcccctgtgtgcatctccaacttgaagagaaggttcagtcatgccatgtgattgatggtgttaagtgccacattttatttttttaaacctctctgctgtgtattgattgaataaaagcaacaatgattaaagaaaatgatgaaaaaaattgatgctagtttgaatttataaaatgagaaattaagctccagatggagcctcttagtt

SEQ ID NO: 195087 - DNA, 489 bp, Homo sapiens
caggtgttcacctatttgttcactaattcttttattgtgagtgtgcatgtgtgtgggtgggtgtgacatttattatgaaccagagggcaggagccagtgacacagtggtgcagagaataatcatattccctgccttcctggggtcatacagcttggtggaggacacagatgtgaattcggtaatcactccaataaatattctcctacagatgaagaaagatgatacgatgtgatggacaacagagacttatatggtggggtctgggctggtctttctgaagctaagactggcaggatgagcaggagtttgccagacaaagaggagtggagttgttttccaaacacatctcagcacaaagtgttgtctttgctgggagctgaaaaaagatagtgtgggcagagaccattaggtgagacgcttgatatgagatacaacctcaacaggtggaagaagatcatgagagatgaagagaggaatatagtacagca

SEQ ID NO: 195088 - DNA, 328 bp, Homo sapiens
ctgttactcttttcaccccaaattcaaaaaccactaaccatctgcttccaggattgctgttcccagcgcagcccgctgcagtgtgatttctaacccgccttcacaaggtcaccttagttgatggagtcagtggctggtttttagtccttattctgttttgttgttttgttttgttgttgttgttgttttgagacggagtctcgctctgtcacccagctacttgggggctgaggtgggaggatcacttgagcttgggaggcggaggttgcagtgagctggtattgaaccactgcactccagcctgggtgacagagtaagagcccatctc

SEQ ID NO: 195089 - DNA, 123 bp, Homo sapiens
gcttcgatgcattttaattattacctctttgtaagataaaaaatcactgaatacaacttacggagaactataaagtaaatttcaactgccaaagggagaggagggcacaccgaagaatcttat

SEQ ID NO: 195090 - DNA, 155 bp, Homo sapiens
ctgttttacctaggatttcggattctctggagatgggggaagcttcaggctcttccccaaaccctcaccaccccatgcatacacacacacgtgcatgcactcgccactacccagcacacgccatcagccctctccctctcccacttgcacaatct

SEQ ID NO: 195091 - DNA, 474 bp, Homo sapiens
gtttaatattgtaccctaactgttttcatttagcattaaatcaaaagcatttttcatatatctgaatagccttcataactatccagtgtttaaagaatcatgattttatgaccagatgttcagttttagaactttttcttacactagtagagtaggtttgctggccaggcctgcagtatgtcagcattcttgccacacctgggttttcttcccttaatggagagctgaccaactgattttcagctttataagggatcctgcaaccttttcttattagtgttctcttaaacttaagtactagagatgacatcacagaaaatcaagtccatcctactaaacaactacagaacgcctttcccaagagcaggcaggtgactttctccctgtgacaatcagttcaaaaaggcgctgtgtctcttctttgctacatgagatttgacttgtttaataacttgcttatataattttattgac

SEQ ID NO: 195092 - DNA, 560 bp, Homo sapiens
cttgcacgttcttcgactagcccaaccatacgttcattccccacataccccacatttgtgctcaaatgaaatatataattttattgtccaataattcatgaaagcacataaaaagaaagtgcgaaaaaaataagaggctacatattgcataacatcatggataactttgaaggcagttaaagcattttaatagtttcatttgacttcaaaataaatgtgtgcaaaagttagtgacaatgctatgaacttagtttaagtagcagctaaactgtagctattaatatactgtacagtagttgctgccagttagaatagaatgttccaggccaaatattaatagatgcatttattcccactgagcaagctaaaaaactaataaagtattagtttgttaataaagtaatagtaaaactaataagtattgcccacagattactcttgctaattcaggtttatgaaaacatgaatttgtattccacaagaatatattcacatgtggttacattgcttacctaatttgattcaatctaatgaatatttccatgaaggatttatccctt

SEQ ID NO: 195093 - DNA, 1220 bp, Homo sapiens
ctcaaactttttggtctcaggcctagaatttgccgggtaaaatacaggacgcccaattaaatgtgactttcaggtaaacgacgaacaatttttttagcgtgagtgtatcccatgcaataatggtttatccgagaggcgtttaactgggggtcctgtatttttatgtgctaaatctggcaatccaggtctggcgtggtggctcacgcctgcaatcccagcactttgggagaccaaggccggcggattacttgagctcaggagttcgagatcagcctggccaacgtggtgaaaccccttctctaataaatatacaaaaattagccgggctcagtggcgggctctggggtaatcccagctaccctggaggctgcggcagaagaatctcttgagcgcgggaggtggaggctgcagtgagccaagatcgcgccattgcactccagcctgggggatagagtgagactccgtctcaaaaaaaaaaaaaaaatctggcaatcttacttaggaaccctttacactcttaaaaattatactttggacatcgccctacacctcccccatgtctatacttttgtttagttgaattcagagcatgccgtttatggacatcgacaaagggttcagaaaatgccatccactgacatctatgtattagaaattgaaattgagacattttacagcctaagatgtcaagcgcacattcttcagccgttggataatatcgttgcaaatcctgtggactctgaagagtataccgattagagaatgcggagaaaatcgaatagctggctgttattcaattcaaaactgttggaaaacagttttggctctgaggacccagcagttgacaaacagcaggcctgggacaagagcagtatgagaagtcagatcgcctcttttaatgtcactagtcagtacaggcctcgccagacaagtctctcctcagcctcacttggaagaacatgccctctcttcatgatcctgggtttcctagacttagtatccttggaaaggtcttgatgaatatattgtggtgggaagcagtggggagaaacaaacgcctattatgtcacaaaaccacatttagtgcttataacaaccttggaatgagatattatcagattttactgttaattggtgatcaacggaggcacttctatgtggactggctgtcattatagctgctgcccttggcaccaatttcgaggagggctttggaacag

SEQ ID NO: 195094 - DNA, 805 bp, Homo sapiens
  misc_feature (31)..(31): n is a, c, g, or t
tggtgatagatctagaggaccctgatcaatncacacgttcaagctaatggctacttatttcaagacaggcctgccaatatagacaacacaaaggggcctccttagcctcccaagcatgtctgaagttaagtgaccctgcctgaacttttagcttggttctatctgattactttccctccatggcacccaccctggctccctggctttctatttgatttttttttttttaatttacaaaataaatgtccctggaacagttctaaggaatgaccagccagagtcaacctagaccctagcggaaccaagccatggtgtggacacacaatacatcagaagaacaaggctctggggttagacagacccaagtcactgactcaggctgagccatttcctcatctgtgaacagggtgaggatccccgcctgggagctgtggtaagatgtgagcaaggcagcgtctgtagagtgcttggcgtgcagtgggcataccttcatgtctgtagcacggacccatggacccatcacactccctttcgacttccctgggctggccatcctacacaacttccctagctccaaggtcttccttaagaagagactcctccctccccccagtttaacaacataggaactctcctccaaaaccccaaaccagctcacagcccagagggaactgcaggtgctccattgctcccacccccaacccaggggcagtagagaggcagcagggcaagccagagagagggctggggtaagagtccagagggctcactctgtccctttttgtgatcctttgggcattttgga

SEQ ID NO: 195095 - DNA, 200 bp, Homo sapiens
accgcactgtcctctcactgctattatcatcatcacctgctactctacgaagatgctgtgttcttgtttctttggacctcccatagcattttgtattatatagatcttttcacattttaactttttgttgtgaccttgacaccttattcatcttttaagctaagcacctgaaataacactcgtcacacaaaagatgccct

SEQ ID NO: 195096 - DNA, 276 bp, Homo sapiens
gatgtgagcctggaaactgtaaagagccagaaaagaagcagaggggaaaaagacaatgagcaaaacactcagagacgcaggagggagaaagagtcctgctggcattcagaaccctgtgtcaggtctttctgaatcacccatttcctctgtccttctggctgtctggttacctgagtcattaccttcgcattcttctgaagctatttcctattgtatttctgccgtgtgaaaccaaagggtgttccccagcacaagggtttggaattgcagcgctct

SEQ ID NO: 195097 - DNA, 247 bp, Homo sapiens
ctatagatattacctttctccttctctacctatacaattccatgtctgaacttatttagcaagtctaatgactggaacatgaaatattttccaaatggccccactgaatggatctgcagtccatcattgtacatttggaatgatgtcataaatggttacattttaatccttcctgtattttctaaatgggaatagggaggggggaacttgggagaaagtggtttgcatatgatattctaagcccgaa

SEQ ID NO: 195098 - DNA, 221 bp, Homo sapiens
cctcgcggcccggcaggtagctgttactgtttgccaaatggaaaaaagattgattgaaaaacattttttcattattattttccaaaaaggtttttaaagaagaaaacagaaaacatgctaatctttctttttgttgtttatgacctcgtaagtaaagttagctaatcattttctctgtttatattttccattcacctatcagtaacagatacctttcctgt

SEQ ID NO: 195099 - DNA, 237 bp, Homo sapiens
ttaagtaaaactttcatgtgtgggtaacaaatccttgcatgtcaggtggtttcctaaattaattgcatttcacagaattgaaaagatctaacaaactgactcattattacaatgaatttctatgattaccacgtgctttgtggcatgtaagaattcaaataatagaaactgctatagcaaaactcttaccattcttacctttattttgttaatttatggcttctcaacatttacaca

SEQ ID NO: 195100 - DNA, 435 bp, Homo sapiens
tggccctcacacgtgcaggcagctttgcataaaatttcaggggtttcacagatggcttaagcccatctgcaaagtcctcacaaggggaaggtagaactcagattaagaacggatgaagaagatcagaagccttcattcagccaactttgtctcttaatgttccagacagcagccatctctgccatctcaggcctgtgggtctgttgccaaagcagacagccgtaggctgtgttccaataaaactcaatttacaaaaacagacagctagcctgtgggctgtagtttgccgaccccgatctagattctagaggaataaatggaatacatattcactacattatttcctgaaactgagcttttgaaaagaactaaacaaaaaattcaaggttgtattctctggtaagatcaaatttagctaaattaaggcagatccca

SEQ ID NO: 195101 - DNA, 335 bp, Homo sapiens
atctagaggatcccttcgattggcgggcacttaatatacttagatgagaaattttataaatgctgcagcataatagattatcttaaaatagttactgattgttttgtttaaaatgtttgaatttaaaatgttcacattttgaacatccaagtggattgttacttggaataaatgctaagcaatattttttgctaaatttctgatttatttggggagcaggaagaatgccttatcttaattttgaatcacctttgtaagtaaggtgcaacccaaaacataggcaatgctagttgccagatttttgaaccactgcctggtaagttgtccttttggtt

SEQ ID NO: 195102 - DNA, 429 bp, Homo sapiens
ggagttgttccccttttagaaaaaagctgtcttaggattcaagtttggggagcaggggaggatgttcagttttcaagcaagagggccagacaggagagggtccaggacaagccagagggacaggacaaaccaagggtccacaggggtttgtcctggggagggagggaaggccagaaaacaccccatttactgtgtctgagactccagctgggacaaggcccacagcagcctgtcgttaggaggacactcgaaggcatggcatgggggagaggggcagcgcacagcacgcagaggggcctgcacgtgccccgcggactccacatctgtgcacatgcctgtgtgttgtcagggaagctgtgcagcccggctaaaattacaattctttggcgagaggatgttgcttattgtcaggagcagatccttttggac

SEQ ID NO: 195103 - DNA, 661 bp, Homo sapiens
taaagataatgtcttgctctgtcacctaggctggagtgcagtggcatgatcatggctcactgcagcctcgaactctgggcacaagagagcctcctgagtagctaggactacaggagtgcaccaccatacctggctaatttttttttttgtatagatgggatcttgctatgttgcccaggctgatctcaaattcctgggctgaaaggatccctctgccttggcctggcaaagcgctgggattacaggcatgaaccactgtgcccagatgaccccatctttcaataggaggaactttttagggctgtgttctcatgccaccacaacccagggggccagattagctgaggacgtgtcctctaagcccttctgtgtcccttctgttttcagtttctcttctctatgagtatctctgtctcctttccttggaggtgacagagggcacccatgtgcccaggctcacccaggcagtgggtgacaccagtgggtgacaatgtggatggcccgccatgccagacactcactccaatgcccattttacagatgagaagactgagtactgagtggccaggtagactgagcaggatcgcagagggaggatttgttcctgggccaatccccttgtttcccatccatgttccctatccttggcaacttgggggac

SEQ ID NO: 195104 - DNA, 336 bp, Homo sapiens
atcaaagctactttctttcttatttttcgtcctactagttttctttaagaatcttggtttgtacatataagttagcgccagcccacaaataaactggtaggagtaagggctatatacctttccacaccttaaaaccatctgctcagtttgacatttaaaagggcggagagcagagaaggaggaggggggagtagggggaagaaaggagtcagggacagagaaaaagattcaaacgcgaaaaaaatggcttgcactttagcccacaagtttgtgtcaattgcacatagcgcttgaatgcacgttttgcacacaccacgcccgggaactggcggcggg

SEQ ID NO: 195105 - DNA, 619 bp, Homo sapiens
tcctgcctcagcataccgagtagttgggattacaggtgccctccaccactcccggctaattttttgcattgttagtagagacagggttttaccatgtgggccaagctggtctcgaactcctgacttcaggcgatctgccgaccttgccctcccaaagtgctaggattacaggcgtgagccatcgtgcctgaagactcatgtattcttgattgaaataatttgcttatgtctcagttctacagttgaccttctttcactgttttcaaggtcaatagctgtgtgttcacacttctgcattttataaatgttactgtgattttcttgtaaggaagaattaactgtcgggaatcaatgtcatcagaatcttgcaaaagaagtttctttagcataggtatgcgtaagatgcttctctgattttcaaggatgtgggtgataagaccaacccctcccattagcccttccaggcccccatgtaagacttcacacacaccttctcactcatctcagaccttgtcagtgtaacttggtgaaaatgtgagcctccctgcaacttggcgatgaggggcttcaccagaaaagctcagcccgagtgactctgacccctgaaatgactggcaaa

SEQ ID NO: 195106 - DNA, 371 bp, Homo sapiens
gcctacgtgtatgttagtaagttcgtataaaaagcaacctgtttacaataataattgagcagcaagataatgagttgggttttgaagaacagggaggatctgaatagataaagattgggggaaagtcaagaatactccaaagaagaaccgacttccaaaaaggatttgaaggagcttataatattaaaccatacacagagcactgcaagactcaaaaagggttactctacaccatatagaagggaaagattattgaaccagaagcccagggtgggactgctactaccattgagtactagatttatctctgagcttcctagtagccaagataaaaatggaaacttgtacaacatcaccataagatcccagga

SEQ ID NO: 195107 - DNA, 474 bp, Homo sapiens
ctcgggtgactctggaggatcccgtcgctgactatttgttgaaaagcctattttttctccattgaattttttttgcacctctctcaaaaatcacttggacatatctgttcatctgtttttgcattttctactctatttcattgatctgtgtatgtcccccagctgataatatattgtcttgattactatagctatataataagctttgaaatcaggtacactgatgattgcccctttattttctttttcaaaattgtttctggttattctagttcctttgtcttttcagataaattttagcatacacttttctgtatctagaaaaaaatcttgctgtgattttgataggaattgcatcaaatctttggaagaattgacatctttactgtgttgagtcttccaatctatgaacatggtatgtctcaccatttgtttacaacaaatagtcagcagcagggtcctctagagcgcccc

SEQ ID NO: 195108 - DNA, 479 bp, Homo sapiens
  misc_feature (445)..(445): n is a, c, g, or t
ctcgggtgactctggaggatcccgtcgctgactatttgttgaaaagcctattttttctccattgaattttttttgcacctctctcaaaaatcacttggacatatctgttcatctgtttttgcattttctactctatttcattgatctgtgtatgtcccccagctgataatatattgtcttgattactatagctatataataagctttgaaatcaggtacactgatgattgcccctttattttctttttcaaaattgtttctggttattctagttcctttgtcttttcagataaattttagcatacacttttctgtatctagaaaaaaatcttgctgtgattttgataggaattgcatcaaatctttggaagaattgacatctttactgtgttgagtcttccaatctatgaacatggtatgtctcaccatttgtttacatcccgtngttacacacctatagcacacagggacgtcgagcg

SEQ ID NO: 195109 - DNA, 446 bp, Homo sapiens
ctcgggtgactctggaggatcccgtcgctgactatttgttgaaaagcctattttttctccattgaattttttttgcacctctctcaaaaatcacttggacatatctgttcatctgtttttgcattttctactctatttcattgatctgtgtatgtcccccagctgataatatattgtcttgattactatagctatataataagctttgaaatcaggtacactgatgattgcccctttattttctttttcaaaattgtttctggttattctagttcctttgtcttttcagataaattttagcatacacttttctgtatctagaaaaaaatcttgctgtgattttgcagttttactctgacaggctatcgaactacgatggcgaattcggacgattcggtacctggcgcgtgtttcatatgttggagatagggtatatgatccactga

SEQ ID NO: 195110 - DNA, 439 bp, Homo sapiens
ctcgggtgactctggaggatcccgtcgctgactatttgttgaaaagcctattttttctccattgaattttttttgcacctctctcaaaaatcacttggacatatctgttcatctgtttttgcattttctactctatttcattgatctgtgtatgtcccccagctgataatatattgtcttgattactatagctatataataagctttgaaatcaggtacactgatgattgcccctttattttctttttcaaaattgtttctggttattctagttcctttgtcttttcagataaattttagcatacacttttctgtatctagaaaaaaatcttgctgtgattttgcggtatcgcgattcgttagtccatggaaggactagacatctgtcactgtgccgtcttttaaactcaaagacatggtaagcactcgccgtcgttat

SEQ ID NO: 195111 - DNA, 399 bp, Homo sapiens
ctcgggtgactctggaggatcccgtcgctgactatttgttgaaaagcctattttttctccattgaattttttttgcacctctctcaaaaatcacttggacatatctgttcatctgtttttgcattttctactctatttcattgatctgtgtatgtcccccagctgataatatattgtcttgattactatagctatataataagctttgaaatcaggtacactgatgattgcccctttattttctttttcaaaattgtttctggttattctagttcctttgtcttttcagataaattttagcatacacttttctgtatctagaaaaaaatcttgctgtgattttgtggtgcgatcttatatatggaaggactaagatcatgacctgggtcgtcgtttaca

SEQ ID NO: 195112 - DNA, 911 bp, Homo sapiens
ctatttcttaaaccagaactaatgtattctggacacagagtccctgaaaccccagacaaagaaaattcgatgtatctgaacaaacaaaaccgcgtttctttaaatctccaagccaaaaggaaaagtgcagaaacatttactcactgtccgacctgtacatatattttacctgataacccttaaagaagtgccccccagttcagccatcacccatgcagggcaaagggagctggagccggcccagcctgtcggcgcagacactcctgacagctcctgtctgggcacttctttctttcttggagcttctaatttctttcttggcttctgaggcctaacagggtgttttgatgcacacacaggaattactaccgtccccaatcctagggtacatccctagcccaggccagggctttgagttttcctaggagcgggagggtctgcaaagccccacaggctgaaatctcagcgtggccctctgctcatctgctccaggtggaaactctcacccctgagctgcccgacctgggttcaagcccgggtcaggggagttagcaaggagacacctgaaaaataaaaggacagaatggaagtgcacactcccaccgcgggcccgggcgggaagtcggactaagaccgcggcgggaccgccccatccagaaagggtgccccgggtgtgggggcggaaaccccagcgctgtcttcagtctccacacccgcgcctttttcccctggaaaacgagcgtccttggcctcttcggccgcaaccgggcggctccagacgtccaggagggcagaggctgggctggtgcggcgcggggggcgcgggcgcgggctctgcgcctttaaggcccgcgtcggcagagcgagcgcaggggccgggcggcggggcggggcctcggcggggcggccgc

SEQ ID NO: 195113 - DNA, 82 bp, Homo sapiens
gcaacagttgagctctcggacccaaggatacttcagaatttagaggaccttttgcgggcagggttgggtttaatccagggtt

SEQ ID NO: 195114 - DNA, 313 bp, Homo sapiens
gtttcatagctgaagatttattgcatttgccattctaatcttttctagttctaatcatcaaacattttaaaaatattttggagtgcaggtagattgcttgaggtgggaagacgttaaatctgtaaaatggagccagacagtcatgagcagcagtgggactgcattttcatcttgtaggtttagatttagtggcatgatgcctatttcaaaaactaaatgtagcagcaaaatgcttagggcattgtatgtgtgagacattagaatgaggaagaaccaaggggttaatgattataatttgcatagaggaacttga

SEQ ID NO: 195115 - DNA, 239 bp, Homo sapiens
cccaggggagggcacagctgtgtgaccttgagcaagttacttaacctctctgtgcctcagcctcctcacctgaaaatgaggacaataatatctgcctgtcttataaggttaccatgaagaagatcaaattaagagacaagtgagagcatgtggccactctctggcccctagcagatgctcagtaagtatgagctactgttggttctgttgcacacatgacaagtcttgttgggaaacct

SEQ ID NO: 195116 - DNA, 780 bp, Homo sapiens
ttgagacatgatctctctctgttgcccagcctggagtgcagtggtgtgatcatggctcactgcagcctcgacctcctgggctcaagtgatcctcccacctcagcctcctgaggagctgggactacaggcatgcaccaccatacccagctaattttttgtttttctgtagagatggagtctcactatattgcccaggctggtctctaactcctgggttcaagcagtcctcctgccacagcctccaaaattgctgggattacaggcatgagccaccacacctggccccaagtaatttttatctacatattacctatatctaagctgttttactaaaagagtaaaaagattgcagcttctgttaatataggtaatatttctaatccctactaatatggtataaaaacttctttgtacttgcttttacttaataatgtgagcctttttcataggtaccagaggctgatgtcaaattcaccagcatttacagagagaccctgtacttgggccagaaattgaaatatcagcaagtcatagaccttgcccttgggctcacgacctgactcatgtgcctgttttaatggccattgagacctcagcctgctctctcactactttctgaagatacttggaaagttctgtttgctaactttgagagattggtagtttgagtggttttaagtattcttttgttcaacaaattatatttagagagtggctactatatatatcatacattctgctaggttcagatgatgcgacgacggataagtttgaccaggt

SEQ ID NO: 195117 - DNA, 302 bp, Homo sapiens
cagggttatttaattaccatgtatttgcattgttttgagggtgcctttcagagttgatttccaattttatttcactgtggtcttagagaacttgagataatttcaattttcttaaatttactgagacttgttttgtggcctatcataaggtctatcttggagaagttccatgtgccgatgaatagaatgtatattctgcaattgttgggtagaatgttccacaaatatctgtgaagtccatttgttgtagggtatagtttaagcctattgtttctttgttgactttctgtcttgatgaccca

SEQ ID NO: 195118 - DNA, 239 bp, Homo sapiens
aaaaggtttttttccccttttctacaagtattaaacctggagagaacaatacagtgtaaaggctgtgaggtgggagcatgctggggtgttggaagaagcacatgagcttacaaacattccatcaatttgcattcattccaaaaattgtatgcaatttttcagtgacgattcccattgatcaatcatttataaaaactaatggtgagggtcttccatactcagtttactcccttcttgga

SEQ ID NO: 195119 - DNA, 687 bp, Homo sapiens
ttggcagagtccagcaaagcatattctcctaccaaaatgcttgactttttcaagttaaaaaaaaaattgccaatgaagagcacagatagccatctgccaagaaccttccatcttctccattcaggcatttgtacctattggaaaggattaattttacgtgtaaaggaatagggattgaatgattggattataaacccttagagaaacatgctttgcctaccaggaacttctaaatttacattttaaagccaactaaatctttaaatgtctactctatctgtgaaattcaaatagcaattacacaagggttggttttttttttctccctattattaatgaatatgcagcaacagaaaacggatgctagaagatctagtggtaccactaaatataggtagtgttttccaaggaaagcaagggctggacccgatccagagagcatcacaggggagtggacagcccgtggattagtctgaggaaagcagagggacaatgctggttgtcagttccagttcaacatcactttgccaatgcaccattttcaataaaatgagaagtgagcagaaaactctgggtttaagtaatggcacttcagggacagcaggttcaccagctgtgaaatccccacggccttcaggcagcttcattcccacacctgcctcacgtgtggagtgcacgcagtgtcgg

SEQ ID NO: 195120 - DNA, 285 bp, Homo sapiens
tagaggcaggttttgccatttggccaagttgacctgaagtaatctgtccgccttggcctcccaagtgctggcattacaggtgtgagccactacgcctggcctttactcccatttttctaaataataatgtgttctcttactgcccttctcttcgtatcgaatcatcccaatatagttatgtcacaatttttggttaggtcgatattcattatttattgtgctgagtaaataatgtttattattgagccgtttgatatactactattacatttttggtgcaacttt

SEQ ID NO: 195121 - DNA, 558 bp, Homo sapiens
  misc_feature (95)..(95): n is a, c, g, or t
tctcggtacccgtcagacgctgaactatgtgaagacatagctatctaaacttgaggctactgcatgaagtgcccagcacttacatcagtaaggcnggatgagaagcttccatttgtatacagtggattaggatcacaagcatgccacaaaataaaaataccgggaaaaaaatctttcggccaggtgcacttgctgtggacaaggctgagtaggggcgtgtgtgtggtctcactctgttgcccaggctggtctcaaatccttggccttaagctatcctcccaccttggcctcccaaagtgctgggattacaggcatgagccaccacgccctgccaatagaatttcaaagctattaaaatacatatgtaaaacacctccattttaggacacatatacaaaatactaagcataagacatagaaaagcaaatgtgtaaaaatgtgttagtattttaaaatatccatatattattataaggaggcacactgtagtaatgaaagcagtgtaattttggcttcagagtgcacacatagttcagcgtctgacgggtaccgagccaa

SEQ ID NO: 195122 - DNA, 507 bp, Homo sapiens
gaagttatttggacactgggttttcatcatattgcattatttcctctcttgcttgctaaacacaactctgctatttgttaagcatgcctgtatcccccttatgttttattgatacctaaaaccttcggtatacctactggcccctccaagaatgggcattgaagaaagcacctgcctcactctgcacatttgcctcctgtagtgaaaagtctcctgttacacatattctgaagcagaatatgtgtgcctttttacaagagaagagctgagagacaggaactggtcctagaatattatactccagattcttttacacattatttctcttttaaggattagtgtcttgtttctgaaggctttgtttcccataaatgaggtatttacttactcagttaacttattccctgccagagaatattttgaatttacttttgataggcagtgccataaaacttctggtcctttttcacattctcactttccttatagtgatcagcaaggagtctt

SEQ ID NO: 195123 - DNA, 620 bp, Homo sapiens
gtggggagagggggaccgtggggagagggagagggagagattgtcattcttaatagtatgttattactgctgagcacagtaatagccatagtagtggtagctgctgctgttgtcattgttgtcgggtcatttttttttccaccagtaaaataagaattaaaagagtagctatctctacaagatttcgagagttaatagttcaaagatacatataaattgctttgaagccaatgtgctatttaaatgttaggagtgtttaggatatgattatgttttctacctaaattccatcatttacatttgaacctctcacatagcctttccttagaagaggatcatagcaggctgggtgcagtggtttacgcctgtaatcccagcactttgggaggctgaggtgggcagatcatgaggtcaggagttcaagatcagcctggccaacatggtgaaaccctgtctctactaaaaatagaaaaattagccgggtgtgatggcacacacctgtaatcccagctactcgggaggctgaggcaggagaattgcttgaacctgggcggcggaggttgcagtgagccaagatcgtgacactacactcctggctgacagagtgagactctgtctca

SEQ ID NO: 195124 - DNA, 399 bp, Homo sapiens
tttaaagtctttaaatggctcttttacaggctttataatcttcactatgagaataattttcttaaatgttacagatcttttagtccagtttgctttgaccttttcttctttcagtctctgtaaaaagaaatctgtttattttcctgtaggtacaatttcaagtactaagaagtaaatcaatgtacaaaaatcacaggcattcttatacaccaataacagacaaacagagagccaaatcatgagtgaactcccattcacaattgcttcaaagagaataaaataactaggaatccaacttacaagggatgtgaaggacctcttcaaggagaactacaaaccactgctcaaggaaataaaagaggatacaaagaaatggaagaacattccatgctcatgggt

SEQ ID NO: 195125 - DNA, 421 bp, Homo sapiens
tttaaataataatttccagtacatttccctctgcaactcaaggtggccatctcaaaattcatacatcaagacatagaacaaagggcagctttgaagtgggtcacttcagtatgaagtaccacccgttacatgaaaaccgatcattggccttcaaatttatggcgctttaatggggcaagcccagtgccttaaatacagggtgcattacagtattgagttatctgggctaaataagagtgatttagaaggcgcgtccaggtcttcttatagagcaaaagaggctcaagcttagagatcgggagaacttgggcggaacgtaaagaagtctcctttcgagcaaacccaaaaaccagtggtttcgaatcccgaagtagcaaagccaacaggaaagggagaatcgttgctcggttccagtgaattc

SEQ ID NO: 195126 - DNA, 189 bp, Homo sapiens
aacaacctccctcacaaaaaagaaagaaagtaaggtatataaaccatgtattgacaatcacttattcaactctatttatgccaagtaagacttaattttaacttgagagctaagcattttagaatattgatacagaaatcaggaaacaaaaaagaaaaatgcccactctctctccgttcccaaattaac

SEQ ID NO: 195127 - DNA, 563 bp, Homo sapiens
ggtacctgctgtagatattgaatacttagtttgtaccagttacctgctaagcacaagagattcagtggcaaacaagaaagacaacgcctctgccttttatttatacaaaatacccaataaatgtttggaaaaagttacatgcatgaagattcatcctacatgcatcccaacatatcaaaccataaaaatgttcacaccctttgatgttactgattcagtagataattgaatacttagtttgtaccagttaccctgctaagcacaagagattcagtggcaaacaagaaagacaacgcctctgccttttatttatacaaaatacccaataaatgtttggaaaaagttacatgcatgaagattcatcctactgtctcgtcttttcttccacttcacttgtcactgcttggtctctcttgctggttcctcctcaccttcccaaactattgacattggaaggccttaggactcagtttctggacctcttctcactcacttggttgttcagtcttgtatcgtttacatgatgataattcccaagtttatatctagccagaacctctctt

SEQ ID NO: 195128 - DNA, 332 bp, Homo sapiens
acaaggagatatgactagaattaaccatgtggtaatggattagttagaaataccagtatgaactcacatttaacttaaaaaaatcgatagttacatataaaaatgtgtataaatatgtagctatacatgggttagtatacatatctatctatacttcctctgagaagagttggctgtagaatacaaacctataggctgggtgcggtggctcacacctgtaatcccagcactttggaaggctgaggtgggtggatcacctgagcccatgaggtcaagcctgcagtgagctatgatcatagcactgcactccaacgtgggcgacagagcaagca

SEQ ID NO: 195129 - DNA, 375 bp, Homo sapiens
taattagttctaccatctctggcccttataaaactcacagtaggttaatcgccagtgttgggaggtgccaacaaaactctatacaaagctaaaaactagattttaagacctctctttcattaatacctcattgcttttcaactggtcctaatagcctctttttcaggagagaaaagtaaagtgtgggggtatagcttggccaggatagattaatccagtttagagctcttaacacaagtttgcataccaagtttgcaaagtgttaatttcttaggaaaatgacatctcgccattaatagtttatgcatcaattgctaaccatgagcctatcccagtacattttatcactgggtaaaacaaagtctgtaaaatact

SEQ ID NO: 195130 - DNA, 355 bp, Homo sapiens
tgcgttacaggcatgaaccaccaccatgcccagccaatgcgtggatttttaacgctgatgcccaaagcatacattggggaaaggatagtctcttcaatacataatgctgtgaaaaccgaatagtcacatgcaaaagaatgaaaatagacctcttatttcttatcacatacaagaatcaaatcaaaatggattaaagacttaaatgtaaggcctgaactatgaaactgctagatgaaaacactggggacatgcttcaggacattggtctggacaaagattttttgggtaaaatctcaaaagcacagacagcaaaagcaaatatagacaaatgggattgcgtcaagctgaaaagctt

SEQ ID NO: 195131 - DNA, 193 bp, Homo sapiens
tacttttttgattggacacatcaatattaactctgggaaaaacttccatctcactctgggaaaaagtgcaatataaggttatcgatagtcacaaggaaaagcatgcaaaagagaacaggatagttcaaaactggctttggtagaaagaaatccataataaaaaaggaaaacattccaaccattttattttttc

SEQ ID NO: 195132 - DNA, 187 bp, Homo sapiens
agctagtacaccgcgccaaccaagagctggtcaatttttaaggacagttaaaggtggggtttaggctgccaattatcagaacaaatgtaaatcttgaatgttgacacgaacttttaggaaacttttaggaaacgcctaaaatgtggatggtggtatagagtggtatagggtggtatagggtggtata

SEQ ID NO: 195133 - DNA, 256 bp, Homo sapiens
gctgggattacaggcatgtgccactactcctgggtaatttttgtatttttagtagagacggggtttcgccatgtcgaccaggctggtctcgaacttctgacctcaagtgatctgcctgtcttggcctcccaaagtgctgggattacaggcacaagctactgcactgggccacggccaggatttttatgacttgtaaaaccactgtcttcaaggaggctataagttattatgggagaaaagtaaagggctttgtgaa

SEQ ID NO: 195134 - DNA, 459 bp, Homo sapiens
gaattcctggcttgcaggccctgggcaatggctggacaaggtttgttggtctctagggcacagaaagaatctatgcctccgaggattcatagaaaattaccacttcctctgtcattatcttttatttattattctctgtgatctgttggtctttgattccctttgtatttttgattcttttgtgattctccctttcgatttggcgctggtttttaccctgatctcatctgtatcgtccacacctcaatgcaggcttcccgcgcccctgcccgggctcccgcagtgcccccatctacatccctgcctccagtcttgttcattgctgctgccagattcacctccctctatgtccacctgttttggaaccttgccattcccatcctgctctgagcttttgctctgtatttcctctgcctgatgtatcctctcccctttcctcgtccaaccaaaagaaagtct

SEQ ID NO: 195135 - DNA, 595 bp, Homo sapiens
ttggaagcaagtacattcaactcgaggtccccctcccttaacttagtcgccacatgtgcagtagaaaggcaggcacatggcgctgcccaggtagaaacccccgtctgcataacaacagattaaggtgggatggccagcctctttgtgtactaagtaaatagcacacctggtctgaccagtcttctgggccctatgtaaatcagacaccgcctcccccagcttgtctataacactctgtgcatttagccacagatgagacgacccacttggaaggccctctctctctgcaggaagagagtttttctctttctctctattaaacctcttctcttaagctcacctgttatgtgtccacatccttgatttccttggcatgagatgacgaatctagggtatttaccccagacaacgttgctgctacaatgggaagggacaggttccactggcctcatttcaacctcctcccttaagagttgacatacaaccgaccagtgttaacattaaaacagggatctaaagactgacaaagcagagtctatgtcgcagtaagataccaaagtgattccagtagagtaccaaatgaccgataaccagg

SEQ ID NO: 195136 - DNA, 504 bp, Homo sapiens
ccatcaggccccacctcccaacaccatcatactgggaatcaaatttcaacatgagttttcgtggggacagacaaaccatatccacaccatagtgatatccttggactttttgtgtgctgtgtttatccagtctttgatttactgcttacaaatctaaagaatagctctgaaatatagtctagtcctattgtcactgatattttctcttcgatttatttctataaagtgttgcccatgtttttcaaataatttctatgttttgagtaaatactaaggagtgcgatggccagatcttaagagtatgtttagttgtgtacagaactgccaaactgtcttccaaagtgctgtaccattttgcgttcccaccagcggtgaatgagaattcctgttgctcagcattcttgccatcatctggtagtgtgtgttctggattttgtccattgtggtaagtgtgtagtggtatctcattgttctcatatgcatttcctgattacgtatgatgtg

SEQ ID NO: 195137 - DNA, 412 bp, Homo sapiens
tgttacatgctgatacatacatatttgctattataatccatacaaaggaatattatgcaactgttagaatgcagtagttctgttcatactgacatgtatatatccttctataatgtatacttttttagtaattacaaagtcttttataaattaaaaaactttattgggtttggtggcttgtgcttctaatcccagatacttgggaggctgagatgggaggattgcttgagaaccaggagttttgagacctgagcaacatagtgagaccctgtttcttaaaaatatatatatataagcctggatacagtggctcacgcctgtaatcccagcactttgagaggccgaggcaggtggattgtttgagcttaggaattggagaccagtctgagcaacactacaaaactctgtacaa

SEQ ID NO: 195138 - DNA, 115 bp, Homo sapiens
gtgttgtccgtcagcgtttcagaggagttcagctttctaaatctatgcttttctggtatttgatgtttgtatgtatgagagagagagagagagagagaaagaaggaggagggagg

SEQ ID NO: 195139 - DNA, 373 bp, Homo sapiens
acaggcatgagtggacaatgttctacacagtcaagcttcagatgactacatgtcaaagagagacaaagttaagagcagccttacatggtgtcaaagaagcagttagcatcttgacttcccctacactcactcgctgacctgctgcagcctccccgggcacctgccaccacgcccagctaatttttgtatttttagtagagacaggatttcaccatatttgccaggctggtctcgaactccttacctcgtgatccacttgcctaagcctcccaaagtgctgggactacaggcatgagccaccacacccggcctctttcagattttttagaaagtgccatcctgttttccattgtggccagaacattttacatcc

SEQ ID NO: 195140 - DNA, 539 bp, Homo sapiens
cacttgacgtctttcaaatctttgatgctgatcaatctctgcaattcccccagtgtgcagttgtacttttggtaagaagaggaagctcaagatttgactttttctcccataatgaccctcattttgggggtcagaaaggaagcatggacattcactcatctctatatgaaggaaatgtggaaacaatcacaggatgcttttacagacctataagtgccattgtgacagaattaggcccgcaaatccaattgtcacctaaactgcatgcatcccagattctgccagatacatcacagtgacattctgcatcgtgttcatttatattcaggagccaatactccctgaaagatctggctatttcccatctcccactacacagttaccatggtaaataaccaaagatacttctggagaaggctgggagaaagatttacaggaagtacttctgatgatatcacaaggtccttcttcaggttacctggcttcctctatattcaatgtttggaaataaactcaagtttcagaattgagtgagcagc

SEQ ID NO: 195141 - DNA, 213 bp, Homo sapiens
aaaaattactaagataattagaaaacttgcagaatacaaaatcagtgtattgcatttgaccttttctacacagccatgaataattagaaaaaaatacttttaataagcatactaattatataacaaaaaataagatcgtataattttaaataatatgtaacaccattatgaataaaattatatttaaagaattgaatgacatgaaagaaaatc

SEQ ID NO: 195142 - DNA, 446 bp, Homo sapiens
  misc_feature (355)..(355): n is a, c, g, or t
  misc_feature (361)..(361): n is a, c, g, or t
tgggtttcttagatctggcaaaagaggcttaaatcagcttcaaactatttggtctctgcttcacaactctgaaataactgctacatcttaagttcccttcgaccgctaaaaagtgtgggattctatcaacctgcacgctggaaaggctgaaagtgcagggctgacttcacatcagaatcttctctttcatgaggatcctggctttgtcaaaggaggtgaatttcaaaatgtatgatttggtcacttttgtttgtgacagggtcagaccttcctaatccaaattcaaggtttttctctttacagtacaggaaaatctgggtgcctgcttttttttttttttttttttgggggttcnacaaanccggggggacccttaaaagccaaccggagggctgtgcaggcggggacagggccgcggtaaaaaacggggaaccggattacacggg

SEQ ID NO: 195143 - DNA, 539 bp, Homo sapiens
tttattgaattaactattgagtggttccaagtcattggtgtagctccaaagtcaggtattttgcacatatggctagcttgttttctctgtgtcactttatgataaggcctacttactcatgataattgtttttgtctcaggcctttcacagacttaggatgaatataaaaaggtataataataagaaactaatagtaatgggatgtcctgttttcctttaaaattttcatactcttgggtacttacacatttggttgactccttgattttctttttaactattcaccttaagcacattcattttagtttcattaaagggatgttgattccttgtttattctatttttagcattcttattaaagtttagaaaaacttgttgagtttgttgttcatatgtatagaaagtagcaccatcaactgtggaaaatgaccacatccttttctgtcactgtcgttgagatatgttttatgtctaggtaaagatctttgtgtttcttcccttgataaatcatcagctatttggttttcagcagttata

SEQ ID NO: 195144 - DNA, 168 bp, Homo sapiens
gtaattagaagcagcaaacccccactagctgagggcctgaggcactttgtctgaaagccaatatgaccaaaattggccgtggtagatcttgcttctatttaagatctccatttctctcaggtatctcctatgaatagcagctgctcaaccacagatttgctctgtttg

SEQ ID NO: 195145 - DNA, 878 bp, Homo sapiens
aaatgttggatccctacctcataccatttcccaaaacaacttccagattaattaaagaccctgtgtttctttttttttaaactataaaagtattcaaaaaactataggaaaatatatttgtcttggggtaaggaaggcttcttaaaatataaaataaaaagttgtatggaagattaattaatttgaccacttcaaatttcttaagttgtgtatgctaaaagacaaaactggaggacaaatgatagtactggcagatatcacttattcacaaatcacacaaattaagagtacaggaaggctgttgggtccggtggctcacagctgtaatcccagcactttgggaggccaaggtgggtgcatcacctgaggtcaggagttcaagaccagcctgaccaacatggtaaaatcccatctctactaaaaacagaaaaattagccaggcgtggtagtgctagcttgtagttccagctgtttgggatgctgagtaggagaattacttgaaccctagagtcggaggctgcagttagctgagatcatgccactgcactccagcctgggcaacagagtgagaactccatggtggcatgcactttgggaggctgaggctggaggattgtctgagcccaggaattcaaagctgcagtgagctatgatagagccaccgtactccagcccgggtgacacaatgagaccccatctctaaaaatgaataaaaataagggtcgggtgagggggctcatgtttgtaatcccaacactttgggaggctgaggcagagggatcacctgaggtcaggagttccagaccagcctgaccaacatggggaaaccctgtctctactaaaaatacaaaaattatccgggcattgtggtgtgtgcc

SEQ ID NO: 195146 - DNA, 148 bp, Homo sapiens
ttccaacaccaccttcaccaccagctccaccaccatcaccaccaccacctctgtcacctccacaacctctacaacttccaacaccaccttcaccaccagctccaccaccatcaccaccaccacctctgtcacctccacaacctctaca

SEQ ID NO: 195147 - DNA, 499 bp, Homo sapiens
gcagtaatttagtagtggttattttctaatttgcgtttaactgggttcttttaatttattagagctagattcactaacttcccactagaggtctcctctttccctatagaaagcgttcccaaaggcaactgtttggactcaagtaggaataatttgcaaaatcattagcaaagttgcagttgaaatgtaaaaacctaccaatttttgttacctctattgccaaatataaatttaatttttatgtttaaaacattttaaatctaatatcttgtgtttttagagattacagcctaagtaaatttggcctttcgtttaagctaaattataagatgggccaaaatgaatcaagcaaaaatattcagttttcaaagaccactctaattcacctgcttaataacagtttaactggttttacctttctccatggaaacatgtcaaccgttgaagactattaataaacaaatatttattaaacttttgcattatgctgagaaaaatg

SEQ ID NO: 195148 - DNA, 548 bp, Homo sapiens
catttttgtatggtgcctggtccctattagtggaagtggtatttagagaccacagtttaggtggattttcattgctaatgggatatactttacttctagcccatactacagggcagagctaaaaatgacatatttttagaaagaaaactaaatcataagttcatactggtttttccaatacaacgttacgtttttatgtaacttctttgcttgttttgtttttgtatccctttctcttatgctgcaactcttgatttctaaagatattaacataattatataattgatctgtagtgtatgtttaataatttcagtagcggtactaaattatggctaataataagacaactctatgcagtttaggaatttttagagagatgtacagttataacaccatgttttaaaatcacttgaatgccaggcttggtggcttacctggctgcttgcaatcccagcactttgggaggctgaggagggaggattacttgagcttaggagtttgaaaccagcctggacaacaaagcaagatcctgtcgctactaaaaaaa

SEQ ID NO: 195149 - DNA, 860 bp, Homo sapiens
ttgaaaaacattagtccaactttattataaaattacttgtttgaagttttaagctagtcaaagcactaaaattacatgagttgcataccaaagcaaacaacaaaatatacatatcactatttaatctctatacaatccaacaagtatgaagagcacaacatacatttattcacataaccaagaaaaacatgtttcatctactattaaaatgtgccagtaacaagttgaagtccaacattatttaccaggtggtaaaatctttgacacccagattaagaagtaataaaatgtatattcccagcatttatattctgacccaaaacagttatttaatttggaacaatgatggtatacaggtgaagctagcaatagttttaacaaaaagtacactctatatttaacaagtcctcttatttgggttctaaactcagagtaggcacaaaacaaaagcagatttctcaagtccaaaagtgtgcaaacaagaaacatttatcacataacaaaatatatctacatatgtatgtattaactttcaggtatttttcgttttagctatatagatcattagaagtaactttctgcctctagggaaaaaaaaaaataagggcccatttctttcacctagttaacccatcagtaaaaggtctgatgttttggacttacccatagctaattgtgaatcagcattatctttgtattcatagtcataaaaacctatgtgtgatatttttgcttttgtctcatctttttagaaaaattcactaacacctgtaaaaatcctgacatgtttatgttatttgcccagaatatataattaccgagaaatcatgtttaaatagtatgtgaagttgcttggataa

SEQ ID NO: 195150 - DNA, 474 bp, Homo sapiens
atttgtatttccctaaaataaacgttattagtgaaaagcaccttttcatctgcttattggccaatttgtgtatcttcttttgtctgttcaaagcttttgtccatttaagaaatttataattttgtcattgaattgtcagaatatcttatatattctagacacaaattatttgtcagatacacgtattgcgaatatattctcccggttcgcagcttgacttttcattttgatgagcagttatctttaaattttgatgaagtccaatccattagaactttctttcatgttgtgtggttttgtgacctctgtaagacatctctgtctgttcctagttgtaaagatactgtcttctgttttcctctagaaactttgttgttttagcgtttatattgagatctgtgctccctctcaattgtgtgtggtatgagattcatttttcccctgagaagttgctctggcatcatttgttgaaaa

SEQ ID NO: 195151 - DNA, 543 bp, Homo sapiens
tctccaggaggggctgcctctgtgaacacaggagagagatgctggggaaaagaggctttgtgggaagaggagcattgtgcttggagcctggaagcagcagaatagtttgaaagggccccatattccaattaaggagataatgctatttcttcctctctcccttacttgctacaacaaagtcctttgagcccccttcatgcctcccttaagccctccttcaaccttggtaaacagaccggtagcaaaccacatgacctgtgactttcctccctttgggctgcacctggtttgtgcccagatgtatttatcctctgagaaggaatccgatcagttagcaagtggcagaatagtctctccttccctttggttctggctcacggctcctggcatagccactggtagggcccttggggccctaactgagagctagcccctggggaggagagcctgtatgctgcccatcctagctttctaaagttctctctgggtttggctgcaaggttcttgagggaatttctggttttagttccacctctgagcttt

SEQ ID NO: 195152 - DNA, 307 bp, Homo sapiens
tcactctgtaaatttctagcatcctataattgtagacaagtcagtatgcgcccctcctcaaggctgggcttaggatcccaagacatccctattgcctgcaccacatcgggtgccagctaaggtagaggaggggtgccaaggaagatcagagaagcccagctcctggtgcccctggggtcagtacggtccttcttcccttgtatctgcaaaggacttgtggacacagccgggggaaacatggttgctaagagactggcattgctgcactttcgaggacaccaggcgtgtagtctcatctttcatcaac

SEQ ID NO: 195153 - DNA, 330 bp, Homo sapiens
actctaaaaacttaaacacaatagcaggcacatgtattagctgataattagtgctataggggaaaataaagtagaataaaggaagaaggtggtaatagagaaaatctgaatcttgttattttatatagaatgcttaggtctatcagataactaagatttgagtaaataatttatagcaagtgagaaagaaaaccatgaagatatctggaggaccacttttcatcaagagaatatagcaaaggccttgaggtgggtagtcacagacgactacccacccttttttttttttttttttttttttttggggggaaccccaaaaagccacccggg

SEQ ID NO: 195154 - DNA, 284 bp, Homo sapiens
cattatactaccaggaaagcttgtgctgtgccagggagaggcaagaatacctgatcttccattttgagggcccaagagtcagtctgatactccctgattactctgttaacattgtagtaatggagacatcatgaagcatccttcactcacttcttagtgatgggaccctggatatcagccaccacagcttcactaaccagatcacacatgtatatgtgtatgtacacacacactctcctttaaacacaagacaaaagacaaaaatactggaaaattcccaacta

SEQ ID NO: 195155 - DNA, 440 bp, Homo sapiens
gaatgttttaagagttggaggtgcacaagaagaaagtgacctttgccctggatcttgaagcagaaaaccactgtgctctgaaaagtgaactgtctgctatgtgtatatgagtgtatagtggcactgttatgacccatttcatttccctgttctcacttctcccacatttatgtgaaatctaggtagacacctacaacattaagttctactcaccctttttctactcttagcaccttcatgtgagttacaatttatataccatacaagtcacccattgtaagcatatcgccagtgattgttagccagtgtacagagttgtatagccattaccacagtccacttttagaacatttccgtcaccccaattagttcctttgagctcatttatattaaatccccactcccacctcctgccctaggcaaccagtgacctgttttct

SEQ ID NO: 195156 - DNA, 380 bp, Homo sapiens
aggcattgagtcctgggtccagagcagtggtggcatggggcagcctggagtttgaggggctggactgctgcacttggtcattctgccaacccctggtgaggtcactgtgccccagggatacggcggtggacaattctgcagcccctgtgggtggcagcagcgaggaatgtcaggtagtgatcagcctgtgaaggcaaacagatgtggcaccattggggtgatggaaaattttgaggaggggctgccttaattaggggtccagggaaggtggcccttgaacttagacctgaatcagccagccacgggaggatctggggcaaaggagtccaggaaaagaagaacatcaagcgcagaggccctggcacaagcaagctggggat

SEQ ID NO: 195157 - DNA, 428 bp, Homo sapiens
gagatgcattcagtaaataaatgagtgactcaggagcccatagatccaagttttggccatcaaatagaaaggagtgagcaggcagaaaaatgaaaactccaagtgggccaccatctgaggtgggtggaggcaaagtttccatccatgtctagcgtggatacctaccatgcttgagacacgagttttaatagagtacataattctattttgcactgtgctagacattgagaatataaagctgaagagatacgatctacaccatcatgggctgactgactgtctagcaaaggatataggtttgctggcttagggacaagtccttaaaccaaatttctaacaatgttttgtgtgttcccttcattcatctattcaacgaatattttctaaatgtccactttgtgcctgctgttgaaataagtaaaggggtg

SEQ ID NO: 195158 - DNA, 261 bp, Homo sapiens
caaacttgcacaaccaggcatctaaggactaaaaaagtcagagatcagaagattttaaagatattcatcacagcattctttcagtagtgaaaggtacatggatttgaaatcagaaacaccgagttccagtcccggattggtcagtttttaatgatcggggtcattgacttgaccctacagaatttcagattggggataataaaatctacctaaaatgtaattgtgagctctcagttacacacacacacacacacacacaca

SEQ ID NO: 195159 - DNA, 196 bp, Homo sapiens
tatcctgaattccatttttaaactctagctgtgaatcaaaataatttgtagaactttatttatttatttttaaatacagatatctgcatctcacctaagactttaatcaatgaggaaatcactgaaggtttctgagccaggaaatgccattgattgttaatttatttattcaatcaacaaatatgataagcagcta

SEQ ID NO: 195160 - DNA, 387 bp, Homo sapiens
tcagttcctcgagaatgttatatgctgattatttcctatctttacagattctatgtctaattagccacatcacacatttgaacaaaccttcatctgataccatgatctctttgtgcttcctcatctttcattggcaaatctctggaatgggccatataaatgcagccctcaaatccttaacagcttatgattcggcttccatcactcacatttaagcttttcttaaagatcactttccaccatcatcaagaaacaactgtagtcagttctcttgtccttccatttcttaggactatcaaaatattgtgatttgatatttgactcaccctacttctctaaccttgtaccgtcacagtctccacactcttctgctgcctccttccttat

SEQ ID NO: 195161 - DNA, 458 bp, Homo sapiens
gcagaagaactcaaaatgtaaattacctgggattgacaattgtgttcactagcatcattctaccattgttattgcaagccagttagtattatttcccttttacagacaggttgatcagagtggaaggagtgttttggtgccttaaatggccaactaagcttgaacaatcagccctttttccttttatgagaggaaaaataagttttaaactgtttctttctgattgaggctattccttctcctacttgaaaagaaagtattaggaaaagagggtagactcagtggcagtgttaggcatgccacatagtgttttcttccttgtgcctttagagaaaatgtttgtatcccaaaaagcctgaggaggaccggggagaagatagtactatattaaaattgaatgcctatataataaatatgtttgatcctacataattatcaattgtataccaggagcttga

SEQ ID NO: 195162 - DNA, 405 bp, Homo sapiens
ccagtagccttcattttaaaggtttacctttacgacttaactaggaaagttgatccctgcataaataattctaatcagttcctgtttttataggactgtaaccaatccaagctttaaaagtatatgttcctcaggccgggcgtggtggctcacgcctgtaatcccagcactttgggaggctgaggtgggcggatcacctgaggttgggagtgcgagaccagcctgaccaacatggagaaaccctgtctctactaaaaatacaaaattagccaggcatgttggcacatgcctgtaattccagctactagggaggctgaggcaggagaatcgcaggcggaggttgcagtgagccgagatcgtgccattgcactccagcctgggcaacaagagcaaaactccgtctca

SEQ ID NO: 195163 - DNA, 675 bp, Homo sapiens
aaaattaagaaatcaagaaacaagtttaaaaagccatctgaaaatacacacctggggcaaagctgagacaaacactccagctgccttactcctcatgaattcgtgaatgcccaatctgtttctccatacttcctcccttactcttcagtctccaagaggaaaaaggaaaatggacctagcagacttttaattaaactaaaatccttcagaagtttattgaaaaaggagaattatacagaatttaatgtattgaaacatattaaatcctcaatgtatttattctgcatccctaaacagtcacatatggacattaaacagttctcttcctagatagaactgtgtttcaaacagaaaggaatagttccacagagtacaattaagtttctaaagcatttcgggaaatcaatgtcaaataataattataagcttgcaccggtatgttaaagtacttagctcatctatgttccacactgaataaaagaatttaccaaccaaattctccattatatttcaaatacagtaattcaagagctttggcataaagtcttatttccaaagcataattttaaaaatacacttctcagtcattgtccagctgccagttctatccttcttcattcattttcatttctcttttgactctattctctgtaacttcatataaaccacctcaca

SEQ ID NO: 195164 - DNA, 861 bp, Homo sapiens
ggaagctgaagagctcaagacacactccctgagcacttgtcacgagccagacactgccagaagctctgggatgacacagtcagtgcgtgtgactctcagtgaaccctcaggtgtgcaggaaacgtgactgtcttttctgcgtgtttcccttcagctgagtggaagaaacgtattctcagtcagttctggacttcatgccccatttccctggggtcgtgtcacagacagggcatttgcaactctgcctggaaggcgcagaaagaggaccgcatgactgttttcaggcgaaggttgccatggataaagaagcgctttgcattggctgtgtaatgcggcacagcaagttagcacgaattagaggcttaaagcagcatccgtgacctccctgtgtctgtggtcagtgcctgagccgctccctggaccctctctcagcctgcagtcgaggtgtccgtgggctactctcctccctctgcggacaggaactgcttcctcgtgcactccccaggtcactggtggggtcagctccgtgctggctgctggcctctctgcagggcaggttgcaccatgacagctgctccttcagggcaataaaggagaaaaggcaggggcaggggtcaagacgtaagtcacaggcttccggaacttcacctggaaagtgacacccatcacctttgctgtgtcctgttcaccagaagtgagccactgggctccacccacattcggggagaagaatggggcgtggatgcaggtggagggggcccagcaccttgaagttgccctacccaggctggcacatgtgtcccaggagtgttgtatgagggtgggcaacatggaaaacatgcacagtttatgtgactgtca

SEQ ID NO: 195165 - DNA, 452 bp, Homo sapiens
gttcaaataatcctcctgcctcagcctcccaagtagctaggattacagccgtgtgccaccacgcccagctaattttttttatttttagtagagacagggtttcaccatgttggccaggctggtctcaaactcatgacctcaagtgatctgccagtcttggcctcccaaaagtgctgagattacaggcgtgaaacaccacgcctggcctataaatcttaaaagtaatttgctagacgtacacccagtacttttaacttccttggttcaaacttaccctacgacaatagctttaaaacatggttttaatgcatggatgcaaaaatgagggctcattttctgtacataaaacttcatgtctaaaatcaggatcacatgtaagtgtaagcagtctaaagtgtggaaaataatcgaactctacaactgctctgtaattctgaggtacaggttatggt

SEQ ID NO: 195166 - DNA, 274 bp, Homo sapiens
aaattgtgcttctatacctaccatttctaattactgttgatattcacctacatctattgtctgatttttaggtttcacatttgcacagcacatgttaccttcacatgtataaataatcatacccgtatgtatctaaatattcaagaatacaccagagaatactatggtttgagaggctggagactagccatagaattatggtgattagttgtggatttctggtcgacgcggccgcgaatttagtagtagtaggctagtagtagtaggcggccgc

SEQ ID NO: 195167 - DNA, 200 bp, Homo sapiens
ctaggggtgatggatgctcgctgggcctccctggctctgcctgccacctgctaggatctcagggaggtgctatcttgccatgctggacccgggtgtattctcggagggtcccgaatgccatttggcctgggcctcccatccacagaggccctagcgtttagacttctgatgtcctctcaaacaaggtacacatgtttgtg

SEQ ID NO: 195168 - DNA, 296 bp, Homo sapiens
aatgtacagaagcggctgattacagttttggcctaagattttagtagttagtgcccttttaaatcagtatctgtagactccagaaaaaaatccattgagttttgagcacctgcttttctaaacaattggggtttggaacaatagtttaactctagaagtacatgtatttttcttctaagaagagtgttgtccgcatggcatttacagtccagggtccatggtaacaccacaaatctaagaattaaaagttgactctttgattttttttcagactggccagatatcaaatgaactct

SEQ ID NO: 195169 - DNA, 321 bp, Homo sapiens
tcatgacctaatcacctcttcaagacatcacctcttaatgctattcacgtttggcaacacctgaattttggtgggaacacattcaaactatagcaccaggagcattattctcttttccacttcatgggggatataatttgaccagtgttataaggttgtatagtgagaagctcactagtgtggtttttggtgtgtatatttaattgccctagtgaatattcctttgatcaacctttcttcttaacacttccaaatgtacttattgcttctagcacagtagactgtctccagcaaaaatctacttatcaggtcttttggtta

SEQ ID NO: 195170 - DNA, 727 bp, Homo sapiens
gtccctttagagaacccttactaatacaccccatacccattagtcatagggatcagagaagaagtatctttgtttttgtttgttctggagttacaaagttgcttggatgaaaatctggggctaccaggaaacctcatgccagacagaagagttggagagagacatactccaatgtcactgtctgaattatgaaatgccattgaacctgaagtcattccctggccttttcagttactgagtctataatttccgtttctgctcaagctggttctgatttttaaacaaaactttatttgcaaacaaaaatatcctatctaatatgtcagtttgtgtgagaaaggataattggaatctgacaccattagtccactgaccaacactgttcaagaatgtgggtgcttataaacacaggattggagagtttggtggggctctaggtgcaaagacgggacaagggcataggtgccagggattcagtcgtgaggaaatggataattcctgcagtagtagggtatcagacaggagttttgtaatcagtaaatcagaaggggtcccagataactggcattcaaaggccagaatgggacagtggcaaagctgatgctatatccaacttgaaacaaatgttcttccaaatgccttctgccgtgcagccagatacaaggcagggcttaacctgggattcaggaatgtagacttggggagccctgtttaggagtcccgttga

SEQ ID NO: 195171 - DNA, 197 bp, Homo sapiens
gctggcagtataggtgaaagtgtgggtatatgaatgaacgtggaagagattggcttggtgggagtccagttgcatagtgtgaagcatgaaaagtgagttgaatgggtaaagtgggttgacagctgggggtctttcaagggagctgtgggtcagttcagtcagctccatgccctctttgtgcatggtcttgtcctcat

SEQ ID NO: 195172 - DNA, 632 bp, Homo sapiens
ccgcgcggaagttatttaaggactcttcctggaaggagtcacctgagcggacctgaattccatctgaggacggaggacagattccgggccctgaccctggccctgctcttcgcctagatccaggactggctatcagtcgctctgagaatgcgacctacctgtcgccagcttccacttggttccgcgccaggacaggttttactttcatttctcccgcgcgcctccgactgctggggagtccaagtacagctaggcgtcggcccacgcccggggaaggtcccgtgttctgacttcgttccttccagtctccaccagtcctggggggtggggcgcgccgggggtgttcgttctccagagaactctgcgactgtacctcgctgccacctcgctgcctcctcgctggcctacagcaggcatgtgctgtaggccagcgtctccttcatgttctcttatatcttgctcaccatgtgccgcaacctcataaccttcctgcgagagactttcctcaaccgctatgtgccttttgatgccgcagtggacttccaccgctggatcgccatggctgctgttgtcctggccattttgcacagtgctgccacgcagtcaatgtctacatcttctcagtcagccca

SEQ ID NO: 195173 - DNA, 433 bp, Homo sapiens
aatatttaaatgtaactgtttataatgttaggtttaatctgtcattttgcagtttattttctttttgttccacgtattctgtatttcactttgcctttattctacctttctctggattaattgaacatttttctgaagattcttatctcttctgctaatttgttagctctaatgttttattttattttgtatgtaatttactataatatacctttaactggtattatgccactttgtatatataccatgtatatagtatgggaatcttacaataggatagttctgtttctccctttcctgtctttgtgctattattgtgatatattttatatattttacttttgcttatgttacaaactacacactacattgtttttgttttgtttaaatagtaaattatcttcaataataaaatatttcatatatttatcca

SEQ ID NO: 195174 - DNA, 540 bp, Homo sapiens
attcatttcatttttcaaatagagtaagtccttaaggtttttggaaactgggacttaagtaaaatggcataaaataaaacacttttttttctcatcaacgttataataaaacaacgtctaatcaaacaacattatctgagggcctgctatacagcctttcacttaaagtcacagtttctaagaacctatcaaagacttgaagacctgctgtacatattctgaaatcaccaaaaacaattaacttttctataacttccaagccttcttgtacactccaaaggtcaaaccaagaaaacacaaatttttttttttttttttttttgaggcaggatctcattctgtcacccaggctggagtgcagtggctcagtcacagctcactgtagcctcggcctcccaggtccaagcaatcctcccacctcagcctctagagtagctgggaacacaggcaaacaccaccaggactggctaattttttaatttttagtagagacggggtccctatgttgcccaggctggtcttaagcaatcctccacctag

SEQ ID NO: 195175 - DNA, 536 bp, Homo sapiens
gtaatccccccgcctcggcctcccaaagtgctgggattacaggcttgagccattgtgcccagcaatccaaaattttttgagtgcgaaaaggattgccgcaagtggaaaattccatgcctgacctcgtgtgacaggttgctatcaagacacagtcaaaatgtttttaatgcacaaaaatattaaaaatatgatgtaaaattaccttcagacaattaaaaatattgtgtaaaattaccttcatatataaggtatatatgaaacaagtgaattttgtgtttagagttgagccccatccccaagatagctcatatgtatctgcaaatattctagaattagaaaaaatctgaagtccgaaacactgctggtcccaagcatttcagataagggatactcaccctgtaagtagtagtaacagtaatagtggtgatgagaagattctagaggaaaaccattggaagtgctgcctgctttctggagttctggtctgagggatggagaaactttgcccatagtttgtttttggagtagctgaggtg

SEQ ID NO: 195176 - DNA, 1147 bp, Homo sapiens
tgaaaaagaaaagcttgagaagaaggcagtggctaggtaacaaaaggtcttacttgccaaactaaggaatttgaattttattctgaaatttagggtactaagtaacgactttaagtgatggaaactgtattgcacgaatgtgtagaggatgaatttaggagattgaagactgctgaacagactgaagcctagaattcagcctccagtgatgggtgaaggaggctctaagctcaagcaaggatagtcagtgaagaatatgttgcacatgctaatgtagtaagaatagataaggcatagtttttgcaatcaaataattggggaaggtgattgacacacagggtagattaactttacctggatggatggtggtgtgatatgccttgtaggcaatataggggtaaacagtttgattttatacatgttaaatgagtcatccaaacccaaaaggtcaatttgagctggatggcttgagttaggagtaattaagatatagttagtgaaaagcttggcacatgtaaattggccatgagaatgtacagattagaatgagaaagggatcatggatacaacccaggaaaacatcaatatacaagaagtagatgaaggaattgtgcaaagatgaaaaggaatggccctgtatgtaggagaaaaggcagaagagtgatgtcactgaacccaagggataaatgaatctcagatgggcagtagtgtcaggtgctataaaggaagtaataaggagagtaaattggtaaatgagataattgtagactttggcaagagaaatttcactgaaggagggtgaacaagtaggctgttgaagactatttcaaatataattgaagggaagaatgacttagggaccatttctggtttaataatgtatgcacatgttgagggtagattaaagaagacattgctgggaggaacaacttttgtgaaataaattggagtcatagcataggtggaggaattaaccttaatttcagggatggaaaagcccacataaagaagggaatacagataagtgatttggaggtgaaggaattttctgcctgctgactcattttctctaaggagaaagacttcattttttaagagtctcaatttggatatttgagtgcttaatgatattaaattaatgagtttc

SEQ ID NO: 195177 - DNA, 800 bp, Homo sapiens
cctcccttcatctgtagaataggaaaactttctggtagcagtgctgttactgtctgttgtggggttacttagatttgtctctgctcttcaaggtgctccagatttattgtcattatctacggggaagaaagagactcaggcactttgggcagaaattgactatttgtagaatacttgttgaggaaggggagaaaatttgggatttttgtttttggcaacggttttatatgttactccctgtgagataactgtccttctaatttggagagggaatggactactgcactctccctttcctccccagctcaaaccaaacatccctttatccactgaatcctgtggccaccatttaggttcttcaaaatctgtaacagctttaactatggtttcctattattactgtgaagtaataagagagcctgggaaggatgtttatctctctatctgttgacaaatttctattaccatggtgaggtgaggagaagggagagactgagaaagcagcttctgtctctccctttctctgttttgaaatctgttgatgtagaaaggtgtgtgatagctctttattgtctcataagagacctttcagaagcattcagaattcggaagaatatgaatgtgaatttttctttcatctctaaacacatttttcatgttctgtttttaactttgcgttgaaatgttcttgtttcacacatgattacttatttactgcttttgctttctttataatttatttgtgtcatttctctgtgactatattgcattcagttttctttatttttatataagtattc

SEQ ID NO: 195178 - DNA, 257 bp, Homo sapiens
aggagaaagagcatacttggtcttcctaaaaaatccagtaaggattctggattgaacctatttggaggtagttttcttgctccttgattcctcttaagagtgagaaatgagcagagatgagagaatcaaattaatggtttttctgcatcaattagatcgtcattatcaatagcagaaatcatgctttgttattattcctgcgggcagttgacacaactgaaatgttcaaagatgtaaactattttcaaaaattgtgc

SEQ ID NO: 195179 - DNA, 746 bp, Homo sapiens
gaaccagcggttacttgtgcagacggggtttcaccatattggtcaggctggtcttgaactcctgacttcatgatccacccacctcggctcccaaagtgctgggattataggtgtgagccaccatgcccggcctacattcacttttatattatgatagaatctgtctagtaaatttcatagtgtagtttctttttaaatttttattcttttggagacagggtcttgctctgttgcccaagctggagtgcagtggtgcaaccaatataatataaagtttcatagtgagcctgcttgtttcttggattttaatcctgagtagaaatgattccacttaaggtgggatatatccttgtctgtagccagaagaccttcatgagctcttgctaccttttcttggatttactttgtaatcagtgttgggtattatgttttactggaggtgcctagttacaaggttttattacagcagtatttctaaacatttggttagtctgtctctgcttttcccaccataattttctagcacttgtagctcaccttatctcccacttccctttttaaatagaaaacaggcttgttctgttttgaccaggtataactctttgctcagactgtctctaaagcccagaaaactattcctctagtggtccaatgaagtgttccccattgaaagtttgcctcatgtactctcaactccagtggtcttcaaaccactggaatcactgaataccgtctcctttgcctct

SEQ ID NO: 195180 - DNA, 673 bp, Homo sapiens
tctcttgaccttgtgatctgcccgcctccacctccccgtgttctgggattacaggtgtgagcccccctgccccgccgagaatatggatagtctagtaaatttcatagtgtagtttctttttaaatttttattcttttggagacagggtcttgctctgttgcccaagctggagtgcagtggtgcaaccaatataatataaagtttcatagtgagcctgcttgtttcttggattttaatcctgagtagaaatgattccacttaaggtgggatatatccttgtctgtagccagaagaccttcatgagctcttgctaccttttcttggatttactttgtaatcagtgttgggtattatgttttactggaggtgcctagttacaaggttttattacagcagtatttctaaacatttggttagtctgtctctgcttttcccaccataattttctagcacttgtagctcaccttatctcccacttccctttttaaatagaaaacaggcttgttctgttttgaccaggtataactctttgctcagactgtctctaaagcccagaaaactattcctctagtggtccaatgaagtgttccccattgaaagtttgcctcatgtactctcaactccagtggtcttcaaaccactggaatcactgaataccgtctcctttgcctct

SEQ ID NO: 195181 - DNA, 393 bp, Homo sapiens
aaaaataaaaataaaatgttctggaattagacagtgatgatatatgtacaaccttgtatttgaaataactgaaacccactaagttgttatggtatgtaaattatatctcacttaaaaagtgaaaaaaaattcaaggtatggaccactgtacttgggatacttgctgaatacaagaatggtcaataaaatgagctaatggtttatattggatttttacccccagagcaatgtgcaagtgtatagaatagtaaaaggaatttaaaaataaacacagatagactagaaaataatttatacagtagtgatgttgagtttttcatttgaaactatgaaaagtaacagctttgcttatttgcatctatccaatatcacaaactgagattccacacaaca

SEQ ID NO: 195182 - DNA, 362 bp, Homo sapiens
ctccagagttttctccctggctgtgaagcatgctctgagtgctggaacagctcaacatggcctctgttcttcgttctgagagaacagaagggaaacgtgcaaagcaatctttggtgtaggcccagtatggctgaaaatagcagcactcctatctctggattagcaatgaaggaatgcagactccttcataaaaagagtatatttcagacatatttgtctgaaacctgtgttcaaatcccagctttaagcataatgcgaatggctttgaacaagcacagctttgcagaattgtttccttggctctaagtatgtgttatttattacactcatccttgtggtggttctgtgagattttggggaag

SEQ ID NO: 195183 - DNA, 709 bp, Homo sapiens
gacatcacagcagagataccaagatatatatgaatctagaattcctgcgacaaatgaggtatggagataaagattggagagtcctagacattttggatttatgaccatgatcttaaagtgagcacagacagcctgagtggctgtttctcttcagcaatgtgtggatggttcctaatgtgtagatttacacagcaaatgcaatgaaagtaaagaaagggattattgtagtgtcagatttacatgcatgattctttaatggattgtagcatttgtggaaaaatgaatacagttggtatttgaataactattttgttgattatacctggatttgatacccaggtgattccaccctgggctcttagctcaattttagtatgatcccagaactggatttaaatacagacagtccctgatttacaatgtcttgacttaggattttttgactttatgatggtacaaaagcaatatacattcagtagaaactctactttgaatttgaattttggtcttttcctggactagcgatatgtggtacaatacttctcaagatgctgagccaaatcatctaacacagagcctattttaataataaagtgttgaataactcatgtattttattaaatactgtacagaaagtgctctgagcatttctaagataggttaggctaagctatgatgtttggtagatggtatggtttcaatacttgtt

SEQ ID NO: 195184 - DNA, 498 bp, Homo sapiens
actacttaaccacactaccagaaaggaagatgcagaaactcaagttcttgcaggctaggtgtatctggtttttagtgctactgtaacaaattactacgaactaacaggcttacaacaacacacatttcttattttaccattctagaagtcagaagtctcgaatggggtgacagaactgccttctgcaggctctaggggtgaatccatttccttaccttttccagcttccagaggccagctgcatgtgttggcttctatctccaaagctagcagctcagtgtcttcagatctcttctctctctctaaccctgacactcttgcttccctcttgtaaggatccctgcaattacactgcccctgctaggataattcagagtcatctctccatctcaagatccttaattatatctgcaaagtccttctgtcatgtaaggaaagatattcacaggttgcaggtactaggaggggaatatacttgggatgccattattctgcctg

SEQ ID NO: 195185 - DNA, 257 bp, Homo sapiens
atgtaccaccacgcctagcccttcttgactttctatagtatagtactatactactttttgattacatgactgccatctaacagggacctagtgatttcagctgtttaactacagttgacctttaacaacacatgtttgaactgtgagagttcacttatacagatttccttgccccgctgccacccctgagacagtaagaccaatccctcctgttcctgagcctacttaatgtgaagacgatgaggatgaagaccttt

SEQ ID NO: 195186 - DNA, 488 bp, Homo sapiens
gccatgcttttcacaacccacttcaaacatggaaccaccgaagcaaataatgagcatggaaaagacttccaagttaaatgtagtggagacttcaagactgaatcacactgaaaaattaaaccaggtgagagataagaatttggagatataaatatacgatgtttttaaattcagtggtgttaacactttgatctgatggaaaagttgaccttttaaaaactgaagtcattcacttatttcaaatttgactaagcatttcctatggttctgtagattagtaagaagtgagaagtggagtgaaagaagagtacaattttatcaactccacagtttccactattttctgcaaatgactcccaactcccaaatctgtatctctagttccagttcctcaccaaagttacagaagcatatttgcaatttacctcacaaatatcttctgaatggctgtccctgagcataataatcctggtatttttctgtgactg

SEQ ID NO: 195187 - DNA, 469 bp, Homo sapiens
attttaaatatttgattttgtgtccttagatgttggtttctgaattactcatttagaagaaatggttaccataaatatccaggttttaaaaaattctttaaacatttttgcatttaacttcagaagacaaattttaaaactttagattatgaaaaatttaataatttggatattaatacagaaaataatcctagtgtagccaactatcaggacttaactgagagtaatattttgccacattttacttcagatactatcatcatcatcatcatttgtagaaataagctacagatacaggtgaaatactccatcccaaatctttttctcttccttttatccccagagataaccattatcataaattgtgtctatatatgtatgcagctatactaatatgttgtatggctttttaaaaaaattttatagagatggtatcatacctctaagtactgcagctggatctcacaag

SEQ ID NO: 195188 - DNA, 268 bp, Homo sapiens
catggagcaccactctcccctgtgctgatacacttacaaagaagttcacctactccttggaaagttctggaaaaggggcttctacactgttggcctctcgaggagaacggtttttgtttctgtcttcctggaaaagaggtgactgctggcatcatctttctagataaactccttgctatgatgccattagaagcagtgttcttttgtgttttgcttttgtttttccctgtagacaggaataacattttgactagaaacttccctgatg

SEQ ID NO: 195189 - DNA, 704 bp, Homo sapiens
ccaagccttgggggtgtgaggccctgaagttgaaacttcaagaacttcaagggtaaatagcctgtggtctttgcaagtggctggcgaaggtgtcaaagagatgggactcacccttgactgagcctggaagactgggcagaatttggaaagacaaaataaaaagggccgtgtggcaggatgaacaaagacatttaatattgccagaggcctgcttggggagcccgtgagcaaaccagtccaattggacagaaacgttgcaaagtccaggtggaaagaggaaggctggaaagtcagctgaagtcagttgggggtggtgggggtgggccttgagtgtaggctgacatctgaattctatttcactagttataggagccatggatgtttattttttaaatgcagttcattgacttgaagaaaacaatgtcttaggaagattagcctggttttattgttcaaggcaatgaagcaggaggcacttacaaaagtccaggcttgggtgataagggcctaaacttaggctgttgatgaaacccaggttgtagccgtgcgaatgaaaaggaaatacctaactcagtggattttggtgatttttagagaccaagaagagaaggattccaagatgattgaggtttctgctgagtattagagaataactgtatcattaagagatatgagaaggttaagagggccagatttgaaggaga

SEQ ID NO: 195190 - DNA, 511 bp, Homo sapiens
ctaaagttaggaagttctaggaatagtaatttttccctttaaaaattaccctgcttacacacaaactgtttctcagtctggtctatccatgctttaagtagatattttctccagagctgtgagtttttctacttttggaggccatttcattgagaagcttagaaaaggcaaatatgaaacaatctagggtataagtcaaactaggaaagtatccatgaaattaagggtaaaatgctgtactttgctccacaaatcacatctctatttgatgcacatccaagaaagagtgctgttagtcttcagaggtacttgtactgtttttgttttctaaaattctgttgaacttatcattttgtacattcctgagtatgaaagtgacttacatttttaacaaatgaaaatattgaactataaaagtggaatgaaagaaagagaaattctggattttgctctcttggattccaaagcagggctaggcccggcatggtggctcatgcctataatcccagca

SEQ ID NO: 195191 - DNA, 378 bp, Homo sapiens
atcatgccactgcactccagcctgggcgatagagtgagaccctgtctcttttaaaaaagaaaaatgacaaatgatttctcattgtgatgttagtatgttacgtttgtctgatattttacagtttccaaaatgctttcatatatgttatgtaagttgatcacaggggctaggtagtagttagaaagtttcacctttgtaagaaataggcttggaggccaggcatggtggctgttgctatgttgctcaggctaggagttcaagaccagcctgggcgacatagcaagaccccatctctacaaaaaaatttttttaaaaaattgatcaggcataaatatgattgtgggtgacagggggagaccctgtctccgcccccccccc

SEQ ID NO: 195192 - DNA, 149 bp, Homo sapiens
taccacagggatggagaagaacaaaaatatttcctttcatgatatattttccatagaaaaatcaaaacactactgaaaactcttctcctggatttacgtcaagatcagtcgtcggccaggcgcagtgactcacacctgtaatctgagca

SEQ ID NO: 195193 - DNA, 700 bp, Homo sapiens
gggagatatacctaatgctagatgacgagttagtgggtgcagcgcaccagcatggcacacgtatacatatgtaactaacctgcacattgtgcacatgtaccctaaaacttaaagtataataataataaataaaattaaaaaaaaacccaactttttgaatgtcaatgtgacgccacaagtggaaaattcctcacctgacctcatgtgataggtcacagtcaaaactttgtttcatgtgcagaattattaaaaatattaccttcaggctatgtatacaagggatataataaacacatgaacttcatgtttagacttgagtcccatccccaagatacctcatcatgtacatacaaatattccaaaaaataattaaaaatctgaattctgacacacatccggtctccagcatttcagataagggacactcaacctgtgcaagttgaatgtggagaaactacaggacacgctgttttccatgatctctcctttgctgccatctagtgacagttttgtgtaacgtcaaatagaaaaagtgtcttctaacaatgaagttttgatgtggctatttcctctacttatgcagcgccctcactggactgaagtatttccaactgagcctgggaatttaatttgctggtttgcatcagcagtgacacttaatctcctcaagagcacttactaaactacactctgggtcctg

SEQ ID NO: 195194 - DNA, 389 bp, Homo sapiens
aggaccattcctggctgttctagatggcattccagggtccctaggaagactaagcctcagttgccctcatggtaacctgcttaatgacacatccttataatctacttctttcctgtcttatttcacttaccttccccgattttacaaaattctccaatttgtcttggaatcacctcctaaatcatgcattctcactagggatgctattgcattccagggggcaaaattcgttctgggaggatagagtgaaaaaatcttactctttttatactttatatagcaagcccatataaacacacagtttacaaagacgtacacagtgtatcagtactattaacatttcatgggtgagggcaattggggaaaaacgtctctaaagactcctcaaa

SEQ ID NO: 195195 - DNA, 768 bp, Homo sapiens
attctgttgcccaggctggagtgcagtggcgccatcacagctcacctcagcctcctgagtagctgggactccaagcacatgccaccatgcctggctaattgccttgtatagctttttagccacatgcttaattatatgctcttttatttatttttatttttattttgggggatggagtctcgctccgtcgcccaggctggagtgcagtggtgcaatctcggctcactgcaatctctgcctcctgggtttaagtgattttcctgcttcagcctcctgagtaactgggattataggcatatgccaccacgcccagataatttttgtatttttagtagagacaaggttttgtcatgttggccaggctggtctcaaattcctgacctcaggtgatctgcccacctcagcctcccaaaggataacgccctaggattacaggcatgagccaccacacccagccttttattttgttttaaacaaaataaaacataaggttttcaaacaaaacataaagtcctcaaattaacaaacatacccttaaatctgtgtgcattagccatgttggtagggctcatagtagctgttcacttatttagttgtcttaacaacttttcatcttggtcttttgggctgacatggtgaaaatgctctctagttgctcttgagcttatttttcacttctatcataaatgtcatagaatggagagaaggactggattctcatttaagtcattatatttaccaagagcgactacggggggtcctctagag

SEQ ID NO: 195196 - DNA, 311 bp, Homo sapiens
atcattttcttcttccggaaacaggtcagagaggctcagaaaggtcctcttccaaatgggcacaattcagatctgactccacggctggaatagttcacaagggtcagctaagccagcaaggggcaactagtcacgaacacttattaggtgcaaagagcagtgctggggatgagacttgcagggtatctccagcaagggactgtttcacataattgggaccaaagctcctacaatggagggaatggaggagggtgtgcaggggactatctagtgggggaggaaggcttcccggaagaagaaatgatgtctga

SEQ ID NO: 195197 - DNA, 321 bp, Homo sapiens
gatatattcctaggtattttttttgtgtgtggctattgtaaatgggattatgttcttgatttggctcttaggttgaatgttattggtgtatagaaatgctactgatttttgtacatagatttttgtatcctgaaaccttgctaaaagtgtttatcagttctaatagccttttggcagagtccttagggttttctacatatagaatcacattgttagcaaagagagatcagttgtcttcttcctattgcaatgccttttctcttgcctgctgctctggctagtgcttccagtactgtgttgaataggagtggtgagaggagg

SEQ ID NO: 195198 - DNA, 792 bp, Homo sapiens
tgtcagtacccacttcctccctctaatctcttccctccagttcccacccttgagggtgttagtgagtctcattagtttctagattatccttcatgtttctgtctgcaaaattaaggctatacctatttgttcaactatttccaatctttcttatgctagtagcattttatatatattcttgcacttgagtttttgcagttaacaatacctcttcccagcactttgggaggcccaggtgggtggatcacctgaggtcaggagttcgagaccagcctggccaacatgatgaaacctcatctctactaaaaatacaaaaattagcagggcgtggtggtgggcacctgtaatctcagctactcgggaggctgaggcaggagaattgctggaacctgggaggtggatgttgcagtgagccgagatcgcgccattgcgctccagcctgggccaacaacagcgagactctgtccccctgccaaaaaaaaagtacctcctagaaatcagtctctgttagttcattaaaatgtagtgatggctggaagtgtatgagggatctatgagactttttcaggatggaggtgttactatagtttgcatgctgatgaaactaatctgatcctattgaagagggagaggtgtcatcacgtttcagaaagaagcctcgaagtaggccttcaagaggggctgagacgctggacagaaatggagggttttggttttggttagtgaaaggacacttcactttgaggaaaagtgacatctgatttattagagccttgaattctaatagaaatc

SEQ ID NO: 195199 - DNA, 636 bp, Homo sapiens
agtcacaccgctgggtaggggagagtgtgaagagaccgaggctcagagagccatggggcttacctgcagacatgtagcccaaggggtgtgagtggcacaggaggcctcgtcttccgctgcgatggttgcattatcttgtgttccatgcctgtgctgggtcagagcttctagagtcccatcccaggggacgcttcacttagctcctcacctctgtgagtcaccatcatcacagttgggatgtcaagtttagtgcttcagaatgtacatgcccttggccgggagagagatgaagctggtatcagtcatccacaccttagtctgaatttacatcccgtgagggcagagatcagagggagctagggatcagcgggctattggaaaggaaggaatagtctagctccagtcagagtaggcggggcagggggaatcagagcagtggctccaaagtcacccttcccagctgtccgccactctgggcctaagtgcagatggaaggcagggaatgaaggaacttggcttgcttggtgaccagacaaggtcccaccctcacattccggggcgaggatgcttttagagaatggccctgacctgaccactgtgcactgctggtcaaatgctggttgtagctactgcagc

SEQ ID NO: 195200 - DNA, 313 bp, Homo sapiens
agtatgcattgtacctggcagaaagaatgttttctggttttcagctaagattctggtttctacacgtttttcttcaccagcaacgttagtgtcattatcttaggcttcccctttaaaactttaaaaattgatccctaaatttattttctcattcttcacataattcagaaccaaggaaatactaattaattgtgatattcttgttttcttctctagtagcttaaaagtacatgaaatcaatgtgaattttcaacatgacttttatccctggtacaggccagttgaaatgactaacaattactttttcaaatta

SEQ ID NO: 195201 - DNA, 248 bp, Homo sapiens
gcagtgagagatagagttggagcaaggcagaggcagagaaagcaatggggacaggctgggaagttccagctctgctctctacagtggaagtactctctgtcctcaaagtcccttttatttcagaagatgcacccggggacaagcagtttaagaatgtgtgtgttactaggcagagaagctggcatcgcctgagggctgtgccttgagttcttgaagacattttctttaaagggagtcaccagcaccac

SEQ ID NO: 195202 - DNA, 375 bp, Homo sapiens
acacctaacgctggatacacttgcaaatgaaattcagaaatgaactcaagattcatttcagtctactttggattcacttcatccaattctaattctcatccggtcagaaggcccgaatttactccaatctggagaaattagattacattctgttgatactgagcctaagaacccagtaaagttttaaatgtataatattatccattatagaatcctatctggaagcaaaatctcgaagaccaaattcaatgaagttaactgggattattaatgagaaggctagactaattcaccctgaccttggggtgctaggtagggggctataggaaatcctgcaacgaccaacattccagatgtcaaatactttgttttcat

SEQ ID NO: 195203 - DNA, 408 bp, Homo sapiens
ccggacaggtttttcaacataccaaaacgttatatttttttattcacccttttgtctctctccacatccaccaccatcacaagcagcagcagcaggagcatcctcaaacgaagaaaacccctccaaagtgccccgaatgtgtgctgctgctggctctgaagccgtgtagaatttcgtaatggaatgtgaactgctcgtccggatctgggctcacgttctatctcctaaccagtaaggagcgagggagggcaaatctgctgagcaaggagaaatactttcctcctcttttataacccatcacggatgcacggcggccgaggggcgcgagctgcacgcggcgcctgtcaagcggcccgggcccgcaccccgtggggtccccgcgtcccccagctccccgccccgcccgga

SEQ ID NO: 195204 - DNA, 371 bp, Homo sapiens
ctctagaacaggatccacaaactacagcccatgggccaaatctggcccacagcctgtttttgtaaataaagttttattggagcacagctacaccattcaattacatgcactctgtggctgccttcatgctacagtggcagaactgaagagctgagatagaaaccacatgggccacaaacctgaaaatatttactctctggcctcttgcagaaaaagtttgctgaccccagttccagagctctcagcatcatctgactctgttgaccactccacccttccggaaacacctcttcccgtggcttccacatcatgctctcctgctttcctcctcactctctggtttgctctgactcctctgatcatctgagccg

SEQ ID NO: 195205 - DNA, 458 bp, Homo sapiens
tactctacacttacatggtttggggtaggcagtgaaataccataggtagaaaaggtaattcagtgaagcatccaaatagacagaaacaacacaaatatttttgctggagtcaggagcactatgtggcacagaacacctcccagaaagcagaaaatttttctgcctgaaaaccaatgtatatgtaagaccccaagtaaaaaacaaaagcaaatgagccccaaactgtcttccctcagctttgcctgggagctgctatctttgcacttatttttctagcatcaggatattagccacatgagggagccaagcatatttgtctcattttaggcatcattcttttgtggttccccccaccccaggtattgttgagtctgtccaaagctgggtgagataccacacaagtcttgcttccctcagtgtgctgcttctctcggccttggtggaggctgagcctgttg

SEQ ID NO: 195206 - DNA, 913 bp, Homo sapiens
tattagcattaacatctgaacatgtcccatggcctcaggcaaacaaagacactcttaactggcaggatattccaggggtttagaggttgtctcccaaggaggcaggccagggtacctttccttgaaatgttcagggtttggatcatccagttctgctgagttaatccctttactttatactaccttctgtctaaagacctcttgcaaatcaagaaatcactattgtcaagaaaaacacaatagtggaaaaatggacagatgacacgaaagggtaatttatttaaaaaataaagctaaaatataaatacttctgtcccatatatctaagaagtgcatgttaaagcaatgattaaatatgtttatgtatttcaaaagaacaaagcctgacattggttaatggtctcatgtattggtgatgaatatataaattgatacaaccttcctggacagtgttttgccttttctttgaccctgcaattacacttttcctaaggaactaatcaggcaaaatcattcaaaaactgtatgtctaacagtgtttgctgttgtctataaaagcaagcaagcaagaaagaaaacaacctaaaggtctattaataatgaaataagttttggttattgcatgcaaaggaatatattatgaatctattaagaaaatgaatgttttgacttttgttttctgtcatgaagtgagatctacaatattgtcaattaaaatgtagatttctgaaaagaaaattatacatttaataatatgtgcatgtgtatgcctgtgtgtgtatacatggaaaaagcctgaaaggataaatcccaaaaataaggtaactagttatctccaggtgatattataagtgattttcattttttatatatttactaaaatttgtgttttaatatttgccaaaaagtaaaa

SEQ ID NO: 195207 - DNA, 144 bp, Homo sapiens
tgttctcctggaggctcccgaaaccctatttcctatggggtacactttaaggagaagggtagcttggcagagccagccgtacgaggagaactccacgtaacaaagttcctgctgccccgacactgcccaggaggcaacggggtc

SEQ ID NO: 195208 - DNA, 138 bp, Homo sapiens
ttgctccagattgtttaccctccattctcctaaagaagataaggcacagccagggatatctgttgtcctgataccatacccattcctttcagaatgagcatataattattcaaacatggagaaaggctgcccaagggc

SEQ ID NO: 195209 - DNA, 372 bp, Homo sapiens
cacttctgagtctcagtttccacatctgtaaaatggaggggataatcaactacctaagaagcctgctcagaggtttaatgagaacatgcatgaaaggtcttccaattccaaggtattctgtcatgtcccgcggtcctcgtactgacatcagaataaccagaggaacttttagaaaacataacctgccacatgccacatctacagagtcagggtggggggcaggggtggagacacatcctttttcttccagctcttcttttctgctatttccacacatggtcctgatgctttattaacttaagacctgccagcttctgatagctgaaaagaagaaaatgcagcaagaaaaatagagatcctggaggctcatgg

SEQ ID NO: 195210 - DNA, 894 bp, Homo sapiens
tctgttttctggttttggctgtgccataaacgattatttatgaaaactgcaatagtcatcatttaaagttatggaactgtgtccggaattggtgggttcttggtctcactgacttcaagaatgaagccgcggacccttgcggtaagtcagggatttcttcttggtttggatccactgctggtgagcagacagagtcttgccctgttgcccaggctggagtatagtagtgcagtggtgtgatcatagctcactgtaacttcgaccacctgggctcaaacaatccttcttcctctgcctcccaagtagctgggactacagaacagagcaggacccaggatgcaagaccctaggcatccccaaggccttccactgtccccaggccttccaaagagacagcggcaggaccgcacaatctacaactggaaacagcaggaagtgctagaaaatcactttaaggaggaacagtacccagactatgacacacgacaagagctggcggagatgctcaatctcagggagtaccaagtgcaggtgtggttcaagaatcgccgggccaaacgctctcgggagcggtggttccagaagcagctccagcagctccagaagcatcctcagcagcagcatcctcagcagcagcatccccagcagcagctccagcagcagcagccccagcagcagccccagcagcagcagccccagcagcagccacagcagcagcagccccagcagcagcagctccaccagcagccccagtagcagctctagcagcagcagcagcagccccagcagcagcaactccagtagcagctccagcagcagcagccccagcagtagctccagcagcagcagcagcagccccagtagcagctccagcagccccagtagcagctccag

SEQ ID NO: 195211 - DNA, 973 bp, Homo sapiens
gcctccctgcctgtcgagtctgcacacgggtttcacgccctcccctgtgttctggccaggagactttgcgttcggttggaattgttacagagttcagctggaggtttccttctccctgtggccttttcccagttcctctggcagccctcctcaaggacccctgtgagataagtcagaggtgactttcctggggacccagagaacccacaaggcttttcccactgcttactgtattttgctcggctctctaaattgaatcaattgcagacagagtcttgccctgttgcccaggctggagtatagtagtgcagtggtgtgatcatagctcactgtaacttcgaccacctgggctcaaacaatccttcttcctctgcctcccaagtagctgggactacagaacagagcaggacccaggatgcaagaccctaggcatccccaaggccttccactgtccccaggccttccaaagagacagcggcaggaccgcacaatctacaactggaaacagcaggaagtgctagaaaatcactttaaggaggaacagtacccagactatgacacacgacaagagctggcggagatgctcaatctcagggagtaccaagtgcaggtgtggttcaagaatcgccgggccaaacgctctcgggagcggtggttccagaagcagctccagcagctccagaagcatcctcagcagcagcatcctcagcagcagcatccccagcagcagctccagcagcagcagccccagcagcagccccagcagcagcagccccagcagcagccacagcagcagcagccccagcagcagcagctccaccagcagccccagtagcagctctagcagcagcagcagcagccccagcagcagcaactccagtagcagctccagcagcagcagccccagcagtagctccagcagcagcagcagcagccccagtagcagctccagcagccccagtagcagctccag

SEQ ID NO: 195212 - DNA, 1020 bp, Homo sapiens
gcctccctgcctgtcgagtctgcacacgggtttcacgccctcccctgtgttctggccaggagactttgcgttcggttggaattgttacagagttcagctggaggtttccttctccctgtggccttttcccagttcctctggcagccctcctcaaggacccctgtgagataagtcagaggtgactttcctggggacccagagaacccacaaggcttttcccactgcttactgtattttgctcggctctctaaattgaatcaattgcaggtaagtcagggatttcttcttggtttggatccactgctggtgagcagacagagtcttgccctgttgcccaggctggagtatagtagtgcagtggtgtgatcatagctcactgtaacttcgaccacctgggctcaaacaatccttcttcctctgcctcccaagtagctgggactacagaacagagcaggacccaggatgcaagaccctaggcatccccaaggccttccactgtccccaggccttccaaagagacagcggcaggaccgcacaatctacaactggaaacagcaggaagtgctagaaaatcactttaaggaggaacagtacccagactatgacacacgacaagagctggcggagatgctcaatctcagggagtaccaagtgcaggtgtggttcaagaatcgccgggccaaacgctctcgggagcggtggttccagaagcagctccagcagctccagaagcatcctcagcagcagcatcctcagcagcagcatccccagcagcagctccagcagcagcagccccagcagcagccccagcagcagcagccccagcagcagccacagcagcagcagccccagcagcagcagctccaccagcagccccagtagcagctctagcagcagcagcagcagccccagcagcagcaactccagtagcagctccagcagcagcagccccagcagtagctccagcagcagcagcagcagccccagtagcagctccagcagccccagtagcagctccag

SEQ ID NO: 195213 - DNA, 513 bp, Homo sapiens
cactggttttactgaaaaattgagtgggctcagtttctgcagcgctttcttccactgcaagatgaacaccattctgccttgccaagaccagtactttgtaggaggccagagctataattgcccgtattccactacaacgtcagaatctagtgttgacgtttccacggagacttgggtctctttctgggctgctggtctcctggacaacagagagctccaacaagcaccacaggcacaggtatcaacaatataaccagagaaggacaagagtctaaactgtactagatgaagaaaagaaagtaaaagtagacctgaatcattcagtgactcaaattttcctcttccggacttgtgctcatgggaagaggctcagctttcctctcagctctacagaaataagcagctgcaagataccctggtgcagaaggaagaagaactcgccaggttacacgaagagaataatcacctcagacaatacctgaattctgctttggttaaatgtcttgaagaaaa

SEQ ID NO: 195214 - DNA, 255 bp, Homo sapiens
aatgaagcctgtcaaattgtgagccagagaacctccagtcatccaggatgcaaacctcagccatcctctacttctccaaaatcctcatctctcattccagtcagacactgcagtgttccaaatgaagctaaactacatgcagaactgacataggacctgataaagtggtaggacttgagaaaaatctagtgaaaggctggaataaaagatcagagcaatgaacaattgtaaaataaatttaaatatctttataat

SEQ ID NO: 195215 - DNA, 431 bp, Homo sapiens
cctcctgaagaatccctaggccagaggaagatatggacttgtaaacaggtaaattgtaggacaaagtgggttaaatgctgtccattctgacttcctctagcaccttttacatctcttatgatagttatcacactgtcttctggtcatatgcatatattggtcacttttccactccacacacactcaggtgtaagctccatgaggctgggccacttggctagctggtaaccccgccctggcccacagtcagtgggccataatctgcaaattatctgcaaaagaaggagcaagatcattgtttcattctctcttgtttatcatgctggtttcttcccctttatcctcctcttaaaatacccactgctttcctctgttgccttttaacacatattctgtattttctgtgctcaatccccccaccccacacttcc

SEQ ID NO: 195216 - DNA, 534 bp, Homo sapiens
ggttcaagtgattctcctgcctcagcctctcgagtagctgggactacaggcacgcaccaccacaccccggtaatttttgtattttttaatggagatggggtttcaccatattggccaggctggtctcaaactcctgacctcgtgatccacccgcttcaacctcccaaagtgctgggattgcaggtgtgagccaccttgcccagccctcaacttgccatttcttacagggatgccagtcatactggattggagtccactttgatgacctcattttaatttctttacctctttgaagatcttatctccaaatatagtcacattctgataaatgggatgaggacttgcagataggaattttgtaagaaacataattcaggcccataacatgtccctggaggggaaaagcaaaatgtaggtcatggttcctggtatcccccccccactgtgtttagaggaagttcaaaactcatgacacattactggtatgagacagtactataattttatttcccagtaaaaattttaaccctaaat

SEQ ID NO: 195217 - DNA, 189 bp, Homo sapiens
agcctttctactatgctaccagttggcatagaacatgatttcattgaatctccctcattaaggtatttaagtagtctaaagtcactagaacaactgatgttctgttcagacactttaacattaatatagattcgtggagatagaggactattctggaaactgaagagcctatatttccctctgatcata

SEQ ID NO: 195218 - DNA, 359 bp, Homo sapiens
gtgagcatccttcttcctcggctgctgggaggcgagaacagcctacttcagtcagggtcactctgggttgagcccaggtgccaggtgtgaagccccaccagcacccgccattctggagtgtgctgagaggagtgtggtgcccactcaggggtgctttcaactaacactgtcctgccttcagtgggacaaggccttatggagaacataccttttaagtctggaatccagatggtagggtttgggtggcaaaggtccagaggcatgaatctgcagtgtgaaagggtgggtggtatagcctcttgttggggaggcatgaacagacatcaccccaactctcctttacacagtgtccctggggg

SEQ ID NO: 195219 - DNA, 195 bp, Homo sapiens
taaccaggttgagaaactgagtcctagagtctcttagtgaccggctgccacatcccacttaccatgcctttgtttgtatggtaatttagtttccagtgaccaaagatgcacaaaccgaatacattttcataatgtggcgatctaaggtgtcactggaattttctgtcattctgtcaattcatcatcattggcatg

SEQ ID NO: 195220 - DNA, 414 bp, Homo sapiens
taagaaagattcttctgccttgggatgctgttgatctatgaccttgcccccagccctatgctctctgaaacatgtgctgtgtccactcagggttaaatggattaagggcggtgcaagatgtgctttgttaaacagatgcttgaaggcagcatgctcgttaagagtcatcaccactccctaatctcaagtatccagggacacaaacactgcggaaggccgcagggtcctctgcctaggaaaaccagagacctttgttcacttgtttatctgctgaccttccctccactattgtcctatgaccctgccaaatccccctctgccagaaacacccaagaatgatcaactaaaaaaaaaaaactcagcccaaaatttgaccaggtttcatcacataaattaaataaaagaaagaaaaca

SEQ ID NO: 195221 - DNA, 523 bp, Homo sapiens
aactacaaatttttaaacttttattttctccctatacagaagagatcatttttccgacttcactgcctgacttcctgaggctgcccagagtttgttgcaggctctgggctcagggtatgttcaattttcctgcttggaactgagagaagaactcaggtcttcttacagactgccaaagtccggcagggctcttttagaacagtcatttcacagctagagaaacggagacccaggccgggcgcagtggctcatgcctgtaatcccagcactttgggaggctgaggtgggtgaatcacgaggtcaggagatcgagaccatcttggctaatgcggtgaaaccccgtctctactaaaaatacaaaaaataagccgggcgtggtggtgggcgcctgtagtcccagctactcgggaggctgaggcagtagaatggcgtgaactcagaaggtggggcttgcagtgagccgagatcacgccactgccctccagcctgggcgacagagtgagactctgcctcaaaaaaaaaa

SEQ ID NO: 195222 - DNA, 325 bp, Homo sapiens
gggagattatgttggaagaataattctcttaggccacacataaatatactaacactaacggtagctgatgagctaaaaaaaaaaaaaattgcaaaaaagtctcataatgttttaggaaagtttatgaatttgtgttgggccacattcaaagctgtcctgggccacaggcagcccacaagccatgggttggacaagcttgatttaaatcatctttagattacttataatacctagtaacaatgtaaatgctatgtaaatatttcttatactgttttatttagggaataatcataagaaaaaaatatgtttggtacaaatgcaattt

SEQ ID NO: 195223 - DNA, 371 bp, Homo sapiens
atatccggcccggccggaagttttaaaagtaaaacatttctaaattaattatgtaatagtgttaaggaatgaatacttggtagtcgtaaacattttggtaaaaaataaaaactttacaatatgtactaatcctgatatatgcattaggcagtcatgttattgcataatgcaacagttctaatagtactgaatgtgcttatatgttacatgaacaaacaagcactagcctaaaatttcaaaatatcaacataaagctacagtcttactaatcaataacatttttatcctttctaactctgaggaggaaaaaaaggaaagaaaaaattttaattaaaaaataaaatggcattttaaaagtttcatttctatac

SEQ ID NO: 195224 - DNA, 211 bp, Homo sapiens
tcccccgtccttctcaagttaaacaagagccatgaaagcaatagctctggcgcttaaagagaggcttggtgcagggatctcaaaagccaaacattggagggctcccctgacccccactggtatcggggtagggatttgcctgacccttttactaccccatttcttcttgtgtgcactggggaatcctgtttttccatactctttcttgtct

SEQ ID NO: 195225 - DNA, 444 bp, Homo sapiens
tagatctgagtcaccatctattgcaggcataacagaggctgcagcttgagtctaaccatgttaaatgcctgcttacaaaggaaaatattcaacatactttggatcaagataacagaaaccagaatcttacaacacagcattcaaaatgttgaacatataatctaaaattaatcctctaaaaaaaggctaagaaaatctgattcattctcaaagaaaaagacaatcaacagatgctatatagtgttctgtgtgtgtgtgtgtgtgtgtgtgtatacacacatatatataggtatatattctttcctctagcaatatagtgtacacacacacagagagagagagagagcgtgagtgcgagagcactagaaagaattactggtggcaagttgaggaatggcgttgcaagggtccattcccaggaagcataagatagaaaagaaaagt

SEQ ID NO: 195226 - DNA, 347 bp, Homo sapiens
ctcttgtatatacatcattgcatctcagcacagagacccatcatgtagggttacttatgggttattctagcccctgtgagaagaaactataggcagcaaagccatactgccctctgaccctctctcccctttccaattcttacacacagctgccttagttgcatagtgttatagtaaagtctgtatttattacattaagcctcttggtcaatgtttccttttgtgttttctataatacctgaagtgagtacatggtgtatagttagggctcaaatgtttgagttgataggaatgccaactttagtagataatgtatatgttagtaacatgttaatgtattattatat

SEQ ID NO: 195227 - DNA, 568 bp, Homo sapiens
  misc_feature (20)..(20): n is a, c, g, or t
ctctagagtatccccacctnctaccccacggtagtttagttttggacattttaggtttgagatgtctagtagaagtgaaagaatcatactggtggttggatattcaagtctggagctcaggagaaagttttgagctggagatacgccttcttaggtggagatatacacgtaatattgagaaccatgggcagtgaaagagaccacttagggagtgaatggagacagaaagtcaaagactgcgccctgggggtaatccaacagtaagaagcagtgaaaagaagaactagtaaaggaggccctgaggccagggaagagccaagaggatgtgtgctcacctaagagaatgtattaaggaaggtgtggcccactgttgtaaatattcttgagaggcaagtgcaatgagtgagaattgatcactgaatgtagcaacatgaaggtcattaatgatttttggggagcagttttggagttgccatgggggagaaagtttggaagagaatagtgatggggtggaaaggaaaaagctattcactaaagtgaggaacagcgggggaaagcagataggggc

SEQ ID NO: 195228 - DNA, 156 bp, Homo sapiens
catttgttttgtggggcgctgggcgctgctgattcatttctggcttctcgcagagcttgctggtggttcctatgcactcccctctgcggttcctcaggagcctctctggctgggatctgggactcctggggcctgagctgctgtctcatatgtcct

SEQ ID NO: 195229 - DNA, 515 bp, Homo sapiens
actgcctattctgatcttcaaagtctgtcttcttctattttcatcatcactactgttatttaagctattattaactttagatcaggttagtataaaagcctcctttctcctagattcctcctactacaatagctgtgtttctgaacctctttgtccactgtgtactctgggagcttttatatatacagatgtctgtgttccacaaagttccaaagattatactgatgtggaaccaaggctaagaaccgctatgttagtgggtttattttccattaaacaatcaaggaatctgcaacaatgcttttggtttctagtgtatcttttcaactgcaaaaagcccctaaaacgataccttgtcacaaagaacactaataataacaaaatcaaatagctaaacactaatgtacattgtatacctacatgcccttcattgaactgactatataaatggtccctttatcttttactattactgattactgaactcttttcattatttttcttctgttgggaat

SEQ ID NO: 195230 - DNA, 315 bp, Homo sapiens
gggtactatggtttgcctttaggcagcatgtgaaggtgtgaagatctcttttaggagatcttgtcagagtacctcaatggccaatcagaaaacaggtattaagggtgaagaagccactttttggaaagttagatcatgcagagaaacttaatttacactttaatagccgtttctcactattgggatcattaaaagttagactgtttccttaaatactatttaacttcactacacactgttgtgaccacgggctatttaagacattcagggtactaacctatagatctgttctcacctaatttgctcgagcatcaa

SEQ ID NO: 195231 - DNA, 286 bp, Homo sapiens
tgcccaacacctcaggaagcagcatttgaatcgaggctgggtcccagacctggactaagactgcagcaaaagtcaggaagtggggacgtgtggggataaatacgatgttatctcccaacacagtagctgacttcccagggtgcgtaacccaggagcaggagaagagagcgcacccaagatggaagccaccatgtttttaacaacttggccttggaggtgacacatgattgcttctgctatattctgtagtcacagtcaaccttggttcagtgttgagggaaacaca

SEQ ID NO: 195232 - DNA, 104 bp, Homo sapiens
tgagaagagggccaccgtccttccgaccccagaatgatagctccactgacagcttgtactgtacacctggaaaagctgcagacattcaatgccagcctgtgaaa

SEQ ID NO: 195233 - DNA, 194 bp, Homo sapiens
cggtaccattctgggcgggtcagacatgtgaatgaagaagctcgtgagatgactgcagttccagctaccatcggactgcaacatcacgggacaccccgcatgcccccccgcatggtgggtcatcctggcatggattctgcataatggtgatcacacgttccacctcatcctcagtgagttctcccgccctcttg

SEQ ID NO: 195234 - DNA, 316 bp, Homo sapiens
agaaggatggagaagtggaggggacagaagggaagaaaaggcactgatagggtctggctgcatttctacccaaatctcatcttgaattgaagctcccatcattctcacatgttgtgggagggaccatccctgggggagatcattggatcataggggtggtttccccatactgttctcatgatagtgaacaagtctcacaagatctgatggttgtataaggggtttccctttcatgtggctcccattctctcttgtctgctgccctgtaagacgtgcctttcaccttccaccgtgattgtgaggcctctccagccac

SEQ ID NO: 195235 - DNA, 635 bp, Homo sapiens
aaaaacagcaactaggattgatacaagaaaatatgaagatctctttttttcctgcatacagttggttggggatagttatattctgcaaataagaactgagtaaagacttctgcaaaacttttagaaaatctttcttcacttataggaaggagacagtggtcaagatggccacttctgtctaaaaatgtattgatacgtgaaagtgtcgcagctgttgtgcctgaggatagacccctactgaacagggcagagttaagagaaccacagaacagtggactcagagccctaaagtccagcacttggatcctgcactgctatgtacctcttagttatgttaaatgacatattttcataagatttaaagcacattaagcctggactttctgtagcccaaagcatcctagttgttactctcctctcacctccctagttttcgttagtcttataaataacatcttcatcatctacatgatcattcgagtcccgaatctaaaagttgtccttgaaatctccttccttgcctattcctcagatacctcccctgcaccccatccatcttaggtctagctccgtcttccaaatattctttaatgtatcctcttctctatatttctgcaaacacactgtagtccagg

SEQ ID NO: 195236 - DNA, 490 bp, Homo sapiens
tgcggggattacaggtgtgaaacagtgcacctggccataacatgtatttttgcaaggtcactcaccctggcttctgtgaaagaagcctgagaagggtctgtttggggagaccagttagcctttcataataatctagttaagctgtgatgaacactgacctgaagtagtagttagtgagaatggaattgagttttaagagagattcaggatgtagaattgtgggagtacaggcctaggatgtcttgaatgatcataaggtgtctgatttgatatgttatcatagtttgtggtgccatttacttagcagaaataaaaaatgtttcataacattctgagtttgagacacttacagaacatttcaagtagagatgtcccacagtcatttgaatataaggatctggaacttatattagcagttggagattcaggtttggtaaacttcagcagttgaaatcatagttgtggatgaggtcaccaaatgagtaaggac

SEQ ID NO: 195237 - DNA, 305 bp, Homo sapiens
ttaaacttttcttccttccactctaatccaaaagtaccttctaagaaatccaaagtgtattaatctctgctttctatacgtaacagtatcttattatttaaactatagcatttatcacagctctattagattgtaaatgtattatattaagagtggggactggccttggtcatttaactatggttctcagctaggtgagattttgcccttccttggggcatttgacaatgccaagagacattgctggttgtcacaaccaagaggatgctcttggcaactagagggtagaggccagaaaagctact

SEQ ID NO: 195238 - DNA, 496 bp, Homo sapiens
tttgtgacatgtacaattgctgatgacattcacatctgggagcaactttaacttccttaaatttccataaacaaaaatactaaaggtttgcatttaggggaaaaaatgcccatcacaaggaaaaactcatctatctcacatagggtgtaccttctatacaatgaccaacactgaaaagtcatctctacctcacacactaaagtaatgattctcaaaagcaggacaatttcaccccgccggacatatttggcaatgtctggagacatttatatttgtcatgactgggggtgctattggcacctggagcatagaggccaacaatactgctaaacatcttaaaacgagggccaggtgggccggctcacacctgtaatcccaacactttgggaggccgaggagggggtcaggagattgcgaccatcctggctaacacggtgaaaccccgtctctactaaaaatacaaaaaattagccaggcgtggtggtgggcacctgta

SEQ ID NO: 195239 - DNA, 474 bp, Homo sapiens
atatatgggttctggaatcataaactgagcttgtatcccacatgtcacttactagctctgtaactgaccatgaccaagttacttctctgagcctttgtttcttcatctgtcatgtgaggataacaatagtgcccatcttgtagggtggttgtgagacttaaatgagatgatggagctgggcatggtgcttcacgcctataatcccagcactttgggaggccgaggcaggagattgcttgagctcaggagttcaagaccggcctgaccatcatggcgaaaccccgtctctactaagaatacaaaaatcagccagacgtggtggcatacgcctgtaatcccagctactcaggaggctgaggcaggagaatcgcttgaacctgggaggcggaggttgcagtgagctgagattgtgccagcctgggtgacagcgagattctggtttgttttctttttttttaaaaaaaaaaaaaaaga

SEQ ID NO: 195240 - DNA, 283 bp, Homo sapiens
actctgaaacaagagaaaggaaaatattagcctacgacaagggaaatcgattgttgcatctgagtgtgacctttgggtttttgctctctacaggtttaagagtccagtatccaaatgcacacttaaacatgcctgattcatactaacactcttacatgggcagatttgactacatatatactgtttaatctcttttaactatggtatgtgactttatgtttttctcctttcatcctacgtacggttattgaaatcaagcctacatggtttagtcgaggcccct

SEQ ID NO: 195241 - DNA, 801 bp, Homo sapiens
cattacttattactgacagtatcttcaatgcaatcatcctaagacaggtcccatagaaacccaccaagcaaccaactgaggatggaaaatgttcagaaaatcatctgctttagtactgaacatgaacaaacttttttccttgacattattccctaaacaatacaacaactatttacatggcatttacattgtatgaggtattataagtaatctagagatgatttaaagtatacaggaggatgtacttagatgatatgcaaatactgcatcactgtatatcagagacttgagcatctgcacattttggaatcctggtgggaggggtggcctagaaccaattcccctcagatactgaaggatgactgtataataaaacacaaaactaccgacctaagactagctgtgtaggcctatctcacagcctgagatggggactttcagagactgtttctcttctctcagagaccataacaaactatgtaaaataaaggtttacaaatactgtactagtaattagtgaaagcaggaattcgccttgttgcttccctgtcacctcaaaatagaactcaaatttcctgaatctcttttctgcttagttgaaaagtgagggcatggccttcaagtttttagtgatccccctatcaaaagtaaaaagggttagggtgtgaaacatagattagcaaccttaaaatacttgcacatcttgtcaaaatatcacaaaactaactttggaaacaaggcacattcagaaacagaggtgcatttaaacattacattagagaataaagttactcaaatttt

SEQ ID NO: 195242 - DNA, 423 bp, Homo sapiens
ctgatggcctgccaagagatctcagtcacttcaccgcctcagtctcctcactgtaaagggggtgctgatactgcctgccttatggcatcatcatgagactgaaatgagtgaatgcttgggaagtggtagggcctggctcctgtgagtgctggagggcatcggctgctgttactggtggtgttatcgttgccctgtgttaacagctcccatgatcaggcctccccctggacctcaccctgcagtcacagactgactcagggtctcacatctgcctcaaagcctttgcatgtcctgtttcctcccctggaaaactcctattcatcatttaaggcccaggccaaatgtcccatcctctatgcagtgccctggctaggttaagagcctcctctctacctattcacaccatgtgcttccctttcatag

SEQ ID NO: 195243 - DNA, 595 bp, Homo sapiens
gtgacctctagaggattccgatagtcctcaacggtccgcctggtcctctggccccaggaccctgcttgtatcaaaatgcccacggtatttacattctgtgctacaaagaagaggtcgttatatcatacctttttgtagttactgttacaggtgtcacctgtgtctgtcctctaagagacagcagcagccagaagggccaggcattgagattctggccacccacattcgagtctcagccctgcttccacttagctatacaaccctgggcatggaatttcacctcatctttaagtgaaggggttgaaaaacatgatttccaagtccctccccggctctgacattctctgatagaagcctccaagatccatcagcctctccatggtggctggcaggccccagcgtgcaacatcccaaggttaccgacacggcggatgaacaggtcctggtcaataagcaatggattattcctatcgaacttcggctttgtgccctctgtgcctcagttctttcataggcagccttttaggcttaactttaaaaaattatgattattaatcttcattttcctctggcgcagagcaaggtgactgatgcc

SEQ ID NO: 195244 - DNA, 241 bp, Homo sapiens
cagcaaagcaactggcacatgtatacctatgtaacaaacctgcactttatgcacatgtaccctagaacttaaagtatagtaattaaaaaaaagaaaaagaaaaaggtgtttaaaagatgtataggccgtatattttgtaccagtgtaatcattcactgtgttgtttaagcaaataagctagtttaagcttataatgagtttttaatttatagagaaacgaatcagtagggcaaagaaaggt

SEQ ID NO: 195245 - DNA, 101 bp, Homo sapiens
taaacactagacatgtaaggtcagcaggctctctgtctacacacagaatgctagtctagctgtgtagaagataagctccgtaatgtttgcacatctttccc

SEQ ID NO: 195246 - DNA, 566 bp, Homo sapiens
aggagttcgaaacgagcctggccaacatggggaaaccccgtctctagtaaaaatacaaaaattagtcaggtgtggtggtacaagcctgtaggcccagctacttggaagactgaggcaggagaatcactttaagcgggaggcagaggttgcagtgagccaatctcaaaaaagaaagaaaaaaaaaaagaaaaacatatgatgctggagcatctcggcctcaatacctgcatgagcacagtcatgtccaggccagggctgctggtcgaggtccggccccatctcttccagcagaaagggagtaagcttgcagggaggctgggggacaagatcccaggatctcagcctccgctcatggatcagctctgagaccccgagtgagctgggggtgctctgtgtgcactggtttccccagctgtcaagtaaagggattggatgaggaagtcttgtcaaggtggaatgatctcagatttggggcagcagtgaatgatcccgctccctgggccatgccagtggcccggcctcggctgaacacagccccaacactctggaatggggatgagggggca

SEQ ID NO: 195247 - DNA, 413 bp, Homo sapiens
  misc_feature (3)..(3): n is a, c, g, or t
ggnccgctctagagtatcccctcgtcttttgataggaaaggagagagagagagagagagagagtctggtgtctcttaatataaggtcattaatcctaacatgaagagcttcaatgttatgatctcatttaaactttatcacctcctcatgggccccatctccaaatgcagtcacaatgggggttaaggttgaatcataccaatttgaggggtaggggttgatacaatgcaatccatagcatgaggcaactgctgcatccacaagtcaggctgcaagactaatctttcctgttgaaatttcctcttaggccccacaaactaatgggtcttgtatcatcaattaggtcatagttttccaaactgtcagttatcatatgcctgttgacctatcaaaagacgagggtaccgagctcg

SEQ ID NO: 195248 - DNA, 115 bp, Homo sapiens
gaagaggggtggtgtcacctgtggatgctgaggaaaggctggtgacaggaagaggggtgacgtgacctgtggatgctgaggaagtgtcagtgacaggaagaggggtggcgtgacc

SEQ ID NO: 195249 - DNA, 324 bp, Homo sapiens
atttttcaggcaggacgacagcagccttttgtttttaaatgcttttggggggcgggcaacaggaagcttagagccaaacagagcagcctttaatctaggaccaattttcctccatattgagatagtgtccttttaagtcctctacttgttgcttcctgtattatgaagttttgccagtggctggtaggactacaaatgattactgtccttgggtgagttccagggattgtttgtgtctgctccttttgagtggttcttttcctggcctcaagtagtgtttgcaaacatatgcaccaatctcttcaactaagactcaaggaggtc

SEQ ID NO: 195250 - DNA, 573 bp, Homo sapiens
agccaaacacagaggtcctgacagcagtggcaatctcactccattgtgcaacaggcgcctttctctccacaacaacgcaaatctcaatcactctggacaaatgcagatggtgaaagtgacaagctgagctgttaacagctttccagggtctttgcatgggacagcaacccattttcacttccctttatataggcacccacttcccttttatttcttaattctgtgctttctgctctgcttcttacaagagatgatgaacacaaagtccttatttcacgagggaaggatgtgaactcttgtgtgccacaagacccctttccaggatgcgggctggtggaagaacagctgcgagcagatgtcatctctagaccttggtctgctgtgctgcttaggcagacctgagttccagtgcacccctctgccccttttccaagctaatctttgggttaaaaaaaacagaaaagggtgctcctcatatcctctctctccaaacctgcagagcacttatgagaaagcacgctccaccccggctctgtagaacgttgttatgtgccaaaaagagtgtgcggccag

SEQ ID NO: 195251 - DNA, 536 bp, Homo sapiens
aaaattttaaaaacatatacaaatctactttcattcacgaatctgaggtttttcctctgtagcccgtatattctttttgttgattgcaatgactacttctatagtcattccaatagaactgaaatctaaaaagtctgaaaattaacattatttcattagaatgcagaaaaatagaaatttaactaacttgtatgaattatctcttcacaaagcagtcatatcctattctcctgtgaagcgcagtatgccctaggtttcctgttcattcagaaaactggaattacctatcatctctcatttctttgttactttttatttggtagtattacttacattgattgactcagcaatctctcttacacagttcttcaaaaaagatgatttatcaatgaataagatgttttagaaatattaactttttgatgtcagtcaactatatgtccaacccttttacatttcagtatgctatgacagtgtattgggtgtgttttgcgtgtgtataagctttaggaagataagcttaaaaaacttttatt

SEQ ID NO: 195252 - DNA, 1338 bp, Homo sapiens
aatggaatcctagtaactttcagagatgatctggtattaatgattgtcagtcatctttcaaaaagagaactattaatataagtgattaattattgcaattactttttattgagccctactgatgggctgtgttaagtactaacaggcatcatctcacctgatcctcactctatgaaataggtattactgtcatattatccttttccaacagatactcaggcaggtgaagtgacttgcctgcaatcacacagctgggaagcggccaagtccagtctggagtgtgtgattccaaaaccagaatgttctttaacacgccatcacaaatgttccatttggtcaacagtggatagttcataaaatattttcttctattgtgtctcacaattacccccaacataagccaatgcatagcattaccagatgagtgaaactaccatgaccaaaaatttcggttcacattacacccattccgagaaaggcacaccacacatgaccaggacgacaggattgacagtgatcctcgctaggtgagctaaggtattttggttttcaagttgtttccttgttttaaaagcactacacccagaaaagcaaactactgctgagtaatttaatgtgaactatgcaggcttatcaagtggagtcgctcaggcctcaatacttctcttgggtattcaggtatgaaggtcacttttactcaaaaaaaaaaaaaaaaaaaaaaaatcctgccagatgaatttacctttctctttaaaaaataatcttcaggttctgaggtagaggaaacaggtgaggttgtccctaacagcctccaagtgaacagaatgaacttgattctttccacaagcttccctccactaaaggcagtttatttctattaatgttccaccaacaaagctacagtactcagttcttactgcaacagaatagtcacatatacccaaataacttgtaggcagtgttacacattagaaaaatatacctatcattttattattaaaccagaaaaaccctgctgacaatcaacaaaaggtctcccagcaactgaaaagcagagaaactaagcaaagattttttctttggagacatgaaactcattcagctaagaaggatggattttatcacttattattctccaaaatggaaggtgccacatggagaccataaacgagggtacactgcatcttggagcaacgttattatgtgtcaagttacaaagcccatgaatacaaggggtgtattaatggaaagactgataccatcttactacagtggcctctctgtagctccggacaatgatctgttgagggttttccagggattttgaatgtgcaacct

SEQ ID NO: 195253 - DNA, 864 bp, Homo sapiens
aggaggtggggtacctggcagcctggcacagggcaggctctacagttcctatgtacctgggtccctgaactttgcatgccccaaacacagagccaggtgatccatcggcagcagggacgacaaagttagacaaaagaccaaaaggagctgctctgaccacaagccttttccattaggaatttgtaactccccatctccagaaaggcaaacaccgagatcctacaggctggcccaagccaggggtaactagaatagtgttgttctgagaagccaaactagtcaaggactagcaagacccatggcttggataaaaagaagattcccccaaatctggttcatttatttgctagttccctctgccttcctcatatgctgctgaaagatggggagggcatgcacacactcctgtagcacctaggtttgtcacacatctctatagaggacatcaaaacccaactgtgtgtggcatcggcgcacagctgaaaaccactcggcaataaaaaggaatgagctactgacagatgtgacatggatcaatcacaaaaacatcatgctgagcaaagcagccagatgcaaaatagcacccactgtgtgtgtctatgtggatgaaattcgaaaccaagcaaaaccaatctacagtgacagattaatgtttgccagggccagggggcagggtgggggactgacttcaaagggacacaaggaaattttggagcaatggaaatattctgtcttgactgagtcatacaggtgtttccacttgtcaaagctcctaaaaggatgcattcaattgtatgtaaactaatacctcaataaagaggaagaaggcgggagaaggaggggaaaagaaggtgagaaaacagg

SEQ ID NO: 195254 - DNA, 213 bp, Homo sapiens
aaggctgcacgaggacatgcgaaacacctaccgcagtgcccaacacagagtgggcactccatgaaaattagtttcctcttttccataagcaagtgtctggaactactaagaatataagaagtaccctcaagtaaccacagtcactagaatcttcccagctccttttgttccactgggaaagctgacacctgtgtgtgtgtgtgtgtgtgtgtg

SEQ ID NO: 195255 - DNA, 290 bp, Homo sapiens
cacatgagtgataccccatcatcagtaacatttttcattccctgcagccattcccaactaggagaagtggagggtcacagtgatatgaggccactttctccctagcttttattttgtgtagtaaatgatgcaaaaagaaagaacaaaggcatagaaataggaaagaatacagagtgttaatagaaccacattgtgtcgggaagagattcacatttatatcactttatcctgtttttgaccaatataattaagttatattctgcttgtagttaaaattatgtgaacagatg

SEQ ID NO: 195256 - DNA, 311 bp, Homo sapiens
actatggaaactgggggaatgggggcataaatggtcttggcttggccagcactctgcttccccactcccacccatcttgtgtcctggaggaccaaggtaaggcattagagtggctgccgtctcttcctgtgatgcacacttcttccccataaaggatctctggcgaggacacatccaggcaggtgggcagaggagttgtcctggctgcctctatttcccagtagagttgtcttctcagcctcctgatctccacagccagagacagagataatgagaactttaacagtcagaatacacatcagcactgggag

SEQ ID NO: 195257 - DNA, 276 bp, Homo sapiens
ccttggcctcccaaagtgctaggattacaggggtgagccacggcacccaaactattcaacaaattttcatcaagtgcttaccatgggtcacatgctattctgggtgcttgtaattcatcagtgaacaaaacaggatccttccagtggatcttacattttagacaaaacagtaagtgagaaatgaaataagtacctcttgtaaattcctagatagtgtcacgtgctgtggataaagggaaaagtagagcaggataaagggcagtgttgggagagtat

SEQ ID NO: 195258 - DNA, 373 bp, Homo sapiens
tccacccatatccacatctggcacagacctaacaacagccattgcataattaggggtttctactcccctctctcccgcaacctgtcttctctctttgctggacagaaagatcccatctcgttacggtgtggcagctctgaatatgctttacccatttcagtctacacatacgttcagggaattaaaggaagacacggcctctttcaaaacgctttaaagaactgtttaaatttatctcccagtctaaatctgcctatttctctaactggtaccataattttcaccaccataactgaaactccagaagggttatgggttgtgctgttttgttcattgacgtatcccagtacctagaccagtgcctagatgcagt

SEQ ID NO: 195259 - DNA, 246 bp, Homo sapiens
tgttcacaatgtcagaccctgaaccactgcaggttttgaaattgaatatcccaacacaaaaactaatgctcatcagcatcctggttgggatgtgaatagttacggattttaaagagtgctgcacttctgaagtattttttcaagactttctgtcttccttttgttttttgttcttcccaataagaccacttctgcttttaaaaaatgttagttggccaggcgtgatggctcacttctgtaatccca

SEQ ID NO: 195260 - DNA, 665 bp, Homo sapiens
attgttttattttaatatcacgacacacatattattcctgatttgtaatctcacgatacccgccttgctcgccaagagtcctgagtgctggcctggtaaagatgattatctccatctttcagacgaggaaaccaaagttcagagcacaggtccgcagaacagtcacagctgccagcagatgcacacccacatgcgccatcccatttgatcatcaccaacctgccggttaggttttcttgtcacccgaattttacaaaagtggaacagaagcaccgagagaataaatgagctgcctgagattcatcaactgctggtggaactgggcttagtcctgcattctttccaaagcccccatgcggtgactcagtatttggccatttttctttatcctttttgcctggtgactctgaagagagcccacctacagtccagcatgtctggatcctgtgcagcgggcagaggccagaggccatggtgggggccccagaactcaggctgggaatcccaggggctactccagctttcatgtcaccagagcagtgacattcgggccctcgggggcagactgtgcctgtggcttctcagtggggtgccttagggtcccctcagcagatggatcccatctcctggtctggttagcataagataaacagggatagtagcag

SEQ ID NO: 195261 - DNA, 354 bp, Homo sapiens
caggctgaacaccttactgaactctttaaataacaggggctctatgacactcacttcaacgttctgcttttcctttaaatgtcagctatcctgtaaatatgcatcctatgagagtagcccaaaacccacacactgtgttggaagctaggtaggaagctgaagcacattgtctacctttggaaccccacaggcctcattatgcttttaagctacatgtttctatgaattatgattttgccaactgaatcctctggcaaaaaagcctccacccacaggcacccactggagatttggacttgatgccccaatgacatggctattaagtgcatcctttttgaaaaggagctattagct

SEQ ID NO: 195262 - DNA, 249 bp, Homo sapiens
tccttcagttcatcaaagggaacagaatccaaatgtttgtcatattattaatctgggccaaagagcataccatagatctatttttgactgctacctgtccctcaggtaacacaaatttggtttcaatgaaaatctcagtttttcttcccaagtctctttataaattataatttcagtctaaagaaataaataatgacttagttgctttccatctttatacaacatctaaaatcactatgaatacaaatg

SEQ ID NO: 195263 - DNA, 402 bp, Homo sapiens
tgaagaatgaatttcatcctcccagctgtgcagcttctcttctaaatgtaagttgccttgctcaacatctgcttcccatacgggcagttttaggccttggacttcttgatgaaggtataaaacgaggactttcagcggaggtgcctcccatttatggctggaggagtctctggggtggggccgtcctgcacacttcagggtgttggggagtgtccctgggctccacccaccagcggccaggagcagcaacctcagttatgaaaagcagaaatgtctccatacataaccaagtgttccttcagggagggagggcaaagttttctccactagtgaaccactgtgatagacagacgacggacagagagagatgatagatacgataggtaggtatatgttgagatg

SEQ ID NO: 195264 - DNA, 666 bp, Homo sapiens
aaaaaaaaaaaaaaaacagttatttttctctatacccacaccacaaataattggaaatgtagctcaaaagagcatttataatagcaccaaaatctctcactatccacagataaatctggcaaaagttgcataagacttgtatacaaaagactgaaactttattggaaaacattaaagaagatctaaatcacagagattcattatccaaagacaggaagggttagtatcataaaagctgtcaaggaccgggcatagtggctcatgcctgtaatcccagtgctaggagaccgaggcaagaggattgcttgaagccaggagtttgagaccaacctggacaacatagaccacaactctacaagaaaattaaaaattagccaggcgtgggccgggcgcggtggttcatgcctgtaatcccagcactttgggaggccgaggcaggtggatcacgaggccaggagctcgaaaccatcctggctaacacggtgaaaccccgtctctactaaaaatacaaaaaattagccaggcgtggtggcgggcacctgtagtcccagctactcgggaggctgaggcaggagaatggcgtgaacctgggaggcagagcttgcagtgagccgagattgcaccactgcactccagcctgggcaacagagcaagactccgtctcaa

SEQ ID NO: 195265 - DNA, 264 bp, Homo sapiens
aaaaaaaaaaaaaaaacagttatttttctctatacccacaccacaaataattggaaatgtagctcaaaagagcatttataatagcaccgtgcctgccctttgcccaactttttaatgggtttttttgttttttccttgtaaatttgtttaagttccttgtagtttctggatctacaagaatctacaagatctggacctgacctttgtcagatgggtaggttgcaaaaattttctcccgttctgtaagtgcccgccaatcgaagg

SEQ ID NO: 195266 - DNA, 448 bp, Homo sapiens
ctagaaatgggtgtatacatgccattttggtccttctgtgactccttagctatgtgacagttggctaagaagaggggagaccttggagaaagaaactgctgggatacagaaagcagaagagatcatcagggactgaaaacttcctggaaagctactggagttcagatccagccaaatggggaaatgttggcaaacaactgagaaactcagttgggactctaaaaattctcttaggagagatgcagtatcccaggagtgaggcatatgttctaagaggaaaataaaatataattaccataacacagcttaaaactagatcttgagagcagcaagatgatctgcaagtaattacaaattctgcccagaaaaaaaattcaaaattcttgagtagttctatatcatattatccataaattcagcatactttaaaaaaaataccaaatataca

SEQ ID NO: 195267 - DNA, 570 bp, Homo sapiens
cttattcactcttcctacaaatcttaattattaagtgcctgttctacaagggattgtgatattacttgtgtaggacacgtgccttttaagagcttagtcttattaaaatgtatggtattatctcagtaatggctgacagtacttggaatgtgcttcccctggtccagcacacactggaaacattgctaatggaccatgatgatctctcctgcttcctagacacggcctcacttctcttcccaacatgacgttctaagtcagcactggccaatagaaatttctgtgatgatggaaatgttcagtgtccgggcattgagcacttggaatatggctagtgtgactgaaggaatgaatttctaactttaacttaagtagcaacatgtggcaaatggttaacatattggacagtgcagttctaggcagccactactaattgatcagagttggttcctaggataaaacccacttttcttcccagaggactaatcagatgtcacagctagctacagcgttgcattgaggtacctcatctgccttaagtcagtgtctctctctctctctgtctctctt

SEQ ID NO: 195268 - DNA, 400 bp, Homo sapiens
agatttcacagcatcagttcgaatgtttaaatttggctgatttaaactcaaggaggagcacaattattctagtcgatgtttttgataacttgagtatgtgttagggacaagaagagattatatgtgagcttgagcttatctatttatattctgggattccagaaaactacactcagggtatcatttttaaatgatggtaatattataggtaagaccattcactctgatctctgatcttttcaatgacagtgaacattttatatttaaaattaatgttcctttgtgccaacaaaatttgtttttgttctcactgtagaaaaggatccaaagcttgtctcacaaaattgaagagttctgttttagtgaaattacattcttacccaagctcttctcattgtgt

SEQ ID NO: 195269 - DNA, 647 bp, Homo sapiens
catttgcagtctatctttgtatgtgactttaggtaaatatccaattttgtttttatctatggcatgagccaggtttgcaactccttctattaatctgcccttttcccattgatatatggtacccactttactatatattaagttcccatataaacatacttaatttctaagctccttatcatgtttcactgatctttttgtcattgcaataatatcacattgttattattacttgactgtgtagtatgtcttaatacttggaagggcaagtacccattctttgcctttttcttgaaatgttgacttacctgttcgtggatctttattcttccataaaaacttgaggttattgaacttctcaagaaattcaacacaaatattttgaagtatttgtgattgtgttgaatgtatagattaatatgaactgacatgtttataatattaagtcatctcccccaagatatggaatgtcactccatttattcagataatcttctatgtcatttattagatttaaaaattttctccatggaagtattatatgttgtcattattttctagttatttaacattttttgttgctgttctgaatgatatcttatttttaaatacattttgtaattggttattgttggagagaaaagtgc

SEQ ID NO: 195270 - DNA, 364 bp, Homo sapiens
agggaattatgtgaaagcttctcttttgtccagacacagtgaactgtcaagatcatcagctgagttgagagggcaggaaagaagggggtttgaggataggacattatgaaaaaatagtagttttggagaaattgccttaaggatatttgtggaatcaaatgtatgggaagtttttaagtgctttaaattaacctgttttaccatgctttgaagttcttaggtttagtccagcaacgtggctcataccacggccggtaatatcagcccttggttgctgaggcaggtggatcacctgaggtcaggagttcgagaccagtccttcaacatggtgaaatgccgtctctattaaaaatagaaaaattag

SEQ ID NO: 195271 - DNA, 567 bp, Homo sapiens
ctgtatgactccatacttaagcatctgtcaactccctaaagtaaatccctacctattgaggcctctaaggtggtagctctcctcactggagtggttctggtgggttacctattggcaggaagacatagtcctctatcctccatcctaaggttaaattcttgatttaattagctgcagatacaaaattctattggaagagagatgactgtccacacaggataaaaacagataaagcatctgagtaaggctttgcttagcccacagattctctaattgcagctgctggcagtactatccacacaaagtatttgctggacttaaagctcaattattatgatactacaaacttttatttatattcagggattatgcctacattcagaatttgaaagaatttacacaaacagtatgtattaagacagtggtctccaaagtggaatgcataagactttccagtgaagcacaaaaagaaaaattaaaactcttattttataattgtttttaatcttaaaatataagaattatgctttaccaatgttaactgtactgactaacaatggtgccctc

SEQ ID NO: 195272 - DNA, 392 bp, Homo sapiens
cgcctgcctcagcgtcccaagtagcagggactacaggcgtgcaccaccatgcccggctaatttttgtatttttagtagagacagggtttcaccacgttggccaggctggtcttgaactcttgacctcaagtgatccacctgccaaagtgctgggattataggcgtgagccaccgtgtccggccgggccctggtttttgtacacacgtgcattgcagatctagagaaggtcatgacttgcccaagtacatatagcacatcagggcagaccctgggctcgaacccaggccttctgccaggactgggttaggcccagagttggggtactgcacgatgaacaagctgggggatgctgggagtgctactcagtctctgggtgggagccagctctcct

SEQ ID NO: 195273 - DNA, 123 bp, Homo sapiens
caagaccttcgctcgaaattcagtcctcgtaattcataaggcagttcatactgcagagaaaccctataagtgtaatgaatgtggcaaggtttttaagcaacgagcaactcttgcaggacatcg

SEQ ID NO: 195274 - DNA, 316 bp, Homo sapiens
atcaaaggagcccaggagtttgaggctgcagtgagctatcatcacacctctgcactccagcctggatgacagagggagaccacatcactgaaagataataatagggttttttttgttgttttgttttgtttttgcaaccccagagtgtgtgctctctctctctctctctcttctgcttttctgatagcaaaacagtgactacacttaccaataatttatcgcattaaaaacaacgggaaaaaccgcagtacttttccaccaacctaatacattttaaaataaataaaagagtgtaattggattgtttgtaacatga

SEQ ID NO: 195275 - DNA, 385 bp, Homo sapiens
gcaaaggcagtgctaagagaaaagttcgtagccctaagtgcctgcattgaaaagactgaaagagcacaaattgacattctaaggtcacacctcaagcaactaggaaaacccagaacaaggccgggcacagtggctcatgcctgtaatcccagcactttgggaggctgaggcggtggatcacgaggtcaggagattgagaccatcctggctaacacagtgaaaccccacctctactaaaaatacaaaaaaggagctgggcatggtggcgggcacctgtagtcccagctactcgggaggctgaggcaggagaatagcgtgaacctgggaggcggagcttgcagtgagctgagatcgtgccactacagtccagcctgggcgacagagt

SEQ ID NO: 195276 - DNA, 474 bp, Homo sapiens
tgtatagcctttccgtcagacgctgaactatgtgtgactctagtgtgtaatacagaccctgtgaggcataaaacccaaccatccttcccctctttgaagagagagcacctttgatacacactggacactttctcttcccagctggcaaagcgattatcaccagtaaaggtcttctttctaccttttagccatcgtggtggtcttttggacagcaataatcaaactgttggatcagagaggcaagcacaatgacgatttctaatattcacctgaatcgtcactaaaagagcttccaagtgcactttggaagtgccatcgaatatcttttctgggtttttcttttttttttttttgagacggagtctcgctctgctcactgcaacctccacctccctggttcaagtgattctcctgcctgagcctcctgagtagctgggattccaggcgcatgccaccacgcctggctaatttttt

SEQ ID NO: 195277 - DNA, 287 bp, Homo sapiens
tgcctcagacttctcaacacttccagtctgctaggagatcctgggtcacccgtgaacacacgaggttgaaacaggctgggaaggggaggggccgggacctatggggctacatcattgtactctgccccccaagagatggccagtgcagccgacaaagatagattagagcctggagaagggtcagaggccgggtcaggagagcaccatttcctgggcggctggggaccgggaggtgccctatcggagacgctgtggcggtcggtgtggagggcgagaagctgtgtgcg

SEQ ID NO: 195278 - DNA, 232 bp, Homo sapiens
tatatacataaaaataaagcaaatataagcaaaatgataaatatgaatgacaactacagaatttgggttaaaggcatacaactattcactgaacttttttagcatttctgtatatttgaaaatttcaaagtaataagtggagagaaatcattcacaaaactaatcttggcaaatcagtgtgttgtgaaatcctctctggaagatttttggtccaaaatgtcttttttttttt

SEQ ID NO: 195279 - DNA, 586 bp, Homo sapiens
tttttttttataactctattcctttctttattcccagtgtagcttcacctcggcgggtgagcgttattggaatggaaggcagggagtgatctgtactggtctctctgctgcctgctcgcccctctcaatctctcctttgctttttgctttaagatcgctcttctctattgcatgcagggagttttcttgagctgggtagcaggctgattccattcatttctacagtgccttgaatatcttcaatcgcccacaaagacaatgttttattctacgaacacaccttttgccaacatctcactgctttctgtacaaaacagcctttttgtcgaacattgaagtgtctacaataataactatcaatagggaaggaaacaaattaacatccaacgaatatagggaaatgtggccctgatacaagcacttggtttttgcttctaaagaggaaccccttcccagactcacctcatcgagagggagacagagaagtctatcaagcttagcaaacatctgtagtccaattactgtcaacagtttacaggtgttgagagcaaacagtcacttatacactacctcccaaatgcattct

SEQ ID NO: 195280 - DNA, 527 bp, Homo sapiens
catctaaacaatgcctggcacagtttataggccctcagtaaatgtccccgagaaagtgagtgggtagagaagtcagttgtcttatttaggacatcatacgatctgaaggatgcagaattcatctgccaggatattgttctgtcctcctgccaaacttgaaattcccacaacagtcattgaaaaggtgggagcactgtctgccaaaggctgctattagaaaataagcatgttgctaaggagaagggagctccactcttcttgaagcatttaactctcttcagaattaagatcgtgaacatgagcagtaccataactagtaatacattatttatttttggaaattaaaaaataataacagttgtaaagccccatgataggaatttttttttctcaaaagtatgagggctaggcactgtggctcacacctgtaatcccaatagtgtgggagttaaggcaggaggattgctggaggtcaggggtttgagaccagcctgggcaacatagcgggacccccatctccacaaatt

SEQ ID NO: 195281 - DNA, 494 bp, Homo sapiens
cactctggagtgaaaatgtaaagaaagtgaggctgtcagttgtgagattatccgaaagaagcacatttcaggcacaaggaacagcgagaactcctgattcaggagcctgtgggatgttcatggaggccaatgtggctgaagtgaagtgacctgggattggtggtatagtgaggtgggatataagaaaaagattaagctgggtgtggtggctcacgcctgtaatcccagcactttgggaagctgaggtgggagaatcacttgaggccaggagttcaagaccagccttggcaacataatgaggtcctatctctacaaaataaaaaacaaacaaaatcagccaagtgtggtggcacacacctgtggtcccagctaatcaggaggctgaggtgggaggattgcttgagcccaaggggttgaggttgcagcaagccatgattgcaccactttactccagcctgggcaacagagtaagactttgtctccagaaaagaaaa

SEQ ID NO: 195282 - DNA, 1189 bp, Homo sapiens
gaacagcagcatgggggtaaccgcccccatgattcaactaccgcccactgggccctcccaccacatgtgggaattaaagggaactacagttcaagatgagatttgggtggggacacagccaaccaatattactcagcctttctgagcttaggagcactaagtagctctgtagcactgtgcctgcggcctgtttcaaacaaaatctcaagcaaaaagcaaacatatatgaaagacatggcacgaaatagcccagagaaaggacccttgttgacagtaggagagctgaagcaggaaggcacagtgtcatcttgtttgacctcagcctggaatgtgcatgtccagtaactcgaattttctcccctctgctcccatgtccaggaatgaccacaaaattgccacaagtattgatttctaagtttcaaagaaattttagccagcaggtgaatttgtaaatacagatcggtgaataatgaggactgaccatacttacattctaatgttcttaactaaatatctttctccacgtatgtataaagcataaaattttctcctttccagtctaaaggtcagtgcctaaaggagtgaaatggtgagaaggggctggatccaagctgttattggctatgattgaaaatttactgctatttaaaagtgcatatttccacttttaagttgcccatagattcttctttttttttttttttctttttttgagatggaatttactcttgtcacccaggctggagtgccaatggtgtgatctcagctcactgcaacctccgcctccggggttcaagcgattcttctgcctcagtctcccgagtagctgggatctcatacattattctttagtgtccaaagggtttttacttccaatggcttatttgtggaatttataaacggaagtgatttgcaaacaaccaacaaaaagcacaccaaaataacctgcacaaagattacaaagactttaataaattaattacggttacttgtcatcatttccctgttttaagtacacccctgaacaggcctcaggcttcttccagtatgggctggcctggggatggggaggacgaaggtctaccccagccctctctggccacagaggctgcattgccccctctctttcagttcgattttgtttaaggcagtgtggcttcttaagtgacatgtctgtgatgatcacccc

SEQ ID NO: 195283 - DNA, 396 bp, Homo sapiens
atgtgtgagtggtagttaggtgtggaggtaattgcaggttgcctctgagcagaaagttaaacagctgcagtgtgggagatcaccctggaataaacacattaaaaatcttctaaaagatcaaaaaccccagctgttcctatcaatatgctagtgcgcactctgcatgcacctttaggccataaacccatttcccttgccctgtgaatcgactgaaaagatggactggtgggaaagaaccaatccagggagcacttagccttggaggtgagacactgttgggaagaagtcagccgctagagagctctcccttgaaaccaccagaccttgcctgtaacctgcgtgtgctctttagcgcacgcactcaggatcctggaactgtcatatctcacccccggc

SEQ ID NO: 195284 - DNA, 486 bp, Homo sapiens
gcctctcaccgagcctgagtcgtggccgctgcgccgccaggaggcttcccgggagccggcggggcccaggacctctcgagcgcagcaggcaaggggccggccttttggcagcgcggctgccagttaattttctccgttgcattctgcaaacgagatcgcattcagagcccagaagttgcaagctgggaataagcgagatctgaaagacccccaagaggagcttgtttgggagtgggggcagacggcgttttgcgcccaactgatggttctgtgaagggaaagaactgcacaacactcctgatattcaaatccactgtgagggaggggacctccataccctgatcatagcagaggcctttgaggacgacacaggtcgctacacctgtttggctacgaatcccagcggctcagacacaacatctgctgaggtgttcattgaaggtgccagttcaacagattctgacagtgaaagtttagctttcaaat

SEQ ID NO: 195285 - DNA, 605 bp, Homo sapiens
atctttggggagtgaggtgttctaatacagtggttctcaaaattagcaggcatcagcatcacctgcaaggcctgtagtttgctgggccccaccacagaggtttctgtttcagttggcctatggtggggccccagaacttggatttcttaacagttctcaggtggtgttgatgctgttggtccagggaccatacttgagagcctctgctctaatcgatgggaacagactggctggatgactggcctccagggggcgctccattcctgacagcacatcccgccagagctggttgatggacactctaccgggagctgaattttaccacgtaccttctttgcctgttaagggcactgcttcaatgaaacttgcaaggagcaaagaacagattaggtaatttttaattggaacactgatatgagttataggttatttaaatattttgaagctgcaaactgccccttgtttcttttcagttcagagatggaaaaggagtgaaaatccttgaaatagaacttccttttgtaggattactttgcctagaagacaatagataaattcagtgatgtgtggggattgcaaaaattcattttccactttattacttt

SEQ ID NO: 195286 - DNA, 271 bp, Homo sapiens
tgacattatcagagcctccacacaaatggtacctggtgacccactgatgcactgatatgactgcaaccctgaaagcctgcttccctcaagccaaacccctgtgagaaggaagtagacttaaggtagcttctatccaagttcattttcagtgcatagtaggccatgcactgataaatggctttcctggccttggcaatgtctgccgtctttatgctccactaaactgtttgacttccacacaaagacttcttctcagaggcactgtctgggt

SEQ ID NO: 195287 - DNA, 303 bp, Homo sapiens
acctccctgtgatgtttctgcctcattaaggctttatttgtgtgggcttaatccaaacaaagctgaaaaaaacaaaaacatgccaaaaagcccactgtgatttgcagaatgctatcaacatccgatttctaatatgttttctttacgaaaatcttttttgtggggaagtgacaaggttaaggagctggctataaactatgaactgcttatcttcacaaaaggtggacacattcttcctaaacgttcacagaaggtgctgttggtgtttttgacattggtgttataccagttatacgtaaggga

SEQ ID NO: 195288 - DNA, 288 bp, Homo sapiens
gcaatcatctagtttacccaaagactctcacgccaagcgactagctactgctcttcacctatgcaagttaaaccggaggctccccttttcacttagcgagatgccccacaaggtcatcaatgaacacttggacaccttcaaaagtcagtggtgacaatgttaagctgccagttttcaaaaattataccggttaagaaatagtgaagagtgccaaggacatactctttaagatgaaggttgggggccgggcacggtggctcaggcctgtaatcccagcactttgggagg

SEQ ID NO: 195289 - DNA, 168 bp, Homo sapiens
agcagggaacaaagaagcatatggatcccagcttgctcagcaccaagtgtgagaagacagaacctctgcacttggctccctaactagacattcaccttggccagtgctgtgttttcatctgttcaccaccatcctctcccctccacaccacaactggtgaaaaggtag

SEQ ID NO: 195290 - DNA, 432 bp, Homo sapiens
gtatatgaagtatccaattttctggggaaatattcagtgtactgaaagtaaactgcatttaaaatcattataaaccaaaaaacacgtcaaatagcattatcgtattattattatttgtgagtaagttaagagacagagtcttgctctgtcgcccaggctggagtgcagtggcatgatctcagctcactgcaacctccgcctcccgggttcaagtgattctcctgcctcagcctcccaagtagctgagattacaggcacctgccaccatgcccagctaatttttttcgtatttgtagtagagatggggtttcaccatgttgaccagtttggtctcgaactcctcacctcaggtgatccacccgccttagcctcccaaagtgctaggattacaggcgtgagctcccacaccctgccagattattaacattttaa

SEQ ID NO: 195291 - DNA, 337 bp, Homo sapiens
gagtagattttctaaaaaataagcagcgcattttaaaaggccccctaaataaggcttcagatggcacaaggccatggataggttgtcatagtgatgatcagaaatgaaaaatatttctactttacttgaggtaaggagtttgaggacagcctggccaacatggtgaaacccagtgtctactaaaaatataaacattagctggctttggtggtgcatgcctggaatccagttacttaggaagctgaggcaggagaattgcttgaacccaggaggcagaggttgcagtgagccgagaccatgccactgcactccagcctgggcaacagaccccatctca

SEQ ID NO: 195292 - DNA, 761 bp, Homo sapiens
tcagacagagtctcgctctgtcacccagtctagagtacactggcagcttggctcactgcaaccgctgcctcctgggttcaagcaactctcgtgctttagcctcctgagtagctgggattacaggtgcccgccaccatgtccagctaatatctgtatttttagtagagacggggtttcaccatgttggccaggctgttctcgaactcccgacctcaggtgatctgctggcctcggcctcccaaagtactgggattacaggcgtgagccaccgcgcccagcctggcctctccttttataataaagaaactgaggcccagagggagggcatgccttgtctaatcccaggctttttagagtctcctgggtctgacagtgctctctcttcctgtgaacatgctgaaagggacatgctgggagatttgagaagtcaaattagtagtatatgacttttttcatttccaccctactgctcttatcttggatgagggatggttttaccattcaatttcatgtatttttctttgtgggaaatgaaccacagccagcaacttaataaaatcccaccccaccccatcaccgacagtaattagaagctgtgaaggaatctgaggagttagtctattttccctttaggcatgatagaccctacctgatcctatcagatgaacacatttttttcaatcttaaaaatatccactgaaaaaatatctttcctctggaaactctgccactatctgtgctgatttttgtttactaagaga

SEQ ID NO: 195293 - DNA, 610 bp, Homo sapiens
cgaaacagtgagcttattatcattaatattaatacttcctttagtgtattcacgagtcctggaagcaatgaggcgagctttaaaaacccacttttctaattaagtggtttttaacataatgagtaaaccatacaaggttcatactgagggaaactggtttggagaggaggcatcagagtacacaggggcaaagggctgggtcccagctgcgacaaaagcccccagcaggaagggtgcgtgcttctccctggccaagcagttgtctagggccgctgcctggcagagaggaccaaaaactgacaaaggagatcacactgagaggtttccttcctgagaccgctgggcaaaggagcctgaggcacatttgcacatagtactctgggagcagaatggctggatcctccgggcccgtggcagcttgaaatgcgagctgccagcagagctgggccaaagcctcttttgtggtaggtggggactcttgacaattcctgccctcagcctgggctagtgtaatagaatcataataatatgttaggttgaatcatatgcagttgtttttgtagattaaaatggttgaatattggcaatttcgtgaggctcaatctaatag

SEQ ID NO: 195294 - DNA, 367 bp, Homo sapiens
cccgcaaagtgctgggattacaggcatgagctaccattaccaggctagccaggccattacctttaatcagggtctgtccagtgaattaacaaaggcttgaaagaaatcaggtgagctccttgcgccttcaaatgcttcttagaagacatcattagccctgaacctgccgttgagaatgtgctgtgatcctgggggtcttgatcattaatgaacagcatatgatgtgataaggaagtaactgtcaatgaaaattggaggaaccaggcatggtggctcatggcgaaactccgtctctactaataatacaaaaattagcgagtgcagtggcgtgtgcttgtaaccccagctatgtggtaggatgagttgg

SEQ ID NO: 195295 - DNA, 179 bp, Homo sapiens
ctcccgccgagccctgccctctgacctgctctcacttctctgctgccccagcccctcccagtctgtcccctcccccaccctgccacacctgacattagcgatgtctcttctcctcctccctctgtttctgatgtatcttttttttttttatatacgtgttttttaaaaaacaaaaacca

SEQ ID NO: 195296 - DNA, 410 bp, Homo sapiens
ccactccttaccccaaagggtcctctctgccttgctggctcacggttttatagttactgtgacctccaagaaagcagcaggacaaataatgcttgactctgatgtcgctacaaattcagcacacacaccaaccagcacaattacccttttctgcaactttaaaccactttggttgaggagcgttccactgtgggctcacctttcggtacatgtgtggagttaccaaatggcacagcaccgtgtaactattccaaaccgaccacaatccatttcaaaagagggtggcctcacatcaacactcaaacttgctgatggaaggcagccacgccacacaaacacgaactaatatcaaccctgtggaaagagcatcttccggccaggcacggtggctcacgcccctaatcccagca

SEQ ID NO: 195297 - DNA, 246 bp, Homo sapiens
attaatccttcatttgtttagcatgtatgtatgtatgtatatatgtatatattgtctgactgctttcttaaacaaccagaaaagcagggaatcctgttatatctcatcctcctttcatccaactcccctaccctcccatgacaaaaggccactctgaatttttaaatcttattctttcatttttaaataatatttcttataattttacttttaaattattgggtttccttttagtttttcaacata

SEQ ID NO: 195298 - DNA, 371 bp, Homo sapiens
tttagggggaatcaggtgtgaaaagtgctatattcaactatatgttatactgagatttcaaattatgttttatgttcatagcacaaagatgtaggttttattgatagctaatgtttccgcctacttaacgtctgttctgtataataataaatattcatatccgttccgggcaattttatttctagaaaagactgtgtgtagtacaggcagtcctcaacttagaaataggttgtgttctggaagtttagttgttaagaacttaaaattcattttcctcaaagcaaaagcaagggagtatggggcttccatcagctagagtgccaaagactgaagagcagaagagattttagggaaatatacatatacagctg

SEQ ID NO: 195299 - DNA, 445 bp, Homo sapiens
aaactgtcttccacagaaccggtccctggtgccaaaaaggttggggacctctgggttacattatcacatgcatttgtcaaaactcctggaactgtacaccaaaaagggtaaattttactgtttataaattatgcctcaaccattctggcttagaaaagcaaaataggcctggcatattggctcatgcctgtaatcccagcactttgggaggccaaagcaggcggaacacaaggtcaggagttcgagaccagcctggccagcatggtgaaaccccgtctctactaaaactacaaaaaattagctgggcatggtggcacgcacgtgtagtgtcagctgcttggggggctgaggcaggagaattgcttgaacccggtaggcagaggttgcagtgagccaagatcacgccactgcacttcagcctgggtgacagagcgagactccgtct

SEQ ID NO: 195300 - DNA, 555 bp, Homo sapiens
  misc_feature (18)..(18): n is a, c, g, or t
ccaaatggaatccccaangaatcccaaatggaatccatgctgaagaaaaaagatgctaacaaattcactcatcaccatgcacaaaattaagctttctaaactctaccatagaagagaataaagatcattctaccctgggaagacatccaaatgctatatatcccaactctttaaaaactagctctggtttctctgagaaacaaaatacatccaatattacatatgtgaaattaaataagcaggaggccattagcctgagactcccttggtacttgtagttcctatataacaaactgcaatctacctcagtaataaacaaaccaaaacctaacttagcagaatacttttgtaacgaatagctaggtttaagccagacagaaacaggtgagcttcagccagtcataggcagtcaagttatcaaaccatgcacaaatagggcaaatgcctagctgtaaccaatccagttatttctgtagtttacttccaagttcaatttatacttataaaagcatactctctgtgccacagaggattcattggggggaccgagctcga

SEQ ID NO: 195301 - DNA, 628 bp, Homo sapiens
cagttgactctagaggatacaccttatgctctgacccaccttagcaccttatttgtctgatctcataaagagactttggagggaagcggagttgattgggattagaggtttgcttgctgaggacggtattattctctagccaatcaagcatgcacaaaattaagctttctaaactctaccatagaagagaataaagatcattctaccctgggaagacatccaaatgctatatatcccaactctttaaaaactagctctggtttctctgagaaacaaaatacatccaatattacatatgtgaaattaaataagcaggaggccattagcctgagactcccttggtacttgtagttcctatataacaaactgcaatctacctcagtaataaacaaaccaaaacctaacttagcagaatacttttgtaacgaatagctaggtttaagccagacagaaacaggtgagcttcagccagtcataggcagtcaagttatcaaaccatgcacaaatagggcaaatgcctagctgtaaccaatccagttatttctgtagtttacttccaagttcaatttatacttataaaagcatactctctgtgccacagaggattcattggggggaccgagctcga

SEQ ID NO: 195302 - DNA, 427 bp, Homo sapiens
ttcttataatttccagtaatactctgtaagactcggtttgcatgctgtgtgtgtttgcatgagtatagaaacctaagaacataatggaaggctattaaggcaaattcattcctagaaagtggagtggatcattgggataagaaatagcctaattataaacaaatatgcaggcagagggaagtcctaatacaatgaaaacttgcattatctaaacagatgttcccaaagcaatagtttgcctaaaatcctctgtattacatgattattcagtaaaagagtaaacaaatatctaatttattttctaattgtccttcccttcattgagtattaactaggtgcataatgtagttgtatatgtttactagtaaagggaaaaacacttattttcattttgagactgtttggctattactaaagctgagaaagt

SEQ ID NO: 195303 - DNA, 716 bp, Homo sapiens
tcttggtgggtattgaggtcattagattaaaaacatttacctttctacactgagaaacaaacccttcttcctcagacgcaaaataatttgtggatcttttatctctatttcggttgtcctgctttattttctctcattataagatgccctccatcttctgtagaactagatagttactaactcattaatggcgcttaatctgcttacagcctggagaaatgagccaggaggtcttgccatttcaaataggaacaaccccgctcctccagggtttcagaagagccactgttgacggcacggcagagcaagatggcagggttgagtgtgcagcggcttttctccggggtagtgaggctctccaagactggggtatgggagaaagaacaggagtcagggctacctgaatgtgatcctggctcttctgcttgacttactgggtgatattgggctacaactgagactcactttgctcctgtgtaaagtggggcaacagcatctaccacggagggttgaagatttacggagatcatgctaagacagtttgttccaaactcaaaggaaatcatttgcaaacaacagaaaaggtcagaaaccgtatacctggccaagagagatcccttttacgctttgtttaatgtttcatgttgtattttgggttttcccatttactggattctgagctccaaaacaggaatcacattttatgttttcttatt

SEQ ID NO: 195304 - DNA, 243 bp, Homo sapiens
aaatatcttacgagagaatcccattataacactgattattttgggggctatgacatcagtgaactaaacattcagttggatgaaactcagccaaaggccagaggttctcgacctttgtgctatacatgtagtaactggcatagctgtgaattgcatgtggagctgtgggaagaaagagatcctcttgaggcttatttggaactctgcaggaagaaaagaagtcatcaacgtaagtagtctccg

SEQ ID NO: 195305 - DNA, 562 bp, Homo sapiens
cattaatccagggaggatgacaaatgtctgagcttggacagggatagagcaggggatagactggaggtgtttaggaggtagaatccttagatttggctgacccagtggaaggagaggggagggggagaagtgatggatgacttctgtctaccttatggtacatgctgttcagtgatctgggttaaagagcagatttggagaaagataaggacttcatggtggataatgaattcatttgcagtgcctgaggagtgtctaagtgaggtggtaaatggtaagttaagatgtaagtctggagctcaggagagaggcctggggtaagatggcaacataggaattaattaaaactataggaagaatgagatctcccaaggaggttttgttgactgagaagggctaaggatagaaccttttgaaaaaccacctttggaaacaccaggggtactgaggaaggaggaaatcatgaaagaaactagaaaggagtagtaagaagtggaaggaaaaccaggagagtgtggactctgcaaacagaagtgtccagaaagggatcagttgtgtctag

SEQ ID NO: 195306 - DNA, 307 bp, Homo sapiens
actgtactcagttgtatttagtaaagtgttttgtctattttggtatgatttgaccctttgcatatttattaacagttccacatactacacaaattcagcatcagtttaaagaaaagataatactttgtgaaaataacagtttcaagaacggtatagacagtagtctttaaataagtcaggattcagaaagacttgatcatcatctttgctccctgttcttcaaatatgtgtctttcttccatatgctgcatacagcttatgaattggttttttaattagacctttttttaactataacataaatctc

SEQ ID NO: 195307 - DNA, 430 bp, Homo sapiens
tacaatacgacacgacacgacacgacacgatacgatacgaaaacattggggaaatgcttcaggatgttggtcagggcaaatttttttaggtaatgcttcaaaagcacaggcaacaaaagcaaaaataggtaaatgagataacatcgagctaaaaagatcctgtacagcaaaggaaacgaccaacagagtgatgaaacaacttacagaatgggagaaaatatctgcaatttatctgacaagtattaataaccagaatatataaggagcaacaaaaaagcaagtatctgattttgaaatgcacaaatgatcagattagacatttctcagaagacatacaaatggttaattggtatatgaaaaaatgttcaacattactaataatactcagggaaatggaaatcaaaaccataataagctgggcacggtggct

SEQ ID NO: 195308 - DNA, 453 bp, Homo sapiens
tataattggcaggaaggagtaattatgattattttgttattataaggtgaagcagtacacaatcgtcccttggtatctgtggagcattcattctaagacccctgtggataccaaaatccacacatactcaagtccctctgcataccctgcataagagaaaagttggcgctctttactgggggattttgcatcctgcaatctgcatttggttgtggatgcagaactctacaagagggagggttgactggatttattgaaaaaaaaaatccttgtaaaagtggacccatgctgttcaaacacatatattgctagagccaaatgtagtgtcatttgaaagtggactaggattagttggaaatcaacactgcaaatttagggctaccactaaaagaaataattataaatcaaatgctaaaaaggagagaaaattgaatcatataaaatgctcagtta

SEQ ID NO: 195309 - DNA, 344 bp, Homo sapiens
ttcctaccagtcatttgcacaggctatcagagggcctctcttccaagcctttgataaacaggaattcaaccccaactaccctttggaagccaacggatattattataatcagtgggaaaacagacaatgacggagtcagctctggccagaagcagaaaagaacgaaggttggttcacctctcgttgcctactgcatgttgtgcacgaaatgacctcaaaggtcaacttctacgctttcctttttgcaagaactaaactcatacgtatgagccctccccttatggaaacctcaaaccctgttaggctaccctgtcacaaaccctgacttgaatagagaagtgtgg

SEQ ID NO: 195310 - DNA, 597 bp, Homo sapiens
gaacgcgtcttttaagttcggaaggccgagagcaaagtttggcctttactcgtagctacgtagtccgttcagacgtggaagtaattagaggacctgagcgagcagccagatgttgtgtgaaaggatgctgatcagaaattgaaagtttagtaaatcgaagcaatgaattctgaggactcagaccctgtaacttccatccgacatgagttatatgggaaagacactttgcttttattcagagatttgagattgatcgctccctgaattggaaacaattgtttgcttttgcatttatcggtgtctgtacctctgatcaatttttaattaacgagtctcagctgatgactttattttgaatgttaagaaaactgctaagttgaaatgtgtttaaaactttgaagaaatggaaaagacctttagttgagatttgtcttttatatgagctgttcattttactgtctgataagtgtaaggcaattttatatagtttcttagctgtatagttatgtatagtccgagtaagtagtcccttttggttctaagactgtaattttgtttcactgagtacgaaattatttctgaatacttgtataattt

SEQ ID NO: 195311 - DNA, 315 bp, Homo sapiens
gtagactgcccaagtaaaaagtagctctctaagtgagagaagatgggaactagcaggaaatccacttaaacactatgatcaatctcaactgaatgatttcaaagagcataactgaatatgatcaaaatgaaatttcccatatgttcaaatgaaattcatatgaaatacttgaaaaataaaacatagctagtatatcttgcaccatcctggaggaattctaggctttaacttgatctcatttaataatcctggctcctttcttactttgctcctttaaagcatggggccatgttttatacacattgatgtccctca

SEQ ID NO: 195312 - DNA, 410 bp, Homo sapiens
tttgaaaataataaaagaaaagaaaaataaagcaaaagccattctcccaaggcgatatcgggaagtgtcacttacctatcgcctttcttcctttctctctgatgtttaagtggtgatgctcaggactggtaatgctccaggaagtgaccctgccctcaggccctctcccctgcctcaggcagcctgactcagaaactgtcccctaatcacctcatcctcagtcacagctgagctccctggtcacctctttccaggacccacaattcaaccttatcctgcagcagccatgacattctagaaacctcacactcctgcctatgtgcgtgccctgcaatattttttgctatcctgtaaggagaccacacgcaggcttatctctgagatgctctaaatctaactcaatctagtca

SEQ ID NO: 195313 - DNA, 291 bp, Homo sapiens
agcagggacggatgggtgggtggagggatgggtggacaggaggacaaggagagccagagtgagtatgcagtcctcctagcacttctttgatttctgacaagtttccagctctctttttaacaaatgattttccattcctttcaaccaaaatgagcctaatcaaaatgacattaaaaacattacttctatatgtctaaaaattaaaataaaagtttttaaagatcttctaaaagacactttcttaatttagatttgtttttacttcttcaaatcccagttcctccccacaaa

SEQ ID NO: 195314 - DNA, 212 bp, Homo sapiens
caccttggggataaagagaagtagaagcagagagcagaatagtggttagtaagggggttaaggttggggcggagggtgttggtcaaattatacaaaatttcagataagaagactatagttaattacaaggtattttatcttgaaaatcactgaaagagtaaattttaagtgttctcattctcaaccaaaaaataagtatttgaggtaacaca

SEQ ID NO: 195315 - DNA, 274 bp, Homo sapiens
gtaatggggtccctcctttcctgccttttctggactgaggaaaatttcccatgaagacagtaaccaggaaaaattcagccacaactatttttcctatctcctgatgcttgaagatcggtgttacatatttgtcctactaggaaaccctacataatttattcattcaacaaatacttattagagtacctctatgatctggacagtcttccaaggcattggtggacaaaatggacaaaagtctctgcactcatgcaactcacatgctataaaagta

SEQ ID NO: 195316 - DNA, 666 bp, Homo sapiens
tccttgacacgaacctcttccacattcaacacattaaactcataactaagtttttcatgtccctaagttctttagggacatgttcacatttctcaaaaatccaactgtattaacagtctgagatatcatcttctctcagctagatgagctcatttatcccagctggatgacctttacagtcttaaattctctcttctaccagatttggcccctacaagctattctctacagagttgcctgagtgatttttctgaaattcaatttgatgatttaattatgtaaatcttttttttttaatttcagttggtttcagggactcaaaaatatttgagaacctggcctctatctaaaactccaacttcatctcttcattcttcacctagtcatgattaacttattttctctatatcctctcacattcaagcctttatgttttctgttctctctgcaaactttgttaatcaaagattaatgagttcagtgggggcaaaaatataacgattttctaagaaaaaagtctgctgattggggaggcacagaattcagtaaggtgaaagtacattctctgtagaaaaaaaagtgaagatctggcttaaaaggggaaagttcttactcaggttctcaatcaagtccgtttatgcaaatcaaagattcaaacttgtttgg

SEQ ID NO: 195317 - DNA, 436 bp, Homo sapiens
agacaatgaaatattattcagtcttaaaaaggaaggaaattctgtcacatgccacaatatggacaaaccttgaagacatgatgctaaaataagccagtcacaaaaagacaaatgctgtatgattccactctatggggtatctaaagtcatccaattcatagaaacagaacagagaatggtgtttgccaagggctgggtggtggatggggagctgcggtttaaagggtagagtttccgttttgtaaggcaaaagagctctgcagagctgttgcacagcaatgtgaatatacttaacactactgactggtacacttaaaaacagctaagacaataacaacaaaagccacaattctggagtcagacttgggtttgagttccagctctgtcacatggcctggggcaagttgtcaaatgtctctaagcctcagtctcccca

SEQ ID NO: 195318 - DNA, 337 bp, Homo sapiens
ctgcccatgtagctgctccaccccagggagtccagagtgtatccgctctattgggaagaattagagagaggcgagtaatatcctgacattcaggtgttcaatgccagctgtcagcctctggcccctgccagtgttaggaatgattcccctgtcctctggggtactgccctccgacgacaacttaggatcagcatttaaaaccctttctgctctcgtcttaggtaaattatagaccagaacgggtctataatctgatcaaatatcactctcctacttacaggactcaggtggtgtggctcaggtggtgtgactcaagtggtgtgactcaggtggtgtg

SEQ ID NO: 195319 - DNA, 259 bp, Homo sapiens
ctgattatgatgcagtgtcaaacagcacacccccaaattccacaggtctcaactttccctgggttgcttctcggtacccatgtggatgtcttgggtgggttgcaaagaaataagatttggttttgcccaggtagtcactgaacagtgactggtaacctttccccactgcgcgccaccttggtgaacccagacacttaagagccagcaaacctgcctcctgggagaaaaatagggcaaatgccagcccatgggggggttt

SEQ ID NO: 195320 - DNA, 444 bp, Homo sapiens
gagacagggtcttgctctgtcactcaggctggaatgcaatggcatgaccatggctcaccacagcctcaacctcccggattcaaatgatcctcccaccgtagcttcccaagtagctagaaccacaggcgcatgctaccacaccaaactaatttcttttttaaaaaaagtttttgtagagatggagtccccctatgttgcccaggctggtcttgaactcctgggctcaagtgatcctcctgctttggcctcccagactgctgggattataggtgtgagccactgcacccagcctcatgctgtaattgcgataaactgtttctcccaaatgctaatatgagcatgagagatgatatggcatacaatagcatacttatttgctatttgattttggacaatttatttgtctataccagggtttcttcatctatcaagtgggaataatcc

SEQ ID NO: 195321 - DNA, 1469 bp, Homo sapiens
  misc_feature (1430)..(1431): n is a, c, g, or t
  misc_feature (1436)..(1437): n is a, c, g, or t
  misc_feature (1443)..(1443): n is a, c, g, or t
  misc_feature (1447)..(1447): n is a, c, g, or t
  misc_feature (1453)..(1454): n is a, c, g, or t
  misc_feature (1465)..(1465): n is a, c, g, or t
agcgtctctgcagggggagcaagagctgcccttccacccctcccaggggacgggtaggggcactctgggcttttcccaccccctcacgcagggacacaggcctggtgggtctatgactgaaattggccagaccgcattctggtggttttattcggaagggaagtttaccctgttcagcagaagctgagatgggaacaggaaacccacagggcccctttattcggcaaaaatgtcagtcagcgccccggggagcagccgagggtccctgagtgtgtgagtgaggtggggaaacacagatggactttggggggctcccccttctacaggaaacccggagtggactggaatggtgcagggggagaactcgcccctcccatcgggcgcctccttcataccggcccttcccctcggctttgcctggacagctcctgcctcccgcagggcccacctgtgtcccccagcgccgctccacccagcaggcctgagcccctctctgctgccagacaccccctgctgcccactctcctgctgctcgggttctgaggcacagcttgtcacaccgaggcggattctctttctctttctctttctcttctggcccacagccgcagcaatggcgctgagttcctctgctggagttcatcctgctagctgggttcccgagctgccggtctgagcctgaggcatggagcctcctggagactgggggcctcctccctggagatccacccccaaaaccgacgtcttgaggctggtgctgtatctcaccttcctgggagccccctgctacgccccagctctgccgtcctgcaaggaggacgagtacccagtgggctccgagtgctgccccaagtgcagtccaggttatcgtgtgaaggaggcctgcggggagctgacgggcacagtgtgtgaaccctgccctccaggcacctacattgcccacctcaatggcctaagcaagtgtctgcagtgccaaatgtgtgacccagccatgggcctgcgcgcgagccggaactgctccaggacagagaacgccgtgtgtggctgcagcccaggccacttctgcatcgtccaggacggggaccactgcgccgcgtgccgcgcttacgccacctccagcccgggccagagggtgcagaagggaggcaccgagagtcaggacaccctgtgtcagaactgccccccggggaccttctctcccaatgggaccctggaggaatgtcagcaccagaccaagtgcagctggctggtgacgaaggccggagctgggaccagcagctcccactgggtatggtggtttctctcagggagcctcgtcatcgtcattgtttgctccacagttgggctaatcatatgtgtgaacaagaagaaagccaaggggtgatgtagtcaaggtgatcgtctccgtccagcggaaaagacaggaggcnnaaggnnaggccncagncattgnnggcctgcaggncctc

SEQ ID NO: 195322 - DNA, 1137 bp, Homo sapiens
  misc_feature (1098)..(1099): n is a, c, g, or t
  misc_feature (1104)..(1105): n is a, c, g, or t
  misc_feature (1111)..(1111): n is a, c, g, or t
  misc_feature (1115)..(1115): n is a, c, g, or t
  misc_feature (1121)..(1122): n is a, c, g, or t
  misc_feature (1133)..(1133): n is a, c, g, or t
agcgtctctgcagggggagcaagagctgcccttccacccctcccaggggacgggtaggggcactctgggcttttcccaccccctcacgcagggacacaggcctggtgggtctatgactgaaattggccagaccgcattctggtggttttattcggaagggaagtttaccctgttcagcagaagctgagatgggaacaggaaacccacagggcccctttattcggcaaaaatgtcagtcagcgccccggggagcagccgagggtccctgagtgtccgcagcaatggcgctgagttcctctgctggagttcatcctgctagctgggttcccgagctgccggtctgagcctgaggcatggagcctcctggagactgggggcctcctccctggagatccacccccaaaaccgacgtcttgaggctggtgctgtatctcaccttcctgggagccccctgctacgccccagctctgccgtcctgcaaggaggacgagtacccagtgggctccgagtgctgccccaagtgcagtccaggttatcgtgtgaaggaggcctgcggggagctgacgggcacagtgtgtgaaccctgccctccaggcacctacattgcccacctcaatggcctaagcaagtgtctgcagtgccaaatgtgtgacccagccatgggcctgcgcgcgagccggaactgctccaggacagagaacgccgtgtgtggctgcagcccaggccacttctgcatcgtccaggacggggaccactgcgccgcgtgccgcgcttacgccacctccagcccgggccagagggtgcagaagggaggcaccgagagtcaggacaccctgtgtcagaactgccccccggggaccttctctcccaatgggaccctggaggaatgtcagcaccagaccaagtgcagctggctggtgacgaaggccggagctgggaccagcagctcccactgggtatggtggtttctctcagggagcctcgtcatcgtcattgtttgctccacagttgggctaatcatatgtgtgaacaagaagaaagccaaggggtgatgtagtcaaggtgatcgtctccgtccagcggaaaagacaggaggcnnaaggnnaggccncagncattgnnggcctgcaggncctc

SEQ ID NO: 195323 - DNA, 1295 bp, Homo sapiens
agcgtctctgcagggggagcaagagctgcccttccacccctcccaggggacgggtaggggcactctgggcttttcccaccccctcacgcagggacacaggcctggtgggtctatgactgaaattggccagaccgcattctggtggttttattcggaagggaagtttaccctgttcagcagaagctgagatgggaacaggaaacccacagggcccctttattcggcaaaaatgtcagtcagcgccccggggagcagccgagggtccctgagtgtgtgagtgaggtggggaaacacagatggactttggggggctcccccttctacaggaaacccggagtggactggaatggtgcagggggagaactcgcccctcccatcgggcgcctccttcataccggcccttcccctcggctttgcctggacagctcctgcctcccgcagggcccacctgtgtcccccagcgccgctccacccagcaggcctgagcccctctctgctgccagacaccccctgctgcccactctcctgctgctcgggttctgaggcacagcttgtcacaccgaggcggattctctttctctttctctttctcttctggcccacagccgcagcaatggcgctgagttcctctgctggagttcatcctgctagctgggttcccgagctgccggtctgagcctgaggcatggagcctcctggagactgggggcctcctccctggagatccacccccaaaaccgacgtcttgaggctggtgctgtatctcaccttcctgggagccccctgctacgccccagctctgccgtcctgcaaggaggacgagtacccagtgggctccgagtgctgccccaagtgcagtccaggttatcgtgtgaaggaggcctgcggggagctgacgggcacagtgtgtgaaccctgccctccaggcacctacattgcccacctcaatggcctaagcaagtgtctgcagtgccaaatgtgtgacccagccatgggcctgcgcgcgagccggaactgctccaggacagagaacgccgtgtgtggctgcagcccaggccacttctgcatcgtccaggacggggaccactgcgccgcgtgccgcgcttacgccacctccagcccgggccagagggtgcagaagggaggcaccgagagtcaggacaccctgtgtcagaactgccccccggggaccttctctcccaatgggaccctggaggaatgtcagcaccagaccaagtgcagttggttggtgacgaacgcccgaagctgggacaagcagtcccactggtatggag

SEQ ID NO: 195324 - DNA, 623 bp, Homo sapiens
cttcgggaggacaccttcaaatgctgaccctgggcccctaactgacctgagacttcagagcttcttgggaggagctggggtcccccagcggagcctgggatggagcagggatggctgccccagggagggggcggtggggccttccatcctgctctgccctcctcgtcctctggccccagctcagtcctgtccatctccagctctaaccatttttgtcccgacactggctctccctctaccttctgtccttgtctgccactggtctcccgtgctctggggtctctgcactgctggctgcctcccgcttctctcccctctccctctgccgtcctgtctcctttgcccagtctctccttgtttctcttctcctccttccttctctccacctccccatagccgagcttggaaaagtcagacagacctctgaggtctcatcctggagctgccaccagcccagcctccctgggacctgtcttcactgcctggggccctgggagccagggaggctccctgaggctgagtgaacactgggcgctgcacctgcctctcccacgtcctcggccccactcccgcaggtgcagctggctggtgacgaaggccggagctgggaccagcagctccca

SEQ ID NO: 195325 - DNA, 601 bp, Homo sapiens
gactctagaggaccccgcgtgagctgtggcataagaaaaataatcagtttaataattacaacagtgtagcatcaacattgtagtagtcaacactaggacattgtctgtgacatttagattaggagtttctccacacttgtcaacaggcgccctgggtgtcccagagaagtgaagaaatgattggcattaaggagtccacacaaccagggcaggcattcaaggtcccagacgcccagtgcatgtggacaagcacagacgccactgagtgtgaaggaacgagcttctgatgctacattccaacaagcgcctggctatggcgtctgttggggactcatctcgtaaactttaaagaaaggaccttttaaaaggccagaagttaaattatcttgaatctatgacaaacccacagccaatatcatactgaatgggcaaaaactggaagcattccctttgaaaactggcacaagacagggatgccctctctcaccactcctattcaacatagtgttggaagttctggccagggcaattaggcaggagaaggaaataaagggtattcaattaggaaaagaggaagtcaaattgtccctgtttgcagacg

SEQ ID NO: 195326 - DNA, 191 bp, Homo sapiens
ccagtttactacttttctattcagctatgtttaatctgcttttaaacgcattgtcttagtccattcaggcttctataacaaaatactacaaacgaggtagcttaaaaatagggaatggccaggcatggtggctcacgtctgtaatccaaagacattgggaggctgaggcaggaggatcacttgagcccagg

SEQ ID NO: 195327 - DNA, 706 bp, Homo sapiens
caccacaaagccctccaggcacagctcagcattttgtagaccagcattaaatcttaaaagaagtaaaatgctgccttctcgtggcccatgtacaaaactgatgaaaacagtattgttccttcctgttattgaaaagcagccaagtccaaagcagagagcagcagtatttagattttaaatgagtttgcaaataaaaagacaagagtaccttaatatgacatgagtaaacctttcaggaaataaaattttgaatcagatcagatcaaagtgttccaaaatggggcttaatactgtaattaccaccatgactctgcatatatgcagattttcccccaagggagctcaaactttgactcaaaatccagtaatcttgaatcctggtctaatccttaccatctaaagaaagcacacttatttagagtaattgttcaatagaaaatttatcaggtccttcctcatcctgcccccagccagatgtgttctcttcctgctctgaattccaataagacataatgctacatgtatatgggtctctttttctgtccacaagtaatagttttagaacctttgtggcctctaagatgggcatgacacatggtgcatgcttaagaagtgtttgaataaattaatgaataaataaatgggaattaaatgatgaataaatgtatagctgtgataaatattccctatttcccttatttaagca

SEQ ID NO: 195328 - DNA, 994 bp, Homo sapiens
aaaaaaaaaaaaaaaattagctacagttgaggttatttaggttatttccagttagaagttctgataccattaataaatattttacctttaagctcttgcagagtctgccatgttccttctactcacagtccacacagactaagcagagctaaagatgcagacagggaataaccaagttcacacttcatctaggatgttttcctgataccccctaacctggagttaagtcatcgtctttggtgtttggaagtcagatgttttctattgaattgatgcctacatagtacccataactccccactcctgacattcgtcacactgtgatgcacctggcagctttctagtcccctaagctccttgggaagggtatccattttatcctcagttcacctagcccagggcttggtgtttgtctagtacaggtcatcatatgattgttgaatttttcaaatacacagatttttcttgaaacctcttgatctctgtgttggtctcttcctgccccctcccttcctctcctttcttctccctgttcgtgcagttgaaattctgacattccaagagcatttcagctccaccaaataggacttccacatgtcacaaaacgcaagacagttattttgaatggaaactttttgtacccctttggtagaagtttattttggggtttgtctatgcatttaggtttcactgcctccagatttatctgggtggagtaatatcacataagtgtgaactaccttcctgttttgttaaaaatatcaagagcaatttctcttgatgataagaggtcaactgaagaggttgatgagcatatcctagttatcttttgaactaaaatatttctcagagaaagaaatatcctgtaatttggttagtcgtcttaattgttcatcttctaacatgtatgaacattataaagaaacttttttaatacatgaatagtcctggtctcttaatgtgatcatttttctccatcagcctagttgctggt

SEQ ID NO: 195329 - DNA, 242 bp, Homo sapiens
ttgggatcttcaggtttctaggctaatctagatgccttcctatttatcattcttttcttgagttgactttctgattatagtgaggccaggtcaacacacagtattctaaatatatggtcaggatggtttcttctgactttattcaatatctttatttgtataatgaagaactttggttgttcttatttctgctatgctctgttagaattggaattttatcttccaaatctttagaacttttt

SEQ ID NO: 195330 - DNA, 666 bp, Homo sapiens
agcagtaggtcagaagaacatgcgtctcagacaccacagaaccctgcctcagttatggaccacctagctggacttttatggaaaagacaaactttttaaaaaacttaggatttttagttactcacagccaaatctcaccatgactattagaggctagcaatgccaatttagaaatacttgagagagcagtagcatcgttattaaggacccagagcttggggtccagttggaccatgcgtggaggttcaaactcttgctaatcatcctgagtggatgcaaaagtcagagcctcccggcccccaggctggtaaagtgaggcagactcataaacgactgtgataaaatgtgatcaattaataagaatcactgccccatgaaactctgccaggcagtctgttcccattcccacctactcctgaaagccgtgaaaataaaacacagtcccttttaaaaccaagaccttttgggccactctgtgcccagggaagcaggactactgcaggagtcccctggccgccggggaggagcgtgggcagggtctgcagaggcgagagagagctcggactcagacatgacacacggcccacctgttagagcatatagctcctcatactgctgtttccaaagcatttgcacagtgccagattgtacagaccacaaagaaaa

SEQ ID NO: 195331 - DNA, 200 bp, Homo sapiens
aggaaggggtgagtgaacaaaaactagagcttggaagaccagttaggatgctgttgcagtaacttgaacaagaaacgtctggccaggtgcagtggctcacatctgtaatctcagcactttaggaagacaaggagggcagattgctttagctcaggagttcaagaccagcctgggcaacagggcaaaatcccatctctacc

SEQ ID NO: 195332 - DNA, 101 bp, Homo sapiens
cttagagcacctggaatgtcaatcatattcccactggagagatgtgggctcaggcagaatttacacacagcagtcaccaggcagggtattaataaggttaa

SEQ ID NO: 195333 - DNA, 352 bp, Homo sapiens
cttagcctcccaaagtgctgggattataggcgtaagccaccatgccaggacttctctgccttctttagttattgttcctgtacccacttaaccttttgtaaatatcattattctcttttgggagggagggagatttctttctttgttaatgtagtctctaggaatagggatatacactctttttaatattactattttgattcttgaatgggagccaagagttcatgttgatgttatactgtgctgttatggccactgagtaatattaataatagtcaccaattccatgggattgtaaaacaaattgaaagctgtaaactctccattttcaagaattagagctggagttagt

SEQ ID NO: 195334 - DNA, 401 bp, Homo sapiens
ttatctctctgatccttatctctctatccttagtctctctatccttaatctctctatccttaatctctctatccttatctctctatccttaatctctctatcgcttaatctctctatccaaaatctgatgcctactgtactcactatgccctctggatatctttttaaaagacttaatccctggatcaaatagccatttagactatttcaaaagctctaggtcccaatcttaatgttaggtaagccttccctatctctccaaatgtacatgtacctcatgttagataactgacaaccaccaacctccagcttcccctagatatgctagggacattgtcaagacttgtggttaccagacctgagtaagtttactgttaagactcaccagaggatatcctaag

SEQ ID NO: 195335 - DNA, 149 bp, Homo sapiens
ccttcaaacaagagcttttcagaagctggggaggtctgctcctgcacctgtccagccatgacaggatggagagtttagggatgattctccagctctgcacccacctgatcctctgatggagggtccagtccagcttcacatctgcgcct

SEQ ID NO: 195336 - DNA, 169 bp, Homo sapiens
agattgagtggtaccggattgagatagcacggtgccaggtaaccagcccaggcctcgccctccagctcaaggcgggacaagagccctagagtggcctgagtccaggtacaggccccagcagggtgctgacgcatccacctccatcccagatcaccgtgcttatctcaat

SEQ ID NO: 195337 - DNA, 487 bp, Homo sapiens
gacagtactgacatttcatcttcccgaggcacgtcccctggctccgtgatgtggccgtacaacaagcctgccctttgttacggtgtgtgcacacatgtaagtgctctcgacaaatctgtgttcctgcctctcctccagtgcttctcaggcaacgacgttacccttggcctcaaggaaaaaaaacagacaccgttggttggagattactgagtaaacctacaacgtcctcatgcttaaggccccgtctgtgattccaccatgaaggtcacatatcctctctcctaaaaagacctcatgtctccatttaagtatttgtttgggaaaatgctgtattgtattgaaattattgtataaagatagggccttggtacaaaatctaggaatgtgaggtttaaacacagttggataaatttttaaaaatcacattgcaaattttaattaaggcgagggagcttaatttaaacaaataaatgattagtgttgacta

SEQ ID NO: 195338 - DNA, 402 bp, Homo sapiens
attcatcctatattcgtgtgaagagttcctctttttctcatcacttccagtttttaaaaatctcttctgtttccatggtaattgtatatatcaacaaggactttgaacactctccattttcttggatttattgaatctgatgtggttaataatgcttgggaaaacttctcaaaaaaaactctcacaaacacagcaaatgcattgatggtgaacagcacagtttttgagttcaaaaggcagcagtgtacattccatatcatctgctgttaccatgtagtatgttctcacaggagagcttgggattttatctgtgaatatccataggttgaaagttggtaagcaaaagaacatctgtaactaacctactctttttctgcaggtttgttgttgggataaaagtta

SEQ ID NO: 195339 - DNA, 167 bp, Homo sapiens
ggaagatgagaaggaaagagcatcctgggcagaaggcacagcatgagccaaggcccagtggtgtttcaggacagttgaggaactgtaagcagtttagttggggggaatctgagagaggagacagagaagcgaggaggggtcccttcatggaggccttggggccacag

SEQ ID NO: 195340 - DNA, 287 bp, Homo sapiens
agtgaacacatgcatagctactactttatgcaggccttgttgtaagttctttacatatattcaatgtttttctcatagaaagacattcttaagactgtgaagagagaagaaaagcaggaaacagaattaaggtatttaaggtacttagtccagggcctggcacatagtaggcactcattattgttgttgccaacaaaaggtctcaagagaacattcagtccccttcctccccctagataacgaccctccatattctgaagcattcactgaatcttgctccactatcg

SEQ ID NO: 195341 - DNA, 371 bp, Homo sapiens
caatgaagcttctgagaatgcttctgtctagagtttatatgaagacaatcccgtttccaacgaaatcctcaaagctatccaaatatcctcttgcagatattacaaaaagagtgtttcaaaactgctctatcaaaagaaagcttcaacactgttagttgagggcgcacatcacaaataagattctgagaatgcttctgtctagttttcaggggaagatatttcctttttcaccataggcctgaaagcgctccaaatgtccacatccagatactacaaaaagagtgtttgaaacctgctctatgaaagggaatgttcaactctgtgacttgaatgtcgacgcggccgcgaatttagtagtagtaggcggccgc

SEQ ID NO: 195342 - DNA, 280 bp, Homo sapiens
ccgtctctaccaaaaacacaaaaagttagctgggcatggtagcgcacacctgcagtcttagctacttggaaggctgaagcaggagaaccgcttgaacctaggaggcagacgctatagtgagctgagattgcgccacttcactccagcctgggtgacagagaaagattccatctcaaaaaataaataaataaacaaaaaataaagaaagtataaataaaactaacccatgataagagcactacaggaacactggcctgagcagcagtcagcagacggccag

SEQ ID NO: 195343 - DNA, 305 bp, Homo sapiens
ttattttttgtagatatgtggtctccctatgttgccctgactgatctcaaacccctgagttcaagtgatcctcctgcctcagtctcccaaagtgctgggattataggcgtgagtcactgtgcctggcctgtcatctggatcttgactcagcttttcctctgtatgaaggcttccagcagcatcagggaggttgtatacacaacccccctgcccaaacacacacacacacacacacacacacacacacacacacacacacacacatgcttagaacgtgaatgatggagccagactgcctgagacca

SEQ ID NO: 195344 - DNA, 251 bp, Homo sapiens
gatgctggtgccatgtttcttgtacagcctgcaggattgtgagccaaaataatctctttataaagtacccagcctcagaattgtttttatttttataacagcacagatggactaagacatctcctttgagtgtgctcagaggtatgttcaaatctctcaagatcaaaacactcaagtcacatagtggcagggcgtctcttccatttctgctaatagtgatgtctcccctggaaaaagcagcttgcttcatg

SEQ ID NO: 195345 - DNA, 686 bp, Homo sapiens
tggagcattggtgttccctgatctgtgctccttttgcccacctggtttaatgctgttggtccctgactgtgattcatccttgagttctttctttgctgcatggtggctcagagatcagtttaagtcatttaaaaataaataaacatttcacactgaatgagtagttttgctctttgcataaagacaagtttcccaagacttcctgcttgatgtgtgatgagttccatttctagaatttttaggcgctctttcatattatagaaataacatctaatagctttgctaggaggtgattaatcttcctccctttctccctcctttcttctgtctttgtctctctgtcagtatttcatctactcagaaatgtttattgagcttctacttagtgccaggtactgatcacgacagagttggggaggcgctggtgccagtgcaggagaggcctgggggaagtatagtggcggatgtgaaagggttcactaacttgttgagagggtttgggaagcttttggagaggagatacatttcctctgagccttggagcatggacagatgattgggcaaatggaggataggcaagggtggttagaccaaggaaatggcgaggaggcaggaaagaacatggcaactattggggagcaccgcacacttacgacagctcaggtatggggtgtgtggtgagatat

SEQ ID NO: 195346 - DNA, 484 bp, Homo sapiens
tggagcattggtgttccctgatctgtgctccttttgcccacctggtttaatgctgttggtccctgactgtgattcatccttgagttctttctttgctgcatggtggctcagagatcagtttaagtcatttaaaaataaataaacatttcacactgaatgagtagttttgctctttgcataaagacaagtttcccaagacttcctgcttgatgtgtgatgagttccatttctagaatttttaggcgctctttcatattatagaaataacatctaatagctttgctaggaggtgattaatcttcctccctttctccctcctttcttctgtctttgtctctctgtcagtatttcatctactcagaaatgtttattgagcttctacttagtgccaggtactgatcacgacagagttggggagatgttatgcagaatccttagccgggaacgtggccgtttaccaggaagacagatctttgggcaattg

SEQ ID NO: 195347 - DNA, 314 bp, Homo sapiens
ataaaattggagcataggaagagatcagtaagactttaagtttttaaaaactttttagaaaaattcttactctgaggaatacacagatcctaacctgttggggttttcctgtcagaaagtagtgctgttcaaacagattgtgttttttcaaacttttgactgtgatccacaataagaaacattttcatttattttttagagactgggtcttgctctgttgcctaggctggagtacagtggtataatcagagctcactgcagccttgaactcctgggctcaagtgatcctcccactttggccttccaaagtgctg

SEQ ID NO: 195348 - DNA, 586 bp, Homo sapiens
tggaaccttggaacttcaaaccttttgagttttccttctttccagtgcttagctgatacaatcaacattgagttgttttctttgtccctttctgagatagaatctaattcttgcacttatgaatttgagaatctttaaaaatattttctcatttcataaacatgattagctcgagaatctatatgtttaggggctacatgcaccttgtcaaattgttcctttccattcttgatttccggaaaggtcactggaattcctgcaagtgtggctctgctgttctagattgacattgtcgaccctgaaggaagcgatgttgatgttcacagagacctgcagagtgacctctcctccaaatgcctcaaaataaatgatggcatgcctgagactacatttagtgccatttggctaccaggcttttctaaaaccttaaagttaatatttaaagtctctttttaattaccagtaggtaatagcttgttctaaattaatgctgattgactaaatacatgactgaatgattgattgggtcatcattgaatagtatggaaattttaatttgcttttatagatgaatgctcagtttgtg

SEQ ID NO: 195349 - DNA, 264 bp, Homo sapiens
tacagtgagccataatgcaccagtgcactccagcctgagagacagagtaatatctgtctggggaaaaaaaggtgttttcattggcttcgttttagatgctgctgcaaaattcaagttaaagctgtctctctcaagaaacttcatttaaaatgcattcctatgaaatttatatccttattttccgagtcagaaacaacaaatttcattttataacaaacataaataatcctcaaagtattcagaaatgcttttctgagccactgt

SEQ ID NO: 195350 - DNA, 264 bp, Homo sapiens
ctaaagtatacacttagaaaggattatgatacatttcacgttacatgtatatgactacaattcaaacttttaaaaataacttaatagagactgtgttagccgggtggatcacgaggtcaggagttggagattagcctgaccaacatggtgaaaccccgtttctactaaggcaagagaatcacttgaacccgggaggcggagcttgcagtgagtcaagattttgccactgccctccagcctgagagacagcgagactccatctca

SEQ ID NO: 195351 - DNA, 282 bp, Homo sapiens
cacagcacaggctgcgagggaaggaaaattcatcaagtctaaactatcttctctcttctggcacaaaagtaagtgacatcaacaggatgtggggtttcaggatgagccttgagtccgatgaaatgaattaaacctcacaactctttggaacaggaacctgttttcatgtgagttccccaacagcttttgggggagccttgaaacaaatggatttagcatctggagatttttggtaggtttgatttgcttctctaacatccggtacttttgcaaaaatctttg

SEQ ID NO: 195352 - DNA, 241 bp, Homo sapiens
gaatctgcaaagaatctgctgtgggtcagaccttatttctaaggtaaacattaaaaattctcccttactgggccgggcaaggtggctcacgcctgtaatcccagcactttgggaggccgagatgggtggatcacctgaggttaggagttcgagaccagcctgaccaatatggagaaaccccgtttctactaaaaatacaaaattagctcggcatggtggcgtatgcctgtaatcccagcta

SEQ ID NO: 195353 - DNA, 258 bp, Homo sapiens
aatctatcaagaaaatttgtataatcacagaattctataaacatgtttcggattcactaattcattcaacaaatatttattgagtacatactatctacccgaatgccaaatttctgctttagaaaaacatccttcaattattgtgcaaaaaaaggaaatgttaaagtgacttatggtctttctgctagaatcatacatttacagaagaaaaggaacagcatccaaattaaagaaatgtaaatttggatctgtccatcc

SEQ ID NO: 195354 - DNA, 193 bp, Homo sapiens
acagaaaagacaaatattcgaagtaatgatacttgatcattacacattctatgcgagtaaacatcacatataccccataaataggtagaagcattatgtatcaataaaaaaaggtaactaaaagaccagggataatcagacattgtgtgtgtgtgtgtgtgtgtgtgtgtgtgtgtgtgtgtgtgtgtaattt

SEQ ID NO: 195355 - DNA, 225 bp, Homo sapiens
gtagtgtaggaagcaggaaaaaatttgattaaataattttaataatctattttatgcaacctaatgtctttttaggcagataatactgaatcttccactatgcctatttttttttttttttttggtggggggaatatgaaattcctaaagttttcacggtattttctaataatggtcttcttggagttgttccaggaatatatgtgtttagctttaataaccccc

SEQ ID NO: 195356 - DNA, 204 bp, Homo sapiens
tgagacgaccttgtgttttctttagattttgccattcttgcgtagtttcttttctttcgtgaccaccaatgtaatttctttatagattattagatcatttactttcagccttcttttctgatgatttaaggcttaggtttccatctaaacataattttaactgcctgtcacagtcttgtttgtggcaaatgagggttgtttaga

SEQ ID NO: 195357 - DNA, 250 bp, Homo sapiens
acagtgcgtgatggtttcaatctgtaaacaagcatgctaatttctttttaatgggaaatggttttaaccttcctgttacaattctgtccaaaagatttatagaatcctgaaggtggaatgaaacataatggtcatttcatgcaagttctactctaacccaatagaggaattccttcaccatcttgtccaagagtaaccgtcaaaccagtcttctcacagacatctaaacatcatctaatgatccgttgac

SEQ ID NO: 195358 - DNA, 514 bp, Homo sapiens
tcatgatcttaggggaaaaacattaatgaaccctaatgttcattatagggttttgtttggtagatgccttttattaggtaagaagattcccttctattcctggcttgcttaattttttttttaacaatcaggaacgaatcttggattttgccaaatgttttttctgcctttaatgaaatgatctgatcattttaattgtttagtctgttaatacagtgaattacactgattgattttccagtgttaaagccactttgcagtcctaggagaaatcccactggttgtgatgtacagttgtcttcccttatccatgggggatgtgttccaagacccctagtgaatgcctgaaacctcagatagtaccaaaccctatatacactatgttttttcctgtacagacatacctatgataaagcctaatttataaattaggcacagtaagatattaacaataactaataataaaatagaacaattataacaatatactgtaataaaagttatatgaatgtgg

SEQ ID NO: 195359 - DNA, 262 bp, Homo sapiens
gtttgattacattccatttgattccattccattcaaatcaattacattgcattccattacatacgattccattctattcctgtccattccattcctttccattccatttgattctattccattagaatccattccatactattgcattccattcgattccattctattcgaataaattccattcgggaccattcctttcaagttcattctatttgagtccattgtcgacgcggccgcgaatttagtagtagtaggcggccgc

SEQ ID NO: 195360 - DNA, 169 bp, Homo sapiens
gatgagttaatgaaaaaagaaaatactgtttatttcataatactttattgttgtattttggaattaaggtggaattcaaagaatcccactccaaagttatttgtttgtatacttatagtatttgtgtgtactttacaatgctagggtagctttgcggcctttccaaaag

SEQ ID NO: 195361 - DNA, 200 bp, Homo sapiens
gtgaggaagccaaagagaggcctatgaaagcttatgacgcattttccaagtgcacaccccagcaacttcaaatgctttctgaagtaaggatggggatggatggttggataaatggatgggtgtatgggtgtgtgaatgggtgagtgggtgggtggatggatggacagatggatgaatggatgggtaggtggatgaacagg

SEQ ID NO: 195362 - DNA, 440 bp, Homo sapiens
gatacatgcacacttaccgtacgcttggcccagcaatcttactcctagatatgtacacaaaagaaatgaatacatatatctacacagacttgtacccagatattttgagagatttattcataatagccaaaaatggaaacaaccccaatatacatcaactggtgaaaggataaacagatagtgatatatatctgtttatatatcagatctctataaaagcaatataataatagaaagtagatcattggttgccaggagttaggagctaaggaaggtaactgaaaagagccactgtgcccaaccaatttaaagcacttatagcaacaaatattggtgaggatgtggagtaacagaaagctcatgcattgctagtaggaatacaaaataacatcttggcatttataaagatacatgcacacttaccgtacggtacggtgtcg

SEQ ID NO: 195363 - DNA, 245 bp, Homo sapiens
caccactcctataatcagtactgtattggaggttctaaccagggcaattaggtaagaaaaagaaataaagtgcatctagattggaaaggagaagtaaaactaactctatttgcagatgactgatgttgtacaaagaaacccctaagaaatccactaaaaactaggttgggcacggtggctcacgcctataatcccagcactttgggaggcggaggcaggtgaatcactgatctataggagtggtg

SEQ ID NO: 195364 - DNA, 383 bp, Homo sapiens
tcctcatctgtgtcagtattttccaaattctctataatcactatgaattatttgcaatctccctctacaaaaaaaaaaaaaaatatatatatatatatatatatatatatatatatgaactactttcacttaccatttatacaatttcagtgaaaaagtcttaacactaacaaagctttcaattatgtctgctccaggccttagaggcaggagactgtggtgtaaatgtgaggcagaacattctgaccaggaaaggctgatgagcctgatccagagactgcagagcccatgacttccattccataaatacgtcatcatcatcttgcttagcaagtgtggatttttacacacattctgctagttaatcttcctaataaccaagt

SEQ ID NO: 195365 - DNA, 245 bp, Homo sapiens
caataaacatttagatggatgactatggatgaatagatgggtggatcactggacaaggtagagcaggggttctcaaccttggtaccatggacattttaggccaaataattatttgttgttggggtaggggtgctgttctatgtgttaaatgggaggtttagcagcatctctggcctttacccactagatgccagtagcatcccccaaaccccctactgtccattatgacagccaaaaatatctct

SEQ ID NO: 195366 - DNA, 286 bp, Homo sapiens
cagaaaagagatgctcaggatacaatcgatgcgcttcgagagtgactggaggtggggcactgtagaataagtgacatggagagatctagattgacctctgggcctacagctcaggaaaatgggtgggaggtggcattcagagagaccaggagcactccttatctttcagagcccaacacataatcaccaacagctgacttatgaataagatcttggggtccttgaaacaccgaaacactggaatttttagaattttacattcttactgcccaagaaaaccccttgc

SEQ ID NO: 195367 - DNA, 758 bp, Homo sapiens
aaatcactgtgacccttggaggctggtatcttgtatcaatatgattatgactatgctgagcattcatcactgttgactgaagttttatgcttctgttagcctggattgagctatattgggatatacagtgtggatatgttcagcagagttagtcagataatgttgagagattctttttggcttctcgtgaactgggtactccatgcttcatttctctctgccacaactggggaatgaaagtgggaagagaaatgggctgggatgctgtgtatttgtaggggatcagcaaatcatcaaagaatttctccttttcctcagaccttagaatctaggctgtgagcctcaaaaggaatggggcatgaagccactggcaacattaacttcatgcttttcccccatttgaatcagatttttggaaggtagagattttgcaagattgtgaccaaaaagccatttcatttttcaataataccatttgtagtttacatatatataccattggtagtgtgtatatataaatatatatatatatatatatatctctttacaaatacatctgcctgatagactttgtgtgcagtcttctgtcctggactgccagggaaagtacgagagtgtggaacccacacagatctgtcccaaaaaatgactatatattataattttgcatgagtttcctgaaaaatctgttcacaaaggaagaacctagagggtaaaaaccacttgaaattctgttatgaggtgttcatacgatcaag

SEQ ID NO: 195368 - DNA, 424 bp, Homo sapiens
atggtatccagtgtctagcagcagccagtgccagtatggtcagacagatgagaggacaatattgcggcattcaggttaaggcaactcaagagacaaatggagactttttagggtgggtttatgggcaggattccagtaccagaatgaaggtagatgtattacagcaggaacatgtcagacggggtaggatcttggggtgatcaggtacaggttacaattgagtactgagcacaagttggctctgtgggaataggacataagccttttcttgtctccctccaacccctaactaagggggttgctaagttcacaaggcgtgctaggttttctacagacatcaaaaatggtcattgagaactgggacagcctgagtatgtaggtttgtcaaggtgatcacagttgtggtgatgctcaaagatctttg

SEQ ID NO: 195369 - DNA, 472 bp, Homo sapiens
atggagtcatagttttgatggagagaacagagaaacaagtgttaacatctttctactataggtttttttcatttttaggctattttacttgtcaaaggcccctgagaacctgtagctaaggaactcttagctttccagtgataataacaataataacaacattctgtacttactttgtgccagaaatgctccaagtactttacatgtgttaataatgctcacagcaatcctaagaggcaggtgctgttattatccccattttacacatgaggaaactgagatacaaaagttaaataattgtcacacagctagtgatagaactgggattcaaacctggggagtccggcttcagagtttgtggtcctgcagagacaaaacagccgcttttccagtattttcccagtatggtcagagaagacctgggtgcttgccaagatcctttgacctttaggaatatttccctacagcctta

SEQ ID NO: 195370 - DNA, 693 bp, Homo sapiens
ttctgagattacaggtgtgagccactgcgcctggtgccaaataaaagccaaaacacatctaatactaaacattgaaataaacgtgagctgtgcatacgtttaagaaaagttgaaaagctatatagttctttacccagttacttaagaagagttgaaaagctatctagttatttacccagttatttcagttcagagtctcaggaaactagaacctgtctagccagctcaaggccaaggtgggaaccgatcttggccaggagaccatcccattgcaggacatgctcacacctgtaatctcagaactttgggaggctgagagaggctcctcagcctccgaagaggtgaggccctcctgagagccacactctaacttgatgaagtagttggtccccgcgaccacctgggtcttgaatgagacgggcttaaacacagggacctgcttgttacctttctcttcaagctgggacctcagctagacagaagggacagaatgaggatgtctcagtggcttcttggattccctcctgctagagtaattgcacgcatgtgagcacgcacacgattctgacactggttcttcacacaattgtctcttacaactgaagggacatttaaactgtcagcctaatagtaaagtagacaaaaacagttccagctgagtacggtggctcaaggatgtaatcccagaacttt

SEQ ID NO: 195371 - DNA, 331 bp, Homo sapiens
ttctgagattacaggtgtgagccactgcgcctggtgccaaataaaagccaaaacacatctaatactaaacattgaaataaacgtgagctgtgcatacgtttaagaaaagttgaaaagctatatagttctttacccagttacttaagaagagttgaaaagctatctagttatttacccagttatttcagttcagagtctcaggaaactagaacctgtctagccagctcaaggccaaggtgggaaccgatcttggccaggagaccatcccattgcaggacatgctcacacccacattcactcagatcggaaccattcagacttgcaagtttac

SEQ ID NO: 195372 - DNA, 370 bp, Homo sapiens
tcctgccagccagccacactcactagatattttgagaggagcccgggacaaggggttaagtggactgtgtccttccagcccagcctgcctcttgaattccctctgagaaggtttggccaacagtctacttttccaaaacagagaccagaaacacccctcacactttcttcagagagggtgtaagcatctccagggatcagatggctcacttctacagacctaagatgataaatgctccagggactcaccagcagtagccagagcagcccctttaccttccaggaatggggaggagggcttcccagcagcactaaggtttgctttcggattcaaagcaccagcttccccggcagagacctgggtatagaga

SEQ ID NO: 195373 - DNA, 325 bp, Homo sapiens
gtgcacttacagaaagtgtttaaataaaagtgatagttattcaaagagatttccactttgaaaatagtcttcaaagccagtgtcatttacacagacacatttggaattttcccttttcatgattatgctcaagatgtatcattttaaactgaaatttgacacactttctatatggtgatatgtggttggggctgccaactaggcttagaaggtgaattacacatagctcgtattctctagtattctccttcctgctaccaaatgttagtttgtagctgcagactgcattcattgttttgagtagaaagaaactcccatccctaat

SEQ ID NO: 195374 - DNA, 461 bp, Homo sapiens
tgagaccagaagcatgaggaggaagtgttggccaaataaagatagaaaaaagcacaagggcgcacaggtgcccaagaagatgaagtgacccaggaactgaagggggtccgtggctgatgggtagtgagaaagggtagagcagtggagtgtgagagtaagcagtggtcagctggggtcagtggcctagatttcattctgaatgcagcgggaagcctgacatgacccttgtacctccttcaggccatggaaaatgtttctaagctcctacttaaagcttttcaagcatcagagaatcctcttaacccagagagggatatgatgttgacagagcaggtttactccaaaagtcggcttgaggtcaagtcatttaatcttcttactctatatgggatttggaacagaaagggaagaagcagagtcctcccatccatctgggaattcacccagcctgcttcctgtag

SEQ ID NO: 195375 - DNA, 442 bp, Homo sapiens
cagccaagagtgagaggtctggggtatgagagccagggcagccttctgtttggggaacacccagagacgactgggaagtcccagtctgcacacagttgaaggggaagtggaagagggatgtgttgacttctcaagtttcgaataggtgaggacggtatggctgacagttggagggttcagagcaccagaacacactcaggactctgaaaggcaggccccgggagataacttcagagggtgactagcagcagccagcccatgggcctgagaccaccactattcccaatccctggtttcccccaaagcagtctgagcagaaaaaagacctgagtccgccccagactagcctgggtcagccccaccatttgtgaggtccaaaatcctgtgtttgggggacatgtgtggtgagtctccagcacgaaggtggaagggagggagcaca

SEQ ID NO: 195376 - DNA, 170 bp, Homo sapiens
agaatttgcttgctggatctctcttctcccatctctcctcctccttccttccagcacctcctgcaacctgggcctcctcccccatccccttcttggacagcagctagagccacctgggaagcttcaagaatggctgatggttatcgcagccaggacagggcgagctgctg

SEQ ID NO: 195377 - DNA, 389 bp, Homo sapiens
cccaccccaactgtgaaatcttatcagatgaactgctatcaaattgagtatcccctatcatacccatgtactgtttgtgtttatggctaaagcagaattttataactgctgttaattgatcttgttttcatctcaatgttccagatcttttctcttgattctgtcatccttctagaattgaaggtagagacaaagacagaacccctatggccctccattagagtctccctcaagaatgtttccaaagcaccgactttgttactgtttttccattagttacaaatccatttaattttcattttaaccagttcacattttaatatctcatctgaaatcaagttatactatgtctatatcatgcccaaaccagtgtttgctaaccataaaaa

SEQ ID NO: 195378 - DNA, 169 bp, Homo sapiens
ccccgggtcatactttttgtcttggtaaatcagaatggaccacacattttctcagcctcgaatattttagcacccttttcaaccataaaattatctttattaggtgcatttgcccaggattgatagggttggcaaaaagtagattttcacagctttcccccacattctg

SEQ ID NO: 195379 - DNA, 420 bp, Homo sapiens
ttactaatattagaatgctatcacccaaaacttcacaggagtataaatggtacaattagatgcttttgtgtaatgggtagtcaacttagggaattaatactcagttgaaaatgtgaagaattctggaaaggtctaaatataaatatgaaagactgatccatgatgtcacggtaaggcctagatttcaggtgttgacaacatgagggacaactgtcacccacttcactcctttcaaactcccactgcactctgaaagaaactctcacactcacacacgcatgcaataccatttgggtctgactcagtataaccttgctttttttttcttttaacataggaacactataatatataggagatgcctcaaagggagaggctacataaatgtaagatattatatatgtattgaggtgataacaa

SEQ ID NO: 195380 - DNA, 269 bp, Homo sapiens
tttttacttctatgcaatgcaatactgaatgtttataactttaaaaaaagatgtgtaaataaatagtgtattttggaagatttatgtcaaatgtgatttaaggagataattggaggcacttgtcaactttctggaaatttaactcacataaagcatgacaatctctgtttaagagtaaattaagaattattgattttattggggaagcagccaagatggccgaataggaacagctctggtctacagctcccagcgtgagcgacgcagaa

SEQ ID NO: 195381 - DNA, 557 bp, Homo sapiens
tcttttcccgttcatttcaagctttgcctgctccccacccacaacaaagatggttcagatggttcagtagaaactggttatgtggaatgtaaggtaagatcatgctttctcattaggagtcataatcactttcctcattcatattaatatattcatatataataccaaaatcaccaccaagaaaagaaaattagagtaaggtaactttcaatatttggaaaataatacatgtgcaagacttctggtgatagctatatgattttgaagagaaagtaaaattttttataaatcaaaaagtataaaccattaatattacaaataggagggaaattgcaaagcttagcgaaaggcactggatagattgtggcatacaaaagggggtccacgttggatgcagtggcacaagcctgtagtcctagctgctaggaaagctgaggcaagaggatcacttgagtccaggagttccaggctattgtacccaatgatcgtgcctgtgaatagccactgtactccagcctgggcaacacagtgagacccccatgtctaaaaaaaaaaaa

SEQ ID NO: 195382 - DNA, 119 bp, Homo sapiens
gttattcaggacttaatgtgatgcatgactagatctgtcaataaactatcatgaaaccataagaacccctaacaggaggatccaacgtagcctttgttgatcttagtttcttacaattc

SEQ ID NO: 195383 - DNA, 220 bp, Homo sapiens
agtatgggttggcactgtgccaagtgttagataaacaatggtgagccagacaggcagagattagagtttatttcagtatagtggtttgtgctaagttaggataagtacaaagattcagagaagcacccagaaaatttggggagggatagggaagacttgctagattagctagattagggaagattagctagatggatggggtgggaagaatgttccagac

SEQ ID NO: 195384 - DNA, 698 bp, Homo sapiens
atagtttgagcttactactagatattgatttcaattgtttatgcaaataatttgcatctttgtgactctttctttgcaaggtgacggaaatctattcagactgacttaaccaagagagggactttattgactgagtaactagtaagcctagaagtagttctacttttagacacagctagacacagggaggtaaattatgtcattaggactcactctctccccctttggctctgcttttctttgtacggtgtcgctatagcgacaccgtacggggggaatagagttattctgcagagattcaaagttcaaatgtgtgaaggggtctcttaaacttttactttcccctcctgttatttacttttcaattacagctctttattgcaaaaatgaaaacaaacttattacattgagcagctgttcatcagagcttgaactgtatactttctaactatagtgcttgtgtattgaatcatattgtgtaaatggatattatagtctgttagaaagagttgtttggtgtttttatcctcctccccagagactgaatcagtactagcttaagattcaaaagaagctggttctgaaaccttgaatctttggtgtgaacctcaaacatacctgttgaccaggaagctgagggagtctaggcaggtcagaccaaagtacggttacgtgtcgctatttgcagacacgtccct

SEQ ID NO: 195385 - DNA, 720 bp, Homo sapiens
catgagtttgagaggattttattttatttgaaccagcaaggtcatagactacctttgggaagacctatcatcaaccaagatcgtttgaaaaacaatatatacctttttttaagttgtacatttatgtgcattgtaaatattccttcctgatggtgtggttaagagtacattacatcaattttatgtatatatagatctgtgacaaattactctcaatctaacaaacatttacagagttcccattttatacaaggcattgagacatatactagatagaagatatacgaaataataaaatacagttttttttcctgaatatgtttacagtctaaaaggagaaacaagaaaaaataaaactataatagaaaagagcaaactaaaatctggcatggaagttgtttacacagttatgatggtgcagaggaaaaactgatcgcatcttgtttagaaaaatcagaaatatttcacaaagaatgtatctagaacacatgtcaaatacacagcactggggcaagaaaaatggaagagcacactccaggttgtgacaacatcaggatacaaactgcaccatgcaagtatttggtggggcatgttcataaatagcaatgagtttggcaactatttagagcaatagaggaaaaggatattaaaagaaaaattgggcatttttgtggctgactttgaacgtcagaaaaaagtctacagtcaattttattgctg

SEQ ID NO: 195386 - DNA, 400 bp, Homo sapiens
tgaccatggaactgatttcttaattttttatgtgtttaattaaagtttaaaatgaaattgccgcatgtggcaagtggttgtcatactggacagcacagggccactaagtcagtgtctgagtacctgcacagcctagcatggctccacaccgaccttctctagcctcgccctcacactgcacttgtcatgttcatgaaccccggtaggtggtgaagtcctcaaaggtaacatttccccttggttcagtccacatcagagacgagtctcaggcactgcttgatgtgatgtgtaggctggttcattcaaccctcgctgttgtaagactaacaggacagcgggagcatgcccatgtcatgcgtatgttatggtcaagaggtcacacaactgactgatggtccag

SEQ ID NO: 195387 - DNA, 295 bp, Homo sapiens
tgccagctctgacattctgagttcagagttcttagaaggctttatgagcaaaggccgattcaaaactgccgtttccttacaccaacccatcatgtgatgacaggtggcctttttgcttgtgctttcaaatatgtctagaagaaaacacccacttataaaaattaacctttaccactctaaaaggcattcacaattttaaagttttttctcctttggatagagaaaaagtatggttcagtacctgcattttatttcgaagaagttcagagtatgagtcatctgcagtgaatgagaa

SEQ ID NO: 195388 - DNA, 669 bp, Homo sapiens
gaggctggggtaggactggaatcctggggctgatggagaggagagtggggccgaggagagagtggacagctgggtcacagaaccatgcagcctcacagctagaaagagcattcccagttgtagttcagcaccatcatttcttttcttttgttttcttttctttttttaattatgatgggcaagctttattttgtatgaacttgatttcacaaaattagaatggcaattccacttaaaattaactgtttaaaaagtgtaaatgtcacggtatagatctgttatccaaaactccaaaaggcagtgaaattggtaacagatattcctcctcatctttcgacccatacaacagcagaattgatgaaactggttcccaggcaagtatgtgccacttgctcccgtgcctcagggaggagaggatgttatgacacaggcgtttttgttgcagtgacttgtggataattgctccttattaacactgctaaaattatgttcacatgttttactttgtgtgggagccgatgactcttgtcctttcgttttttgagtattatctttcaaatgagcgttggcctcaaacccgctcattccaaaatgcatcacagatgggaatttaagcctcttcacaaagcaaaccactggaaattcataggtagtatgcaacattggtct

SEQ ID NO: 195389 - DNA, 428 bp, Homo sapiens
ataccccagttaaaatgtacattctgtaccccagagggggagaaagccccacaagtagagagaaatgctttcttccctttattgttaacacattagcctggatagatttagccactcttcagtctgaaagtcacaaagccttcaagaaggtgagacacaggatgggtgtattcaccagtccagggacctgcctgggactatggcctgatcaaagatggggcagtgacaggacagagcgaggacctggggccagaagcatccctagaaggggcaggagagtcatttgctgtctcagatatcttgccaaggatcagccatgtccagtctcatttcccctgggcacaggatccacttgctctcttccagaaactccctggggcctctggcccctctctggacttctccagagaccatagacactaattggg

SEQ ID NO: 195390 - DNA, 363 bp, Homo sapiens
gtttagctaaatggaggtacaaatggataggtatagaaataattatagataggtgtggatacatgtgttagtatacatatttttttctagctctgtgctgagtgggagtagaagcagtgacacccagtagatagggatatgccccacattcagattttgtttttaatgccattctccaactaaaggagccagatattcctggagaaatggctgcttctaggatgaaacaatatacaaaaatgagcctggaacatcttgtcccttaaagtaaggaggtgcctaaaagaagcccataacgatggggataaagggacacaggagccaacctgaaagagttcccaatggccaaagctggaacagttt

SEQ ID NO: 195391 - DNA, 605 bp, Homo sapiens
caaggcttttcccaatgactttgagggatggaacctgaaggaagcgggaggaggcaaatagggaggaaagtgaaatgatttataaatgacttgctaattttgtccaaagggagtaatgataattagggcattcttcccacacgaagatgacacaattgacccaatatcattgaggctaacagtttgggctgtttttccagtagtatgacagtgacggtgtgtcaaccgcaggacctcacccacatttctttgggacctaggagtgtgggaaatagcagccagatttgaggtacaaatcatggtgtccagcctgcaaagcctttttgcagcaatctaagcctgactgctcctgttgtatgctcaaagtcattttaatctactttagcttattgtaaaatgttcaagaattgtattttgtcttgaaaaccatgaattttattgtttagggggagttattttttaaggagtgcaggatttcagttttggatgatgaaaaagttttgaagatgggtagtgacagtggtcacacaacattgtaaatgtacttaatgccattgtacacttacgtgactttaaagtaaacatgaaattttctacatttgttt

SEQ ID NO: 195392 - DNA, 133 bp, Homo sapiens
atgacactatcaactgatatctgaattcctgccctgttccattatgcatactgatcaagagacagactcacatatatatacaatccaccacactgtaagtccaggggaaaaggcaaggaacgcaataaactcc

SEQ ID NO: 195393 - DNA, 100 bp, Homo sapiens
ggagcgccacgcacagactcacagaggagctcagtgacgctgggcccttccttcccccactcatcgagttctgcaacaccgaaaatcccgttcactcaaa

SEQ ID NO: 195394 - DNA, 343 bp, Homo sapiens
gcgtcgactaaattagtatgctgaacttaataaataattggaaaatgtggagaaatttatgtatgtatttatttttaattgggcagcccccaaaccaaaataggttcagagaggctccatcattttttaaataagctataattttcagcctggggaacatagggcgaccctgtctctacaaaaactttaaaacttagccaggcatggtgctatgcacctatagtcccagctactcaggaggctgagatgggaggattgcttgagcacaagagttccaggctgcagtgaactgtgattgtgccactgcactccagccaggggcacacagcaagaccctgtctca

SEQ ID NO: 195395 - DNA, 107 bp, Homo sapiens
gcccaagttatatttttaaaatgttttattatatatataatgacataagctactgctgactaaaggatattactacataaaccccctcctgggcttgctttaaagaa

SEQ ID NO: 195396 - DNA, 543 bp, Homo sapiens
ccctaatgagtaataggttctacctgagacaagggctctccagagcgtcaacactggagtggagttctctagccttttagagagggcacaggacacgtacaagtgaagacatatggcagaaagagcacgtaatgctcaggaactggcaagaatttggtgggaggtaaatttatgtgaaaatggaacctctcaaagttaatatatattttggatgcctaggagagcttcaccatggtaatctgagagagcatcacttcccaaaacaatgctttacccctcaggaaaaatgcttgttcataaataaaacaatgctatgctcatttataataggagtctctccatttccagaagtccaccatttcccattcagatttcaaatgcagaatctttgacctgtgactctgcaaaaactagcatcaaagtagagtacaggggaatcatccgtttgcaattattaacttattttcctcttatttacaccacctggtatcacatttactttttcttttacttttttttttttttttgaggcaggtcttactg

SEQ ID NO: 195397 - DNA, 642 bp, Homo sapiens
tcatagagacaggatcttgctatgttgcctgggcttttctccaactctaagcctcaagtgatcctcttgcctcagcttcccaaagtgctgggattacaggcatgagccactgcacctcgcttaggctatttttttaaagagcagtttaaggttataggaaaatggagaggagggtacagagatttcccatatgtgcatgtcttcctccattatcagcaactccctgccagagtggtggatttgttatagttgatgaatttatgctgacacatcatcacctagagttcatagcttacattagggttaattcatagaatgttgtatattctgtgagtttaggcaaatttacaatgatctaccattaaaatatcatacagagtagtttcactaccctaaaaaatctatgccccacctattcatcccctccttccccgtaatctcaggcaaccattgatcattttattgtccccatagttttgcttttttttttggacatgtcatatagttggaaccataaagtatgtagccttttcagactagcttcttttgcttagtaatatgcatttaagtttcctccctgtctttttatgacttgatagcgtatttctttacagtgctgaatgggattccataaggggcaca

SEQ ID NO: 195398 - DNA, 873 bp, Homo sapiens
tccgaccctttctctgcttttctggtgggcaagaaacccccaccccttctccatgtctctactcttttctctgggcttgcctccttcactatgggcaagcttccaccttccattcctccttcttcttccttagcctgtattcttaagaacttaaaacctcttcaattctcacctgacctaaaatctaagcatctcattttcttctgcaatgccgcttgaccccaatacaaactggacagtagttccaaatagccagaaaacggcactttcaatttttccatcctataagatctaaataattcttgtcgtaaaatgggcaaatggtctgaggtgcctgacgtccaggcattcttttacacatcagtcccttcctagtctctgtgcccagtgcaactcgtcccaaatctcccgcctgtcccctcagtcccaaccccaagcgtcgctgagtctttctaatcttccttttctacagacccatctgacctctcccctccttgccaggccaagctaggtcccaattcttcctcagcctccgctcctccaccctgtaatctttttattgcctcccctcctcacacctggtccggcttacagtttcgttccgtgactagcccttccccacctgcctagcaatttactcttaaaaaggtggctggagctaaaggcatagtcaaggttaatgctcctttttctttatcccaaatcagatagcgtttaggctctttttcatcaagtataaaaatccagcccagttcatggctcgtttgacagcaaccctgagacgctttatagccctagaccctaaaaggtcaaaaggccatcttattctcaatatacattttattacccaatctgctcccgacattaaataaa

SEQ ID NO: 195399 - DNA, 545 bp, Homo sapiens
atacaaaacaaagtatatttggaggaataagactgtttgtctttcattctattctctccctcctatgtcgctattaaaaatttttaatttatactcccagtttaaaaatttatatttgtacctcgctatttcttttcacaattgaacaatgagataatagacatacttgcttgttcttaactttagcaggaaagcctctagtgttccaccattgagatcttcctttaaaatcctttttgtaaaatttgggctgtgctatccattctatctgatgttccacagcacttcctggaaagataaaatgaacaatgtggaaactcataatgaaaagtggtacacaaacgtgcctgttgactgagcatcaatcaattccaggaaagcttcaagattcctgaacctttttgaagcagtttggagaattaaaaaaaaaaaaaaaaaaagagtaagaaaggattcctgaacccacttccacttacattctacacaaaaaatgaaaggagacttgcagaattgaggggacctgccccaagtaacctaaggagcag

SEQ ID NO: 195400 - DNA, 419 bp, Homo sapiens
agtgatctgcctgcctcagcctcccaaagtgttgggattacaggcatgagccaccgtgccgacctccttgctgctttcttttgcctttggagaaagaaaaaatgactctcctcctctcatccctggcagtgctgttggaaagcagtgtgttatttaatgagttttatgtagttaattgctttgcctaggttgctaagtgagaatacccacacggtggtgttacacttacactcctgctgggcaccttaccccttgcccagttgtattcgaaacaaggatcactgcctgcagactggggtccacacatatactccttgagagtgtgagcattcactcaagacagcagaaccactgtcctggctgtgtctaggctctggctaactttgaagtggctttgggagcctgaggaggacaaacag

SEQ ID NO: 195401 - DNA, 863 bp, Homo sapiens
tccccacagaggtgagcaacaagtgggcaaggaccatgacaggtgacatcccagcaccagcacaggtgccaggacaccggacgggggctccccctcagcagagtctcctcccttccaccaggccctaggaggcacctgctaatgaaatttgatcagtgccccaaccaccgccttggccagcctatgccgagcccttaccatggaccaggccctggggaagcatgtgacatcaaccaagaggtcacaggttttgcagagggggacacaggtcatttgcccacagcaccaaggaactaggtgatgaggcctggactccatcccgagcctgtggattccagagtgagctgctcagcctggacctgttgcctctcagccccagccctctgcaggccagaaaaaccacggagcacacccagaggtgctcagttgcttccacctgagaggcagggctgcacaggagcaagagtggaggccctgggtcaggcagatctagattcaaactcccgagaagggtggagggaagtgctccaagcagagcagagactgaaggcgggagagcctggtgcaccgcggacctgcagggggaaggcgtgagagctcggtgcactggggacctgcatggggaaggcgggagagctcggtgcactggggacctgcatggggaaggcgtgagagctcggtgcactggggacctgcatggggaaggcgggagagctcggtgcacctcggacctgcagagggaaggtgggagagcttggtgcaccgcagacctgcagggggaaggcgggagagcttggtgcaatgcagacctgcggggggaaggtgggagagcttggtgcactgcagacctgcggggggttcca

SEQ ID NO: 195402 - DNA, 362 bp, Homo sapiens
acaagatcctccaaaagttcatgagtaagagctgatgaactctttaatttcatggtgttcccctagagttttagcattttcacttgttggtttgttattcttccataatgagacaaataatgagatgattggactcagaatctggaatcagattgtgggagtttacattgtgctctgtttagctatttaattagatttcttaaactctaagccttagtatctcctcagtgtttgctacatcataataggcatttcaataataagaatttgagaaaaaattctacagaaaaattaagagaagcacagccacttactatttgtgcttccattcactggttttacttacttttttcctcaaacct

SEQ ID NO: 195403 - DNA, 270 bp, Homo sapiens
ttttccttttactacttcataggaggtgtgtgaatcatgtggaactcatctttcagactgaaatttccctgtgaccacacctcacaacagcagcacagccctcataaagctgtggggaaatcattatgatagtagacactgagccaactcaggagaatcaacctttctcctcccccatacccctcttccctgggcaaacacaccctcccccacacaactattttcctctttccctcactttctaatcggacgtctaagtgcacagtgaag

SEQ ID NO: 195404 - DNA, 193 bp, Homo sapiens
tgctgactcctacacagccttccctgattccctccgctgagtcatcttccctttcgcttggaacctagtgaaccagcaactgaaaggttggtctcacacaacaccctcctccaccccttccctaatgggggccaccagcccctatgttcagtcatttcatggaaacttccaggactgggcagctcatttcccc

SEQ ID NO: 195405 - DNA, 225 bp, Homo sapiens
atctcgtggcacacaagaccctagaagggagcaggccacagatcctcagggcttgatttggcatgccaaggaatttggccttcatattatatgcagagtagaaattacatagcattatacctgtgaacacaaacagaggttccattctccaggacacgaaggtatagaaatgctcaacattttgtcattgttgaatagggatggtatttttgatagcaaataaca

SEQ ID NO: 195406 - DNA, 371 bp, Homo sapiens
ccccacacctgtgtagatcagtccccaaagacttgagggaatctctaatggtctatgaggctttgtcgctttctctctctctctccccatgcagctcttgcttctccagcactctctcccacaaattctagctgtcttcatgtccttgaactctaaaccctgtctcctaaactcagtgagaccacggggctctgtttgggtactccatgtagcactctcttcactgtctccacgtagtaagctggggctctggtgaggctgaacttatttttcttttctcagagatcttagtcttgcattgcctgctgtctaatgtgtgaaaacagttgtttcatatattttgtttaatttactaattttgggtgtgtgtg

SEQ ID NO: 195407 - DNA, 612 bp, Homo sapiens
ttacattgcctttaccattgatgggaacctgggtaataaagaaaaaagaaaaaaattgcattccctaccacctcctccaaaacaatgtcaaatgttagttataatgataggcatcttagtatgctatcccaatttaatggaactgttgcagatatttaatggttaactgttggtttgagacctttaatgtgttgagtatattcacctatttcaattttttttctgtttaagttttttttttttaaatcagatatggctattatatttggttaaatgacatcttagcatcttttaagatgatcatatagttttcctccggcatgctacatattaattacagtagtgtatattcatagaattatattagtagatcttatatggattcacccttacattctggcagtgaacctctctggatcatattattttttcatgtacggttggactttatttatttagtttggagacagagtttcgctctgtgtggcccagggtggagtgcagtggcgcgatctcagctcaccacaacctccgcttcccaggttcaagcgattctcctgtctcagcctcctgagtggctgggattacaggcgcccgccactacgcctggcg

SEQ ID NO: 195408 - DNA, 522 bp, Homo sapiens
cacttccaggcagagccactgggtacacggagcaaacagaaagcagatggagtaagcacacactatacacagtacagcattcttgtattgctgtgtttggctatcctagtatagtttgtgtttaggcttcatcacaaaatagtaacatgcagggaaaaatcaatgaaccaacgtgattccatgttatattgatgccattcccttatttactaatttcacatgagctcaatcacatcgcagaaacacatcctttcacaaaataaactgtatacttggatctacttatttttttctatatgaatgtagcatgtcagttctgtgttaatgaacaactatgtcttaaattttgtattttagaaaatgtaatgagcaacttattcatatctgtgataccttgccttcccagggtggggcttcagttgctgcttttagattcaactaagcagtcaaacccacaggacctaatcaggccatattgaggatagattcccttagagacggatgttagaaggaacacacagc

SEQ ID NO: 195409 - DNA, 270 bp, Homo sapiens
tgccaggggctgggagagaggggcatgggagttagtgttcaatggatagagattcaacttgagatgagaaaaaggttctggcgatggatggtggtgatggcagcacgataatgtgaatgtacttaatgatgtccacttacttggttaaagtggtcagaggttttgtttttttgtttttgttttttttttgagacagagtcatgttctttcactcaggctggagtgaagctgcacgatctctgctcactgcaacctccgcctctcaggttc

SEQ ID NO: 195410 - DNA, 561 bp, Homo sapiens
tcatctccgattcccaatgtttccccacctcatggggctgctgggaggattaaatgcaaatggcagacatcaatgcttgtgagctcactgaccatcctccctggtcctctggtgtttcgataatgtcatgtactcacaggaatatgagatttctcccctactttttgctatctcataggtacaggaagccaatgtgagaaggggatcctgacaccaacagctgagatttttcttgaatttacactttacttttttttttcctaaagcattgtcacatatattcttaaagttaagactcacaaagaatctatgaaataggatttgaaatcttattttcattttgtagatgaggtgaactgaggctcagaaagcatgagtgatttattcacaaccctgtgacttgccaggcaggagcctgtttctctagagccacattcagctgttctctccagcatcacttgctatacctgccctcccagctcgctccacctcgctgacaccctaagtacaaccagcaccagggtactgctctgctgcaaaaccttcaatggctcacagctg

SEQ ID NO: 195411 - DNA, 622 bp, Homo sapiens
tcagttgcaacagcttgttcacatagatgaacttccaacacagtaactataggaataagaataaaagccgtgtttactttcatggagttaattaagaatcaatgagaacatggaagttaaaacctttgtaattaaaatgtaaagttccacgcaaagttttaaagtgagcattttccagaggtgcttttctaagttcttgaatgcccctcccttttctgaggaggctgcttcatgggctattggtgtctttggcagggggtgagtctagggttcctgttgtgggtcctttgttctcacgagggcagtgcccgttttccccgtctcctgcttgcccagaatgttcccgtgcaccgagactggcctgtttgacctgcaactgtgctgtttgagctgcagctgtgtagcctgcgctggcccgtctggctacactcaacaccgtttgctgatcagcacttgaagtgtatccatcatagctgagacactgaatattttatctgtttaatttttattaattaaaatgcaggtttaaaaacttgattccgttattaggaagcacttaagtatgtttagaatcacttggccatgtgagtctacttcgtcaactgtgtattttatgagtcta

SEQ ID NO: 195412 - DNA, 157 bp, Homo sapiens
gttttctcatggctcgtgggttcagggtttcttttattttttccatgcgtcacaaatactgtttaatgtgggtgggggacggcttccctctccttcccctggagacacatcatttggttaaaccgcacataaatttaacctctctccaaagaactat

SEQ ID NO: 195413 - DNA, 406 bp, Homo sapiens
ccccacacatctgacataatgcatgcggttccctcctgtccctcctgctagaaaccgtgccctatccttttgccacctagagacgcctctttgggttttcagcttagtcactacattttatcaaagcttttatgactttccatgctgatatgtaagtgcttttttcaccatctcattgtaatgtaaatttcaagtgtgtttttcctgtatatttaatgtggactatttatttatttattttgagacagggtctcactttgtccaagctcgaatggagtggtgtgatcatagctcactgcagcctcgacctcctgagctcaggaggctggggagggaggatcgcttgagcccaggagtttgaggctgcagcaagctatgggcaacagatcgagaccctgtctcttta

SEQ ID NO: 195414 - DNA, 1750 bp, Homo sapiens
cttcccgactggcggctggtgttcctggtgaagaacttccctgtggggcagcgggtccttgtggacagctcctttggacagcccactacacagggcgaggcccgcagggaggaggccacgcgccagggggagctgcccctcgtcaaggaggtgctgctggtggcgctgggcagccgccagagcaggccctacctgctggtgcatgtggaccaagagctgcttatctacgaggccttcccccacgactctcagctcggccaggcaatctcaaagtccgctttaagaaggtccctcacaacatcaacttccgtgagaagaagccaaagccatccaagaagaaagcagaaggtggcggcgcagaggagggggctggggcccggggccgcgtggcgcgtttccgctacttcgaggatatttatggctactcaggggtcttcatctgcggcccctcccctcactggctcttggtgaccggccgaggggctctgcggctacaccccatggccatcgacggcccggtcgactctttcgctccattccacaatgtcaactgtccccgcggcttcctgtacttcaacagacagggcgagctgaggatcagtgtcctgcctgcctacctgtcctatgatgccccatggcctgtcaggaagatcccgctgcgctgcacggcccactatgtggcttaccacgtggagtctaaggtgtatgctgtggccaccagcaccaacacgccgtgtgcccgcatcccacgcatgactggcgaggagaaggagtttgagaccatcgagagagatgagcggtacatccacccccagcaggaggccttctccatccagctcatctccccggtcagctgggaggctattcccaatgccaggatcgagctgcaggagtgggagcatgtgacctgcatgaagacagtgtctctgcgcagtgaggagaccgtgtcgggcctcaaaggctacgtggccgccgggacctgcctcatgcagggggaggaggtcacgtgccgagggcggatcttgatcatggatgtgattgaggtggtgcccgagcctggccagcccttgaccaagaacaagttcaaagtcctttacgagaaggagcagaaggggcccgtgaccgccctgtgccactgcaatggccacctggtgtcggccatcggccagaagattttcctgtggagcctgcgggccagcgagctgacgggcatggccttcatcgacacgcagctctacatacaccagatgatcagcgtcaagaacttcatcctggcagccgacgtcatgaagagcatttcgctgctgcgctaccaggaggaaagcaagacgctgagcctggtgtcgcgggatgccaagcccctggaggtgtacagcgtggacttcatggtggacaatgcccagctgggttttctggtgtctgaccgcgaccgcaacctcatggtgtacatgtacctgcccgaagccaaggagagtttcgggggcatgcgcctgctgcgtcgggcagacttccacgtgggtgcccacgtgaacacgttctggaggaccccgtgccggggggccactgaagggctcagcaaaaagtcggtcgtgtgggagaataagcacatcacgtggtttgccaccctggacggcggcatcgggctgctgctgcccatgcaggagaagacctaccggcgggtgctgatgctgcagaacgcgctgaccaccatgctgccacaaccacgctggtcctaacctttttgcctttc

SEQ ID NO: 195415 - DNA, 1339 bp, Homo sapiens
  misc_feature (1234)..(1234): n is a, c, g, or t
  misc_feature (1250)..(1251): n is a, c, g, or t
  misc_feature (1273)..(1273): n is a, c, g, or t
  misc_feature (1275)..(1275): n is a, c, g, or t
  misc_feature (1280)..(1280): n is a, c, g, or t
cccccgcccagaaatagccctgttcccctaaaccactgaaccccctccccagggcgagctgaggatcagtgtcctgcctgcctacctgtcctatgatgccccatggcctgtcaggaagatcccgctgcgctgcacggcccactatgtggcttaccacgtggagtctaaggtgtatgctgtggccaccagcaccaacacgccgtgtgcccgcatcccacgcatgactggcgaggagaaggagtttgagaccatcgagagagatgagcggtacatccacccccagcaggaggccttctccatccagctcatctccccggtcagctgggaggctattcccaatgccaggatcgagctgcaggagtgggagcatgtgacctgcatgaagacagtgtctctgcgcagtgaggagaccgtgtcgggcctcaaaggctacgtggccgccgggacctgcctcatgcagggggaggaggtcacgtgccgagggcggatcttgatcatggatgtgattgaggtggtgcccgagcctggccagcccttgaccaagaacaagttcaaagtcctttacgagaaggagcagaaggggcccgtgaccgccctgtgccactgcaatggccacctggtgtcggccatcggccagaagattttcctgtggagcctgcgggccagcgagctgacgggcatggccttcatcgacacgcagctctacatacaccagatgatcagcgtcaagaacttcatcctggcagccgacgtcatgaagagcatttcgctgctgcgctaccaggaggaaagcaagacgctgagcctggtgtcgcgggatgccaagcccctggaggtgtacagcgtggacttcatggtggacaatgcccagctgggttttctggtgtctgaccgcgaccgcaacctcatggtgtacatgtacctgcccgaagccaaggagagtttcgggggcatgcgcctgctgcgtcgggcagacttccacgtgggtgcccacgtgaacacgttctggaggaccccgtgccggggggccactgaagggctcagcaaaaagtcggtcgtgtgggagaataagcacatcacgtggtttgccaccctggacggcggcatcgggctgctgctgcccatgcaggagaagacctaccggcgggtgctgatgctgcagaacgcgctgaccaccatgctgccacaaccagccggctcaaccccgcgccttcggatgctgcacgtggacgcngacctcagaatgccgnngcagtgctggatgggagctgtnancggtnctgtactgacacatgagcgcagatacaaaaatggacaacaaattatctggaatgtgaag

SEQ ID NO: 195416 - DNA, 1871 bp, Homo sapiens
  misc_feature (1766)..(1766): n is a, c, g, or t
  misc_feature (1782)..(1783): n is a, c, g, or t
  misc_feature (1805)..(1805): n is a, c, g, or t
  misc_feature (1807)..(1807): n is a, c, g, or t
  misc_feature (1812)..(1812): n is a, c, g, or t
cttcccgactggcggctggtgttcctggtgaagaacttccctgtggggcagcgggtccttgtggacagctcctttggacagcccactacacagggcgaggcccgcagggaggaggccacgcgccagggggagctgcccctcgtcaaggaggtgctgctggtggcgctgggcagccgccagagcaggccctacctgctggtgcatgtggaccaagagctgcttatctacgaggccttcccccacgactctcagctcggccaggcaatctcaaagtccgctttaagaaggtccctcacaacatcaacttccgtgagaagaagccaaagccatccaagaagaaagcagaaggtggcggcgcagaggagggggctggggcccggggccgcgtggcgcgtttccgctacttcgaggatatttatggctactcaggggtcttcatctgcggcccctcccctcactggctcttggtgaccggccgaggggctctgcggctacaccccatggccatcgacggcccggtcgactctttcgctccattccacaatgtcaactgtccccgcggcttcctgtacttcaacagacagggcgagctgaggatcagtgtcctgcctgcctacctgtcctatgatgccccatggcctgtcaggaagatcccgctgcgctgcacggcccactatgtggcttaccacgtggagtctaaggtgtatgctgtggccaccagcaccaacacgccgtgtgcccgcatcccacgcatgactggcgaggagaaggagtttgagaccatcgagagagatgagcggtacatccacccccagcaggaggccttctccatccagctcatctccccggtcagctgggaggctattcccaatgccaggatcgagctgcaggagtgggagcatgtgacctgcatgaagacagtgtctctgcgcagtgaggagaccgtgtcgggcctcaaaggctacgtggccgccgggacctgcctcatgcagggggaggaggtcacgtgccgagggcggatcttgatcatggatgtgattgaggtggtgcccgagcctggccagcccttgaccaagaacaagttcaaagtcctttacgagaaggagcagaaggggcccgtgaccgccctgtgccactgcaatggccacctggtgtcggccatcggccagaagattttcctgtggagcctgcgggccagcgagctgacgggcatggccttcatcgacacgcagctctacatacaccagatgatcagcgtcaagaacttcatcctggcagccgacgtcatgaagagcatttcgctgctgcgctaccaggaggaaagcaagacgctgagcctggtgtcgcgggatgccaagcccctggaggtgtacagcgtggacttcatggtggacaatgcccagctgggttttctggtgtctgaccgcgaccgcaacctcatggtgtacatgtacctgcccgaagccaaggagagtttcgggggcatgcgcctgctgcgtcgggcagacttccacgtgggtgcccacgtgaacacgttctggaggaccccgtgccggggggccactgaagggctcagcaaaaagtcggtcgtgtgggagaataagcacatcacgtggtttgccaccctggacggcggcatcgggctgctgctgcccatgcaggagaagacctaccggcgggtgctgatgctgcagaacgcgctgaccaccatgctgccacaaccagccggctcaaccccgcgccttcggatgctgcacgtggacgcngacctcagaatgccgnngcagtgctggatgggagctgtnancggtnctgtactgacacatgagcgcagatacaaaaatggacaacaaattatctggaatgtgaag

SEQ ID NO: 195417 - DNA, 1506 bp, Homo sapiens
  misc_feature (1401)..(1401): n is a, c, g, or t
  misc_feature (1417)..(1418): n is a, c, g, or t
  misc_feature (1440)..(1440): n is a, c, g, or t
  misc_feature (1442)..(1442): n is a, c, g, or t
  misc_feature (1447)..(1447): n is a, c, g, or t
cctgcgcccgccgcttctcccgccctagcctctccgcacgcgcacctcatctatggctactcaggggtcttcatctgcggcccctcccctcactggctcttggtgaccggccgaggggctctgcggctacaccccatggccatcgacggcccggtcgactctttcgctccattccacaatgtcaactgtccccgcggcttcctgtacttcaacagacagggcgagctgaggatcagtgtcctgcctgcctacctgtcctatgatgccccatggcctgtcaggaagatcccgctgcgctgcacggcccactatgtggcttaccacgtggagtctaaggtgtatgctgtggccaccagcaccaacacgccgtgtgcccgcatcccacgcatgactggcgaggagaaggagtttgagaccatcgagagagatgagcggtacatccacccccagcaggaggccttctccatccagctcatctccccggtcagctgggaggctattcccaatgccaggatcgagctgcaggagtgggagcatgtgacctgcatgaagacagtgtctctgcgcagtgaggagaccgtgtcgggcctcaaaggctacgtggccgccgggacctgcctcatgcagggggaggaggtcacgtgccgagggcggatcttgatcatggatgtgattgaggtggtgcccgagcctggccagcccttgaccaagaacaagttcaaagtcctttacgagaaggagcagaaggggcccgtgaccgccctgtgccactgcaatggccacctggtgtcggccatcggccagaagattttcctgtggagcctgcgggccagcgagctgacgggcatggccttcatcgacacgcagctctacatacaccagatgatcagcgtcaagaacttcatcctggcagccgacgtcatgaagagcatttcgctgctgcgctaccaggaggaaagcaagacgctgagcctggtgtcgcgggatgccaagcccctggaggtgtacagcgtggacttcatggtggacaatgcccagctgggttttctggtgtctgaccgcgaccgcaacctcatggtgtacatgtacctgcccgaagccaaggagagtttcgggggcatgcgcctgctgcgtcgggcagacttccacgtgggtgcccacgtgaacacgttctggaggaccccgtgccggggggccactgaagggctcagcaaaaagtcggtcgtgtgggagaataagcacatcacgtggtttgccaccctggacggcggcatcgggctgctgctgcccatgcaggagaagacctaccggcgggtgctgatgctgcagaacgcgctgaccaccatgctgccacaaccagccggctcaaccccgcgccttcggatgctgcacgtggacgcngacctcagaatgccgnngcagtgctggatgggagctgtnancggtnctgtactgacacatgagcgcagatacaaaaatggacaacaaattatctggaatgtgaag

SEQ ID NO: 195418 - DNA, 432 bp, Homo sapiens
aagtgagacactcatacttgaagtcgaggacagtgtatcgaaagttgtaatcttttggagatatagacagaaattttacagaaaaaaatgatatggtatttgggatgacctcaaaatgatcggattagggtgggatatgtggtagtagcgaacagatgaaacaagagtagccatgaattagttagttgttggagttgggggatgggtacatgagtgtttgtggtacagccttcttttgtgttatgtttaaaatcttgtataataaaactttttttaaagtttgttgggcaacagataaagtagtttgaaccctcgaggcaagggaacgcttatacactgttgacagaaatgtaaatttgtacaacctctatggaatatgtggagacttctcagagaaccaacaacagaactaccatttgacccagcagtccc

SEQ ID NO: 195419 - DNA, 100 bp, Homo sapiens
gggatttgaaatattttaactctttggttcaaatacgtggctcgtgaaccgggaggttccatacagttacataacaagtaatctgtcaagtcaatagttg

SEQ ID NO: 195420 - DNA, 588 bp, Homo sapiens
ttctaactttttgataaaacttttttgagcatttttcaaaaatttgtatgtttgtggtaatggggaattaaacaccttttacagctgatgtatgttggaaatcattttatgtacatttaccaactggtacttatcttcaagttggaattttcacatccataaaagggagacttgcatcatatataattttcagtatactttgctgtccagccttttaaacaattacagtaacattttgagttctgtgatgaatagttctaggggaagggatggaactttcgacatgtaaagtccattgttttaaatgctaaccccatccccaatatttttgtggaacgtgaggctttatgaaaggtttatcagaaatagaatattctaaagtcacttttatggcttatttcaaaaactagtgtgaaagtattttcatgcttttttgtttctcatcttttagcaaagcttctttaccaagttttgattaaattgcaatataaaattaagttttttcacggtgctatattttgtggaatatgggtagcactcaggtttctttcttttttcttttctccttccttcttccttcattccttc

SEQ ID NO: 195421 - DNA, 527 bp, Homo sapiens
ttctaactttttgataaaacttttttgagcatttttcaaaaatttgtatgtttgtggtaatggggaattaaacaccttttacagctgatgtatgttggaaatcattttatgtacatttaccaactggtacttatcttcaagttggaattttcacatccataaaagggagacttgcatcatatataattttcagtatactttgctgtccagccttttaaacaattacagtaacattttgagttctgtgatgaatagttctaggggaagggatggaactttcgacatgtaaagtccattgttttaaatgctaaccccatccccaatatttttgtggaacgtgaggctttatgaaaggtttatcagaaatagaatattctaaagtcacttttatggcttatttcaaaaactagtgtgaaagtattttcatgcttttttgtttctcatcttttagcaaagcttctttaccaagttttgattaaattgcaatataaaattaatcaaaacgttctagatcgcgagcggccgct

SEQ ID NO: 195422 - DNA, 459 bp, Homo sapiens
cctatcgacggaagcatagtattagaagataaactatttttgtgtaggtgctgggtaggtttaaataatttttttgtagctgtttaacaagaaggtatatgcctctgtgtgtgtgtgtgtgtgtgtgtgtgtgtgtctgagagagaggggtgggggtggcagacagcgtgcttctaagccttcctgaagatcctcccttgcctcttgtctccttctcatataaaaaggggttggctggaggcaaaccttcccttttgttgccattgatctgacactaggatattttgtagtccagtgagtagaaatgtgtcccagctgtaagattctgattgtggatttttcttcagtaggttactgatctttctttatgcctaaattcacattcttctaagtggaggatttacatttatgatttcatctgggtttaaaatctggccggaagcatggttatgtgtttaa

SEQ ID NO: 195423 - DNA, 228 bp, Homo sapiens
aatatagaggttagggatgtgggagtacagggataggaagaaatattcagaatctgtgacacagaaaaggtaattttcttgcctttcacggtcatagaaggaaaatacatatatgggtccctcaggtattactttaaataaatagagaaagaaagaaattactagagtggccctggtttgagacctcagtgcttagaatcacggtactggtttttaaacaataaattg

SEQ ID NO: 195424 - DNA, 563 bp, Homo sapiens
cagccccctgagtagctgggattacaggtatgcaccaccacacccagctaatttttatatttttagtagagacggggtttcaccatgttggccaggcttgtctcgaactcctgacctcaggtgatccacccgccttggcctcccaaagtgctgggattacaggtgtgagccaatgcacccagaccaatgtattgtattcttgagaatcactgagagtagattttaagtgttctcaccacagaaaacactaagtatgtgaagtaatgcatgctaattagttcaatttagggattccacaatgtgtacatattccagaacattatgttgtacacaataaatatatacaatttttatttgtctattaacataacaaataagatgcgaatattggggagaatatcttcattgagtatcagctgagactaacgtagttgaggtagagattaggacgggatgcagaacatgtttttgggttctgtctggaaactctgaggagtggccttgcttaaaaaccagcattggtaggatggccctcaatggagtctttagggtcccggccttta

SEQ ID NO: 195425 - DNA, 466 bp, Homo sapiens
tgctgactaaagattcaggagaagcattgccaagatttgctgactaaatggtaatgagggatctcatatacataaggtgttatggtagcctttgttctcctgagcaaacaccatgccaacatgtaatcagctaaaaaaaatctgttcagacagttctacagaatctcatgatttttccattttcagtgaaactgtttttaaagtacatttaattccagtttaaagtcatcagtttaactttaatacatgctgatgttgggcagacaagattttaggagaacataatagaactccaggcacttgtctgacttaattctgccattttcacaaatttggaaaatctccatccttacagtgatggagaggcaggcaggatgccaaggaggcttgtcataccttaggtccttccagttattctgccacttgtttttcttcttcttcatcagtcagccagactgtgagagac

SEQ ID NO: 195426 - DNA, 205 bp, Homo sapiens
acagggtttcaccatgttgcccaggctggtctcaaactcctgaactgatgtgatctacccgccttccaaagtactgggattacaggcatgagccaccataataatttaattattatttaaataatttttaattttaaaaatttaaaaattattttaaaatttaaaaattcctttgcttatttatactcaatggacaacaaaatgt

SEQ ID NO: 195427 - DNA, 375 bp, Homo sapiens
ataaagggagtagagacttgggggataaccagaggcacaacaactgtcagcaaaaggaatccagtgaaattctggaacctacaaaccaagaatgggtgaccaagtttaaggacctgacctaattctaagctgtaggtacagattatcagtgggcttgtcttgggggaaatggggaaagtagatgaaaaagagatgaaggccaaaatggttatgtatagattatttgtcccttacgggcaggagacaggctttatgcctcatttctatcctccacaccagttagcaaaataaatatttactgattatgtaaaaaaagaaagatcacagagaatttggtattacccaatgatgggaagtatgccaagataaccttag

SEQ ID NO: 195428 - DNA, 587 bp, Homo sapiens
tatcaatcacatttaattaaaaagagcatcttgtcttcttcacattttaatacagcacctgatattaggatgctaagttactatgagaaggtcagaatacaatggatttagctcattgccaaatgcaggaacaaattcattaacaaatgaatttgagctaaattttcagagtaaatttatattttttaaaaactcatagtttgtcctcaaaacagtaacctgcagcaaaagttgtaacaattctgtaacacgtatatctaaatactcattacagtctctcccatatctctatttctagtttcatttactctttaggcagaaaataggttcaagggtctagtaaaggaggcaaatgggcagaaaacaacctcttgtttgctatcccactgcacttgaaatggacctctataattcactaccatttataagtgtctcgcatatcaacatcacattaggtaatttactgcctccaattcctggtccataactattccatcctgaaaagtcataatacaatgttattggaacaatctattcatattgtaaatgacatgttttctaactatttttttaagccactagggagg

SEQ ID NO: 195429 - DNA, 472 bp, Homo sapiens
ctcatctcttcgagagctaccatctccttccagacccacaaaggagttctacattttctgctccccccaacacatccaatcagttctaccaattgctccttcatgaaccatctgttttgcactggtcctctccctctgtggacccccaactagtcccctaatctaggcctcatcctctcatgcccagatattgcaatgactcttaactagttgcagggtttttttccccatatttttttctttctatgctctaaaatctatcactatattaagaagtttctctttaagctatccattctgtgtgtattccctgccaaaacttctggaaacacagctaatttcacatccctctcaattaatactaacagttgtgtttattgagcacttacagtgtacacttcacacaaataatctcctttggtcctttcaacaatcctgtgaggtaggttctattatccccatgttataggca

SEQ ID NO: 195430 - DNA, 319 bp, Homo sapiens
aacaaaaaaaccctctcattttaggtttagtttgtaactgaatagaacattttatatctaaacccttaatggaaaggctttcctatttcccacaattttcttttctatttaatgtattctctaaatttaacacattatttaaaatgccatccatatacctgatcaacttgaaaagatggagaaacaaagaagtaaagtttgttatcttttcacattttattctgtttccattttcataatcaaataaatgtagactgtaaaatacttatttacaaatctgtctgatttatataataaactctgaggaaactgaaatgag

SEQ ID NO: 195431 - DNA, 209 bp, Homo sapiens
acgattcaccggcagcattctgaaaccatgaaaagttaaggttaagaaaaaatctgcagcaataacgataaaggcattaagaccatgttaatgatgtgcagttattcattgttgagaagatgaaaatctaccatcaactggtctagaggaaaacaccaaggtcccctgtgatcagtcccccaggcctcccaactacatgcctcaaaagt

SEQ ID NO: 195432 - DNA, 846 bp, Homo sapiens
atgtgcaggtgagaggtacaagctaagacccagaagagaccaaggtcccccaaggaaaaagtcctcaggcaaggtgacatgtgagcagcctgagacgattttagtaggcagagtttttgatgagctggggagcatatgggaacacacagggttgatttctgcttcggtttttattcagattgtttcttctaacctagatagaataagcctcccctcctccaagactcagctcatccagcatggtggctcacatctgtaatcccagcactataggaggccgaggtgggaggatcgcttgagcccaggaatttgaggcgacacagcaaaaccccatctctactaaagattataaaaattggccgagtgtggtggcacacacctgtagtcccagcggctgaggtgggaggatcacttgaacctggaggcagaagttgcagtgagctgaaatcacaccactgcactccagcttgggcgacagagtgagaccctgtctcaaaaacaaagaatgtgagtacacaatcgttaagtgccccacctagttttagttctggctagagcatatgctctataaccctgttggactcttaaggcaaaggagaggtccaggcaatgactgcatccaggcaaggaagcaggcacggcagcttgggagccaggagtcaagccccgtggcgagggcatctgactgcaagccttagcacagcccaagcagggttatgtgctctctcaagaaacggaacaggaaggaggaggagacagggtctggtttagctttcaggcttcaagtgccacctgctggcaagaaggctccgtgcaagggctcattggcccagagccagagaaggg

SEQ ID NO: 195433 - DNA, 169 bp, Homo sapiens
acccttgtagctcagacagttatattgaattctaatatcttatatattgaaaattataatcatggtggttaatgttgtgacttatttaaataatattaatgattactgcattgagaaaattaccatgaaattacaaaagacctgccacccttctaacttaactgtcatt

SEQ ID NO: 195434 - DNA, 417 bp, Homo sapiens
caattggtaattttcttctacataaaaaaaaataagactagacaaaattgtaaaaaaaaattacttcagggcactaggaactgactaaaggcagacaaaaaaaatgagaagcatttacttttgaaaaactgctagagctttgggtaaaaataagaactctgtggtactcttgtctggggtttctcccctctttcttccaccaccagactactgggggaaacagtaggtttttcggcctggaattgactaccaagccttgcagctttactgccagaagcaatgaattcaatttggggaaggaagcaaaaacttatcgttttgctagctaaaatggcagacttagttgggactggatggagacaacccacagcactgaaagaccaagactgccattccaatttgggttgactgacagac

SEQ ID NO: 195435 - DNA, 618 bp, Homo sapiens
ttagatatgccagtggagtaatcatggcaggaataataaatgacttttctctttactgttcccacagtcattcgccctgtgtggctggctacctgtccttacaaggctgcttctgttgtgggcaaaatgccacagttggtgaagccactatgggatctgtggcctctaacacaagcactgtgggttatttacaaatgtgccctcctaatttctggttgtgggacttttgggagcaaattatccagtccatgaatccacaggccttaaagtgctagcacttcggatgctgtcagtgccaagatggcttagtttctgggactaacctgcttagttcaccttttaggtgctctcttagcagctggcttctctcaaataaagtgaagcaaattcaaacgcattccttctctgtgatgaattcagccagtgtgttttatgctgctttctttcctcttgagggaaatcagatagtgggcagtgccagtctctccctcttgtggaaaacaagcccctagttggcctggcagtaattgtgcctgggcagacaaaggctgtcacagtgactgtcctgttcttagacttctgggtgctctagagccatcagtggagcttataaagact

SEQ ID NO: 195436 - DNA, 457 bp, Homo sapiens
ctcccttattgcccaggctggaatgcagtagtatgatcatagcccactgtaaccttgaattcccatgctcaagcaatcctcccacctcagcctaccgagtagctgggaccacaggcacatgccacaatgattggctaacttatttttatttttctgtagagacagggtctcactatgttgcccaaggtggaaaggcaatattttttaaggtactatgtgctaggcactatgtaagcttaaatcttgctgagcttcatatcttagctacatctcttttgatccttacaacaatcctatgaagtgagtaatattaacatccctattgacagaatgaggctatgagaaactaagtcactccagttcacatggttagttactgacacagccagggttcgaaaccaggccaactgagttttaaccactactccaattagctttctctgggcttatcatgtct

SEQ ID NO: 195437 - DNA, 284 bp, Homo sapiens
ccttttcctgtgtcaccagtagcttatcagtgctcaactctctatcgttacaaggcctttcatcatctgaccaatcttatgcatttcccccaccataaatctaaagctgcacttgtactaatacgagcagttaactgaatgagccatactgtttcctgactcagagccttcacatatgttctctccactatttaggatgtcttaccttctcttgtcttgctggcaaagtctactgatttttaaagatacaacgtaagcacgtgtctgcttatatttttattttt

SEQ ID NO: 195438 - DNA, 420 bp, Homo sapiens
caatggctagggaaattaggaaaaataagtaaatctatacaacagataaaaatttaacagtaaattatacagatcagatttccttcctgaggctaccaaaaataccttttatcagcaattattccttggtccagcttaaaaaaatatatagcaaacaaagctaagactttgtgaaacctcatctaaaatgagacctgggtacagaaactttaatacattatttattagggatttacaagggaaaatcagagacccacaaataggaccaagaatctcaaatgagttccaaatatttcagcaataaagtaacgaattgcgtattaacagcactgtaattactccttttgtttggtttctttgtaattacttttaataaattattctgcctccccccatcactcaagtaagttgccatccaaa

SEQ ID NO: 195439 - DNA, 600 bp, Homo sapiens
acagtatgtacaatagagtcacattacagagttagcaaatgttaacgaaacagaacagaaatacgtattagatgctcttaatctaagaatcataaatcacctctttacgtgttccggatgatcaaatgaacaattttctaactctcttatattctctcagtgagcaatcattgtcacataccgtcgagcggcggaaagaaaagcagaagagcaggctggtctcgaactcctgacctcgtggtctgcccgcctctgcctcccaaagtgctaggattacaggcgtgagccaccgcacctggcctgtcactcatgttttaataatggttttaacttaattttataaaaaatattattgaaaaatgcaactcttttcctcttgggccgtaattctggacttcttgacagcctataaaaatcttagatctgacagatactacatacactagagaaagtactactaaatgctctgcaaattgccaaataatggtaagaatggaagattgtttagtcttccctaaaacagctccttggagtttgtgttccaatagcaaaataaaacttgggccacaaaatttgccaccatttagcaacaaattaatt

SEQ ID NO: 195440 - DNA, 472 bp, Homo sapiens
atagagcagtgaggaagcttttggtagcaaggcattgatgttggaagctattgatggatgaggttgatagtttagattaaggtggtgccatgagctggagagaagtggatggatatgaagagatactagaaagtggaatagtgagccagcaatagtgcaaaaagtgtaccctcccggtgttctttcttgccagctgaaattaattaacagtgtttaaacatttcttggtaaagttggcatttaaagcacttccagcccctttaatggagtcttcaaaggcatcctaggtagaggaaaataaaaagttttccctcttagaatttcttggggagaaaaaaccaggtgcagtgacccattcgtatagtcccagctacttggaaggctgtggtgggaggaccaccttgaggccttgagtttgggactagcctaggcaacataacaaggcactctctctatttaaagaatttctttg

SEQ ID NO: 195441 - DNA, 371 bp, Homo sapiens
tcgaagtcagctcagtttctgagtatacacagaattcaaataagaattgagatagttaagagatacctatattttaaaaattgaattaaatccattgagtgcctatggactgtatccttcagatcatgtagttaaaccgcctcattttagaagtgaggaaattaagtttcagagaagttaaatgacttttctaagatcacccactaccttacgtggtataagaactaggactgaattgtagatctcatccacatctagtccttttttctctacacactgcttcctgtcaatcaggtgatctgaagccggtgacctagattagacaagcggggtgggacctggggttggcttcagttaactaggaggacaga

SEQ ID NO: 195442 - DNA, 412 bp, Homo sapiens
tcggtactgatgatggaaaatggagtcatttttatttaattaccttgaagagattgaactcaggatgtttaaatatggtgaagggatgctttagtagctttcttgcagtatttcttaggttaaatgtagctggccgggtgcggtggctcacacctgtaatcccggcactttgggaaactgaggtggtcggatcacctgagcgcaggagtttgagaccagcgtggccagcatggtgaaacacatctctactaaaaatacaaaaattagttggccgtgatggcgagtgcctgtaatcccagctactcgggaggctgaggcaagagaattgcttgaacccaggaggtggaggttggagtgagccgagatcgcgccactgcactccagcttggcaacagagtgagaatttgtctca

SEQ ID NO: 195443 - DNA, 110 bp, Homo sapiens
ggtaggtaggctagaacctagaggaggggagcagagcgtgctggggtcttttatcgctctccgcgcagtgcgtgggtctgcggatccgtggaggtgcggagcctgactcg

SEQ ID NO: 195444 - DNA, 704 bp, Homo sapiens
aggaccaggcgaagggttctatagagaaggggcagttcactgacagtttctgagtagaggatgataccatcagatgtgtatctttagaaaattaagggcagcaaaaaaaatgtataggtgaaaaatgcactgggggcgggagacaagcttggtgccgggggtctaaattagagcaatggaagagaagggctcatacaggactgtgaagcctccggaggcagaatctacatccttcccagaacatgcctttgaaggcacatctgcggggtgaaattggtactaaatgcttataagatggttcttcatcatttctatgttaacaattaacacgtacgtctgacccggtttcatctaacagaaaaaaagccagggggtgggtagttacaaaattagtactaaagtgatataattctttttttttcccctgtatggacttatttctgtaccagctattaatacaaaccaaaaatatatgtttacaaaaggtagtatttcctttactaatagtttctgtttatcctacaaatatcctaggttccactgtaagtagaatactgactgaatttataaacacctaagtagtatcttcctaaagcaacacaaaacttggtattagaaatggaggaaggccagatgttacacaggagtgatcaagacagaggtcaaatgccaactgcaaggaacacatccctgcgactgatgag

SEQ ID NO: 195445 - DNA, 161 bp, Homo sapiens
ctatttctctttccagtagagattgatgaaatatacagctagtgtgtaaccatggaaaaattaataggtctattctaattagtaaaggaccaactgtatagttttcaagtggcctgggacccttggtcttcttgtccttactgacttttgtgcatttttgg

SEQ ID NO: 195446 - DNA, 662 bp, Homo sapiens
ttatagcccaacacattggtgaactagaaggccaggcagggacctgtaactcttgtaggctgtgattcagggagttctgcaaggctcaccagctgggtgcctaatgcccaccatggaagtttcccttctgtgtaagcactgttgctagaaaacttgtgtataatgcaaatgtaagttgaggtcatgtgattggtttccaaaagctatgtacaaaactcactgtaagtcattatattaatatgctgaaaaaattcctgctattaatattacctagcagagcaagatctttacagatgggttatgggatgggtttctgagagtggaagtagaagtcagggtatcattggcatgccacaagcctcatcgctgctctctgccctcatgggattttctttttaaaagctttttggcatcctgtatcaaatttagagaaaaattgaaacagcgagaggtgttaggtgacagaatcacagcttgttaaattttcctaagttaaatggaacaagattaaactcaagaggataatggaaaaatcctgcattgagattaaactatccacttacaggtaaaggacatcagggacctcagtttctgttttagctgacagcatattgattttgagccagttgggtaatgtatagctgttgagaacaaaaagtcag

SEQ ID NO: 195447 - DNA, 447 bp, Homo sapiens
ctgtcacccaggctggagtgcagcagtgtgatcatagctcactgcagccttgaccccctggactcaagcagttcttcaggtagctgggactgtatgcgagctccatgatggctgactaattttttaattttttgcagagatgggacttgctttgttgccaaggcaggttttgtttctaaatcctggcctcatacagtcctccagcctcagcctcacaaagtagtgggattataggcttgagccatggtgcccttctgagaccctgtctctacaaaagatgtaaaaaatactagctaggtgtgatggcacacacttgtagtcccagctacttgggaggctgaggtgagaggatcgcttgagactgggatgttaaggctgcagtgagctgggatcacaccattacactccagcctgggtggcagagtgagaccctgtctcaaaggaaaa

SEQ ID NO: 195448 - DNA, 301 bp, Homo sapiens
gcatattataaggtgctgacagtaaaggaaataaatgctacaatttatggagtgagatttaggtcataaaatgtgttttggctgcttgtctgcattttaaaatttatcatcaattatttttgtaatctgcatatttaaaaagatgtacatatttgtttccgaaacaatattaaatgttgaaattttgagaggtctaagtttcatcgatttttcttctccattctttccttgataaaaaaatgagaaaaaaaaaactttttttcaatagttttacttacaaaacaaattgccacaaattaaa

SEQ ID NO: 195449 - DNA, 390 bp, Homo sapiens
  misc_feature (9)..(9): n is a, c, g, or t
gggccgagnggccgcggcccctgcaggacgggaggcctgtgtcgctatgggttcccccgccgccccggagggagcgctgggctacgtccgcgagttcactcgccactcctccgacgtgctgggcaacctcaacgagctgcgcctgcgcgggatcctcactgacgtcacgctgctggttggcgggcaacccctcagagcacacaaggcagttctcatcgcctgcagtggcttcttctattcaattttccggggccgtgcgggagtcggggtggacgtgctctctctgcccgggggtcccgaagcgagaggcttcgcccctctattggacttcatgtacacttcgcgcctgcgcctctctccagccactgcaccagcagtcctagcggccgc

SEQ ID NO: 195450 - DNA, 622 bp, Homo sapiens
  misc_feature (9)..(9): n is a, c, g, or t
gggccgagnggccgcggcccctgcaggacgggaggcctgtgtcgctatgggttcccccgccgccccggagggagcgctgggctacgtccgcgagttcactcgccactcctccgacgtgctgggcaacctcaacgagctgcgcctgcgcgggatcctcactgacgtcacgctgctggttggcgggcaacccctcagagcacacaaggcagttctcatcgcctgcaggttcgaggggtggggcctggggcggggccaaatgggaaaggggtgggaccacagggccgttgagagggaatccgaagccaagtctttcagaagcaggaggcggagcgtcccagaattgggggcggggtgatagtgaggaggcgggactttttcagggggcggggcttcctgaagctgcgcatgtctcccttggttccccagcccccaaaggacttatctgctctctctctagtggcttcttctattcaattttccggggccgtgcgggagtcggggtggacgtgctctctctgcccgggggtcccgaagcgagaggcttcgcccctctattggacttcatgtacacttcgcgcctgcgcctctctccagccactgcaccagcagtcctagcggccgc

SEQ ID NO: 195451 - DNA, 539 bp, Homo sapiens
caagggagcgagggtgtcgtagagggcagaatgaacaagaagaattaggagggaggctgcgtgtgccggggctaggggctggaagtcctggctctagttgcacctcggaaggaaaaggcaaacagaggagggaaggcgtcttaggactgcctggatccagagcactttccacggcctctacaggcctgtgtcgctatgggttcccccgccgccccggagggagcgctgggctacgtccgcgagttcactcgccactcctccgacgtgctgggcaacctcaacgagctgcgcctgcgcgggatcctcactgacgtcacgctgctggttggcgggcaacccctcagagcacacaaggcagttctcatcgcctgcagtggcttcttctattcaattttccggggccgtgcgggagtcggggtggacgtgctctctctgcccgggggtcccgaagcgagaggcttcgcccctctattggacttcatgtacacttcgcgcctgcgcctctctccagccactgcaccagcagtcctagcggccgc

SEQ ID NO: 195452 - DNA, 680 bp, Homo sapiens
tatcgcccaacacactacgtgagtaaatgtcctctcatatgtatgatagatggaatgaatttcaccgatagggagttttgtaagtagaaggaagttcagtacttatagggtagctacaaacctaaagcactgtgccaggcatattccttggaatcttgcatttaattccatggactctcaggcttgtaaggaggtaggcacacactcacatatttgacatggttaataacaagaagtgttgagagtaaaattactattgtgagaagagaggagagaaattgtgaatgaaggaacttgagaagttcatgcagtgttggggataacatgatttatcgcccaacacgccccacacttctataaggtagatactactgcatcctcattttacgtaagaaaaaactgattcataagagggttaaggaacttgtacaacatcacacaagtaaacggtgaagctaagatctaagcccaggcaatctggacccagaatccaaactcttaaggatgccacgctgcttaagaaatgtcttaagcaacaagcaacttgcaaggaggataaagctagttccctaaattataggaaaaaacaatgattgtcaatcactagtgactgtcaatcactgttgttaaatttgaatcctaaaatctcattgctggtgttggggataacatacgggtac

SEQ ID NO: 195453 - DNA, 524 bp, Homo sapiens
  misc_feature (5)..(5): n is a, c, g, or t
gatangctgctttcttgaaggctattgggtatcttattcctcttatggatgcagaatatgccaactactatactagagaagtgatgttaatcctgattcgagaattccagtctcctgatgaggaaatgaaaaaaattgtgctgaaggtggtaaaacagtgttgggcgataatgttatcgcccaacacgccccacacttctataaggtagatactactgcatcctcattttacgtaagaaaaaactgattcataagagggttaaggaacttgtacaacatcacacaagtaaacggtgaagctaagatctaagcccaggcaatctggacccagaatccaaactcttaaggatgccacgctgcttaagaaatgtcttaagcaacaagcaacttgcaaggaggataaagctagttccctaaattataggaaaaaacaatgattgtcaatcactagtgactgtcaatcactgttgttaaatttgaatcctaaaatctcattgctggtgttggggataacatacgggtac

SEQ ID NO: 195454 - DNA, 392 bp, Homo sapiens
ctatatggttggacgatcagcacagttcttccttttccttctcaattcaatgattatagatttgcttcttgcccatttcttcccttttctgttttcttcccccacaaacctgagatcaggttgctgtctgagaagaagccgacgcagcatcccctccttggcagcatcccctccttttgcggggctctttggagtcttctcaggatggtgcctccacttcttcctcagcggctctcagtttgctttcacagttcctgttcttccacaccagcttcctggtctcctcctctctgaaagccatcgttgactggatgtctcaggtatctgccgttacttggccacatgttacgaaaccccttgttttatgtctcctttcctcgccagcctgcagt

SEQ ID NO: 195455 - DNA, 699 bp, Homo sapiens
aataaaaacaacaaaagaagccatgggtagtatgtggtgaaaacaaaaagcaattaattgagattctccactcaaagaccttgaatttggcttagatggttcttcatgaactgttttcctaagacagatgagatgggcaggcctctaaagagtatacagttagtgacagacatgaagatctgtccttcccacagtacatggcaggcttcagaccagaagacctgaaaggtgctcagtttcactgcagcttctacacttctacctatagctaaagggatgttaagaaaccctctactctaaaccacttattttatactaaagagctaaggtgatggtggcccctccctccccaggcacttgtggtcattcttgagtagggctgtgctagggccagttggagtcaggctgctcaaatgagtgaggagatggtacttccctgcatacttcctacttaaaaaaaaaataaaaaactggctgtaggggcacctatgtggggttcagagaaactgtagcatctggcattctgggttcagaggcttgattggaatcacatatagcacagaactttaaaaggccaactggaacaaacatactggagtgtcctgggcctaccttccttcctttgtgcctcacacctcacagaccacttgcagatgcattagtgcactgaatgaatcctcagcataaccctaaaaagta

SEQ ID NO: 195456 - DNA, 260 bp, Homo sapiens
gaaaaatttttatttgatattcaagaaaaaatttccaatcttatacaacctatttaagagtataaacagggcatggtaggggtttgggggtggtgctctccacctgaatgaagcataatagaggaccatatgagaaaggaaatcacttgcaggtctcactcatgaagatagttgcaaaaatcctaaacaaaatatcagctaaccaaatctagcagatataaaaaacttaccaagttgagattatcccaggtctgcaaggg

SEQ ID NO: 195457 - DNA, 421 bp, Homo sapiens
ggtctcctagattcagtgttcagaggcagtgtccagtagttcccaaaagatctgattattttcttttccctatgtttagttactgtagtagaaggctatatgaacctttgggaaaagttagaaggaaaattaacagtgtcaggcctcagtaacatatattaagtttgtttctcaaggagatctgtcctcgctttccttaaacatgttctggatctgtaaaataggggattcttccatgaaggcaaaagggttgatttagagagaaaagtttaagcgtgggaattgattgagaggccttcactctctgtttttatggttgagttatatttttgttcacttgacctggaacttttctgcttatctagataagtatgaatttagcagacttcctatctgtttcacttctaggactaccacagtt

SEQ ID NO: 195458 - DNA, 510 bp, Homo sapiens
cgagtgtacagggacggaggagaaggcgaacggagagcgtaatcagcaggcgggtagtactgggacaggttaaaaaatcattattttagcaagtaaggtcttttggcaaaactgcccaagttctataacatcaaaactcttaaggagcagaacttgatacgagaatccaaactagtaccctttctctatgagaatataaaaacacaacaggacttctaccacactctatctgtagaacccaatttagaatgccaagggcatgtaattactaactagaagataatttagtggagaacacaataaaacagccttacatttttatgtgaattaaacctttcttgtcaaccaaattttccgtgatggtgtatctcaaacatcatctatttaactatcagaaatctcaagccacttcacatttctgattatttactacgaacgtatatagggtagaagagaggggaacccaggctttataatcattgacctaaatttgacataggctctgccact

SEQ ID NO: 195459 - DNA, 370 bp, Homo sapiens
cgcaccactgcactccagcctgggcaacagagtgagactctgtctcaaaaacaaaacaaaacaaaacaaaaaaacaaaacttctgcaaatctacagtaattataacagtgtgctactggcataggatagacatatagaccctggggtagaattgagagcccagaaacaagccctcacatctattgccaattgatttttgacaagggtgctaagacctttcactggagaaagaatagtgctccaaaacctggatatcacatgcaaaagaatgaagttgaacccttaccacataccatatgccaagactaagtgagaattgatcaaagacttaaatttaagagctaaacttagaactattagaaacatcagt

SEQ ID NO: 195460 - DNA, 185 bp, Homo sapiens
ctgaggctgcgtctaagctcggtgaaagagaactatgagaatgggagaaaacatctgcaagctatgcatctgacaaacaactaatatccagtatctacaaacaacttgaatcagcaaggaaaaaaaaaaatcccatcaaaaagtgggcaaatgacaggaacagacatttctcaaaagaagatata

SEQ ID NO: 195461 - DNA, 482 bp, Homo sapiens
gtataagctatggaaacaccatgcattatggccataaaatccaagcaacaatcagctagtacccttcacccaagcctctctcactttaagtcaccactgctcactgctgaactgcccacatctctgtcattaccaaatctaataacgacagctctgctgatatttattctacaaaagctggaccctatgtagcagacatcagctaccattttgtttgaagatgatatccaaatcaatatgcccaaaccaaataaaagaaatattttgctaatgagctgccgaatttcatggaaatgtattcagaatgacaaatggtccacctatttactgacctcagtttgcttcaacatgtaccatggaatcaaaacagtgcaagtttcttgaggataagcaattggggacctttcttttgtgccaccctccccacctggtaaagtgataggttccttgcagctgctgagtaagtgcctgtagatgcgatg

SEQ ID NO: 195462 - DNA, 838 bp, Homo sapiens
aggccatgtcagccgagagagaagcttctgggtcctgccttctccagggagcctcttgaggacataggctgagtctgcctcaacctggggcctggctgggactgccttgtgtgcagccgcgtgaggggctggtgggtccctttgaggagatggacctgggctcctcccctctgtctggtgagggagctccacacctgaggtccgtccttcaggttctggggggaggggtcccgtcaggaggctgtgggctgtgggggaagaagggcccagaaatacaatcccaccactgctaagtcctgttgctatcctcctgggcccactgcagatggggccaccctgccacccgcggatccccctggcacagccctgctaggacctttctatggggatgaaagggggtctcagagggtgtggccactcaccaaggcccacgtgagaggaccctggatcatcctagctcctttgaactggatgctccggggccacctccctgttaggaatgaaaatgccgccctttgcatgacacgaggagccaactgcttccgccaagggctcaggcatggctcttaggggattcgcacgcatctgcgtagggctggacttctcacagtggactcccacttgctgggttaggaaactgagtctgtgcgggacaagctctgcgggacggtgccccggccgggatccaggcggctggctgcccaccaccctccccaaccctctgtctgcccaccggaatgtggcccttcctgggggagccagtgactgcccagcctgggatcctggagccccggccctcctggcagagctcacactctggcagggtccgaggagcttt

SEQ ID NO: 195463 - DNA, 283 bp, Homo sapiens
cactttccagaaccttgaaatgtttttccatgttctaacatggtgatctaccttattcttttaatttttcttatttagttgtctttacacatgaaacacatgaatacatccttgtgataaacattttcagtaacataaaagtataaatgttacaaagccaacgtgccctttcactcaactccctgtccacccagtctctcctgtctgctgggagaaccaccgcattgacttgtgtgttcacccttccaggctcttttctgcacgcttatatgacgtactacat

SEQ ID NO: 195464 - DNA, 366 bp, Homo sapiens
tgatcccctttatgtgaggctctgaaccgaaaaaaccactctgtggtgggagagatcagaacggtggttgccccagggtggggggcttcaaaagggaggcacacaaggacatttctggggtaatagaaatgctctgtatagtgattggggtagtggatacatgagcgaatccatttgtcaaaactcatcaaactgtgtgataagaattttcagtaacataaaagtataaatgttacaaagccaacgtgccctttcactcaactccctgtccacccagtctctcctgtctgctgggagaaccaccgcattgacttgtgtgttcacccttccaggctcttttctgcacgcttatatgacgtactacat

SEQ ID NO: 195465 - DNA, 322 bp, Homo sapiens
acaaaaaaaaattagctgggtatggtggcatgctcctgcagtcacagctacttgggaggctgaggcatgagaattgcttgatctcaggatgctgaggttgcagtgagctgagatcatgccactgcactccagcctgggcgacagaaatttttttgtttcaaaaaataagataaaatcttaagaaaaattaaaactagtccgggcgcagtggctcacgcctgtaatcccagcactttgggaggccgaggtgggcggatcacgaggtcaggagatcgagaccattctggctaacacagtgaaacccgtctctactaaaaataca

SEQ ID NO: 195466 - DNA, 623 bp, Homo sapiens
aaaagatctcagacttccgccctccagaagcataagagaataaatcggtgctgttttcagccactgtttgtgctcattgtttatagcagcaataggaaactaaggcactatgcaaacatatgccgcgtatttatctccattagcactttcagctactctgcaacttatttttctaggcctcaaaatactattcataaagcatctatggaagcttttgcctcctgttacacaaagtgagagtagaataatctacttttgtcttggcacagaaaatttgcaatgaaatgcaacacattttaattcttacacaaggctaggaaacattattagtgatattgcaaaaacaaaaatacacttccaattcagacccacaaaatgagcactcttcgattataattctattcacctccctgtgagtaccatgctattggttttcttctgggtgtggcaggaagtttcagtgaaagagaaagaaaaattaacagataagcccaagtacctggccactcaggctgaaaagggagtggtaggggaactgaaggctagatagtcaaggaaggttaactgtatgctagatggccaaggaaggccaaggaaggtgatcactgatctgcccgcccccg

SEQ ID NO: 195467 - DNA, 614 bp, Homo sapiens
cagcctcccaccagctctcaacttgatgcttagacaagtcccacaataaagttgtttgattacaagttaactgatttcaatacacgtatattatgggcccactctcagcaggaagtacatgattgtgaggacaggggctggagtagcaacccagcagcatctacagggagtcgggcctcatcatctccactaaacaacaagtttatctaagcttttattccctttagtaaacaatgtccacctatcaaaatttaccacattttagaagctatactaatgttcacattctttgacccacaattctattcctgggaatgtagctaaagtagtccaaaagaggaaaaagggacaacaccatgtacataaagtgttcatttgcttaacaaatgtttattaagagcctaacttgggccaagtccagtagttagcactaagaatacagaactggatgagatctggttaattcctacctctgagatattcaccgcaagcaaacattttcctttatgccaacaataaacagtgggaaacaagtttataattacaatcaacataaaatgcctaggtatccaattaagaaatccagaggccaggcgcagtggctcatgccagta

SEQ ID NO: 195468 - DNA, 215 bp, Homo sapiens
gctacagtgcaagttcccgagaaaggtaaacttcaggtggattagctgtcagcaaaaggaggtgggctgagcccaggttggggtgctgactgtcccagtgcaccaggtgggtttcatctgagtctctccagatggcaccacttcagggaggacctgtgcagagtggtctgggcagggctgccccaagcctagcctccagccaccactcccccacc

SEQ ID NO: 195469 - DNA, 481 bp, Homo sapiens
acagaaaaaagattatacaccatgatcaggtggtattttcccccagggatgcaaggatgtttcaacctacaaatatcaataaatgtgatacatcacatacatcacatcaagagaataaagaacaaaaccttgtgattatctcaatagacacagaagtagtatttgataaaattcaactcctctttgtgattaaaaaaaaaccctctcaacaaattaggtataaaaagaacataccttaaaacattaatgttcgtatatgataaacccacagttaacatcgtactgaatagggaaaagttgaaagccttttctctaacatagaacaagacaaagatattcactttccctaagatccttcctctaagatctagaacaagacaaggatatttactttcaccacttttattgaaaaatggtcaatcacatcgttttcttttattgaaaagtggtgaaagagtcctagacagagctattaaaaaag

SEQ ID NO: 195470 - DNA, 498 bp, Homo sapiens
accctcacctgtgcttttcctcatacagccaccaggctctgcctcagggcttctgcccttgcttctcctatccagaacattcctttcctgaatttcttcaagcctcactccctcctttacatctctgtccaaaggtcaccctttggacatctttcttacagaaaggtcacactttctgtaagacattccctgaatgtcatttgaaattacaggccccttgtaataaaagtgctgggaaaatccagcactttgggaggccaaggcaggtggatcacttgagctgaggagtttgagaccagcttgggcaacatggtgaaaccctgtctctactaaaaatacaaaaaattatccaggcatggtggtgcatgcctgtagtcccagctactcagagtctgaggtaggagaatcacctgaacccaggaagtcaaggttgcaatgagcagtaatggcagcactgcactccagcctgggtaacaagagtgagaccgtgtctcaaaa

SEQ ID NO: 195471 - DNA, 141 bp, Homo sapiens
gacagcatgactccagaatagtcttttagtcatagttgtgcaggacacacatagttgtacaggacactgaatatatattttgcccccatgttcttcatataccatatgttattggctaatgagagctagcacaacaggcta

SEQ ID NO: 195472 - DNA, 423 bp, Homo sapiens
caatagggttgaaagtagagcagaaagggcaagcagagaactagacagagaagacagatgacggaggagaggaggggaatgactgccagggccaggtcccaggagagtgggaaggtattattacatcaagcataccaaccaacaggttagcactggctccttggagagaagggcgaaagaaacaaggaaaggtgaaaatatccagaaattagagatgataagaaaggatgctggggaagcacttgttagggagtaggggatcttttcaggaaaatgagggggagaggggagtcttctgctatgatttcagtgagacaccaacagctgggacttaaggagattgctatgggctatcaactgcacagtcattaaaaaaaaacatttactcagggccttctctgccccaggaactgtacatattta

SEQ ID NO: 195473 - DNA, 649 bp, Homo sapiens
ttccctagtaaaacttcaattaccttttttgcagaaatggaaaaggtgattgttaaattcatagggaattgcaagcgatcctaaatagccaaaacaatactgaaaaagaactctgaggactcatacttactgattttaaaacttactacaaaactacagtgatggagatagtgtggtatgagcataggatagacatatacattaatggaatagaattgagaatccagaaataaaccaatacatctgtggccaattgatttttgacaagggtgctgggcattcaggtggaggaaaagagtagtctcttcaacaaatggtgctgggacaaatggatatctacaggcaaaagaatgaagttggtccccccctacatcacaccacatacaaaaactaactcaaaacagattaagaacgtaaatttaagacataaaattataaaacttctagaagaaaacacagaaaaaaattgtcatgacctgggattggcaacagattattacatgtgacaccaaaagcatgagcaacaaccacaaaaatagataaattggaactcataaaaataaaaaacttttgcacatcaaaggatattacctagaaagtgaaaagacaacttataggagaaaatagttgcaaatcatttatgtgataa

SEQ ID NO: 195474 - DNA, 328 bp, Homo sapiens
actgtccctgcgtcatgaagtcccaaaataaactctaacatggtttagactgctgattatataccatgcttattactactgacaacgtattattttggttatagcctatagataccttagattataatctatccatcctattaatgtttgaatactttctacattactgacttttcaagcttaaaactaacctcaggaataattcagtccaggggtcagcaaactatggtccacagaccaaatctggttcatcacctgtttttgtaaataaagttttattggcacacaactacatgcatctgtttacctgctggtgatggctgctttc

SEQ ID NO: 195475 - DNA, 493 bp, Homo sapiens
atataataatataatatttttcagcttttaagaagttgaagatactgccatttgtgataacataaatgaatctggaggatattaagctaagtaaaataacttagggagagagaaaaatactgcataatttctgttacatatgaaatctttaaaaaggtttaatacatagagacatgatagagtgatgatttgggggataagagacacaagtcaacgtttcagttatataaaataaatgaatctagaggactaaagtacaatttaaaggttatagttactatttttatattatatactagtgatttttgaacagggtaaactttaggtgctttgacaccaaaaggaaactacatgagttcatgtatatgttaaattgtttgaccgcagtcatcattgatatgtatatgtatatatatataattatgggctcattaaatttaaatgctataaataggtaacaaagaataaagttaattgaaaaactgcatcatta

SEQ ID NO: 195476 - DNA, 260 bp, Homo sapiens
tggcaaaaaaaggatcaagacatagaagtactttggatcaaattctgtagaatcagcctatttgagatgcattaaggttaatgccaaaaccaatacggtgttctgttcacagtttctttctagaggttttaaaagccgaaaaacattaaaactcagagtttgaagtggaaagtttctatctgtaaaaacaagccacttttaggtactataagctattaagatttggtaattctaaattaattatgtattttttaaaccct

SEQ ID NO: 195477 - DNA, 301 bp, Homo sapiens
ccatgtttagataagaaggtaaaatcagaaacaggaatcagcaaaaaggaaactgaaaaggaagtcagagaaataagaaaaccaggaaaatgttgtgtcttgtaaattagagaagtcagtgttccaaaaaagagacagtgatcaactattagtatgtcagttgctgctggaagccattaaccttcatgtgagccatgtccagaaagaggcggtacccatgtctctaccttgggaaacataaaacatggaagtcatgtgacgggctgaggttcccgaggagagcaaaacactaagcttagtg

SEQ ID NO: 195478 - DNA, 502 bp, Homo sapiens
gtgaatcaggtgcctgaattgtgtgccaggcacaataacaggcacttgggaataaaagttatacaagacatgacaccttctcttcagtcttttacagtctggtgggagcgacacacaaacagatgattataaacctattgtgctgtaaatcagttcaccaaaagtgccacaggaccatagggaaagggcttcaactcagaatggaaaaagcaaggaaagcttccaaaacgaagggatgcttgaactcaggaaaaaaggagaggaagagtcttctaggaaggaaggggagacaggagaaatgacagtggaaaagcagacagggagcaggccatgacagaccccgtatatgatactgacaaatctggactttgttagaaaccagaaggaggtcttcaaggataggagtgctatgccaggcacagcagcacatgctagcattcccagctactaggaaggctgaggtgggaggactgcttgagcaagaccttgtcttaaaaaaaaa

SEQ ID NO: 195479 - DNA, 271 bp, Homo sapiens
tgctgggattacaggtgtgagccacggcgcctggccttttctttgattttaataatttggtttactaagtctgttccctgtccatttgctctgcaaggagtcatcagagcctggcgcttgcagtacccccaggtccacgtttagatgatcttaaaacattgccataatcttgcacgatggccttgcacttaggcagtgccagtattcctatggtatacagtgaaggggcattcggtttcagtaactctgatttgtaatcgtcctacgtgga

SEQ ID NO: 195480 - DNA, 941 bp, Homo sapiens
aggtgctcaataaatatttgttgaggcagggcatggtggctcacgcctgtaatcccagcactttgggaggctgaggcaggaggattatttgaggtcaggagtttgagacctgtctggtcatcatggtgaaaccccatgtctactaaaaatacaaaaaaatcagccagctgtggtggcgggcacctgtaatcctagctactcaggagattgaggtaggagaactggtggaacccaggaggcggaggttgcagtgagctgagattgcgccactgcactccagcctgggcgacagagtgaggatccatgtcaaaaaatttaagagatgggtctctgtatgttccccaggctgatcttgaactccctgcctcaaataatcccctcgccttggcttcccaaagtgttgggattacaagcatgagccaccttagcctgcctattttacttatttgcttacgatccatctatcttttcacatgaggatgtgaactccaggagatggggacttctgcttgcttcactgcttcgtctccagccccttacatgggaccaggtacacaatagacgctcaataaatagttgttggataaatggacaaattaatcccaataggtggctcctgggaaggatgctgggccttgttataaatggagcctatggtcgggcgtagtggctcgggcctgcaatcccagcactttgggaggctgaggcaggtggatcacctgaggtcaggaggtcgagaccagcctgactgacatggcgaaagcccctctctactaaaaatacaaaattagccatgcgtggtggcatgtgcctgtaatcccagctactcaggaggctgaggcaggagaatcgcttgaacacaggaggcagaaggtgcggtaagccgagatcgtgcccctgcactccagcctgggcagcaagagtgaaactccatctcaaac

SEQ ID NO: 195481 - DNA, 288 bp, Homo sapiens
tttctatgtatatgaattgcccccacctccagactgtgagacgggattaaatgagatgatgagaaagtgcctggaaaactgaagttcttcaaatataagggctgctattcctctaccttgattatggctactaaaggcctaagattaaacggaaatcgtgtttatttttacaaacatatttcaagtttgacaactctttcacactagggatgctagtcaacactattatccactaacacctacagtataagcaaagcaaaaaaatctttcttccatagaaaatatctg

SEQ ID NO: 195482 - DNA, 164 bp, Homo sapiens
tgcgcccggacaaggcagtgcaatttttaaaaattctatttgtgtttaatactgccagaatcagatttttcttcttcaattaagtgactgcattttgtgactaatacactttgaaataactgtataccacattaaatatggtaatacatcggctcaccaatata

SEQ ID NO: 195483 - DNA, 389 bp, Homo sapiens
gacatcatttttgatatttgactgccaagagctttcaagctgtacccctttcctcagggcaagctaataagaaagcccaagtgagccatcctttggaacaggtgggaagttcaaaccaagacctggctgaaggggcatataaggaccttcactccagactcagcaacttatcaccataaaaggagagccagtatccttttcctgctttctcaagccattcttgtacctgcatgggaagcctgccctgctctccccaaaaagcctcagtaagtgagtcataaacccttttcgtaccgtcctggtgcacatatggtatcatcagtttccacatcttaaccaaattttgcagtggggggagaagtagtggatccatccgcctctgcggagta

SEQ ID NO: 195484 - DNA, 339 bp, Homo sapiens
cttcagtaaaaatttacgatcatacacccaaaccagaatgacgaaaagtaaaaagactggcagtaccaagtgctgtgaggtgccgtgcatcttgctggtaggagtgtccatgggtcatctggggcttgcaggctgcactgccacagccacctccttttctcatttcacctggggaaggctgttgggtagcacctgctagaatgaagagtgtgtatgcgctgcacagcagctctgctcctgggtgtatacccaacagaagtggatattaatgtctctcagaagataggtacaagaatgttgtatctttattaccttataataaaatttggaaacaataaa

SEQ ID NO: 195485 - DNA, 590 bp, Homo sapiens
ttcacggaaatttagaaaatctcccagcccctgaacatacgaaaatattttatcattgaaccttaatgagcaaaagctccacatttctagctatcatcctatggcctcacaatagttagaaaaaatgcctttttccttcatcagcatatatgcaaagagtaaactggtatgagctggcactcagatgggttttcatcagtaacatttggtgagtggtatttcctaggatcataaggcaacatgaggttcgtgcaggtacatagtcttctagatcctgaccagggccaaggagggtctagaatttcactgaaaagcttttgcaaagctcatgatcaaggtttgcccttcatctgctccagaaatgaaatctgaaatactgcaacggggccaagaaggaagggggccacctgcttttgtactttgctgctgcttgcttccttgagaattctagaacttttttctcccctctccttggagcctagaagcccctaccagaccccttagtttactacatatggattttttactaacattaacaagaaaaaaaaaacctcatatatatgaactgcaagtttgcagaagcaggaaga

SEQ ID NO: 195486 - DNA, 1197 bp, Homo sapiens
tcgtagttaagggccagtcaggatcagacatcttgccctgatggaaaagaagatgaacagatacctcctgacctggatagcaattaattctggggacctagatccccaaggactttaggatgaggcagcagtttggatttaggatcaacatggtatttaaaatataaaagcattgtagtgttggggaagcatcatttaaaagaacttgtggggtccctgtcaggcccctcttgagacaggccagccccacagaagagaaggcctagggctggctccctagggttgtgagaaactccagaacagtgttgacttctttcttcccctagggtcacaccagcatgtagcatgatgccttgcacacagtaggtgctcagtaaacacttttggaccactgaatgcaatgaccaatggataaaaacattgttcttcccttgaccagataagacccgcttccctgggcgtccacaggccgctggtgatgcacactcttctctgtgtggcctctgcctgccgggggaagccttgtgaccagtttctccccgctgagtcaagggagaatgagggggagcatgaacatttgcttgtttcccttatggcttctgaatctttattttattttttttaatgaaaatgtctacttgaatttaggtaaggaagaccttgctcttagtttttgaatttgtgaactagaaaaaaaaaaaaggtctttcaagtgaacactagcagaacagtctaagcaatcatgataaagacctaattcctgcctctttctcctgctctgatggagctgatgacagcacaaatgggagagggagaatgtagcaaggacactgaaggacagagagttgtccaagccaccaggaaggtgaaagtgggaattcattttctgtgccattgggtggttccttaggaaaaaacgtagacaaagaaaaatattgtattatttgtggaaatcaagttcgtattgcaggtgtaagaaatgtctttgtgggttgacagcatttattgaacatgagcctttatttttggagctcctccaacgtaccatgcactgtcaccttaacagttcctcacagtgaccccatagagtcaagagtcaactgcatttttgcagaagcgaggctcagagaggttgagggttgtcctaggtatccaggtagcgagcaacagagcaagaatttgaactcgggttgtaac

SEQ ID NO: 195487 - DNA, 462 bp, Homo sapiens
aacacacgtgaatttacactaagaaatccactgaagtttttgatcgagggaagatacaggaccaagagttgaattctaaacataactttgagagtacttgtgagcttacttagtagagactatatagaacttataatgtgcatacatggttctaaacattataaatattaattattgcatcagatattttctatgaacacaataagcataggtttttatttgtctctgtactcataatacacaaagaatttgtgagtctggttttcttttattctattcattgcttctgttgtttctcgcatcacattttgtttccctgtacgctttgttatttctgactgtactgctcattgacccttgaaaattaggaagaaggtgccctcctccggagattcatctttgattctgccaggtatctgggagtggggttaggaacctggaactggttctaccttaaacttg

SEQ ID NO: 195488 - DNA, 762 bp, Homo sapiens
gccacaagaggctaaggaagagcaaaataaacgtcgcgattcgcttctcacagttctcagcccttcgcgctgaactattgctgagatggtgggttttgccagcagccattgtagcccccgggcctggctgcattgctcacctccctcagccttgttctgtccctgtccatgagatggaagtggctttctccagtcagctgtgtgtgcagagaccgggggctccgggcagagccgagtccatcaggactggaggaagtgctcacagcaggcaggctccctgggccctgggtgggaggcctcagggatccccgtacctccttgctcaccagccaggctcgacctactgccctgtggggcaggtcaggctttttccacagctccctctctgggaggagggtccttccaagtgagggtgtggtgtagctggagaatccctctttctaggggatttaaataagcagccccagccggacgcggtggttcacgcctgtactcccagcactttggggggccgaggcgcacagatcacgaggtcaggagtttgagaccagcctggccaacatagtgaaaccccatctctactaaaaaaaacaatacaaaaagttagctgggcatggtggcaggtgcctgtaatcccagctacctgggaggctgaggcaggagaatggcttgaacccggaaggcagaggttgcagtgagctgagattgcaccactgcactccagcccaggtgacagtgcaagactctgtcgcaaaaaaaaaa

SEQ ID NO: 195489 - DNA, 391 bp, Homo sapiens
agctaatttttgtatttttgtagagacagggtttcgccatgttgcccaggctggtctcaaactcctggactcaagtaatccacctgccccagcctcccaaagtggtgggattacatgcgtgagccaccacacccggcctaatgtagacattttttatgatttttggaaaagggggccaggcaccaaattctaacaatttgggaggctgaggcagatggatcacctgaggtcaggagtttgagaccagcctgaccaacatggtgaaaccctgtctctactaaaaatacaaagttagctgggcatggtggcaggtgcctgtaatcccagctacttgggaggctgaggaaggagaatcgcttgaacctgggaggcagaggttgcagtgagtcaa

SEQ ID NO: 195490 - DNA, 427 bp, Homo sapiens
atgtccaaacaaaagttaacaagcaatctcaaacattataaacagaccaggcgcggtagctcacgcttgtaaggccagctactcgggaggctgaggcagaagaattggttgaacccaggaggcagaggttgcagtgagccgagatgacaccactgcactccagcctgggcaccagagtgagattccgtctcaaaaaaataaaataaaaaaaagtactgtctacttgctgcaaaaacttatttttctacttataaaactttaaatttgaaaactgttgattagcttttcagcatctgagggttatttgttttaattttactttaatagtttaatgtgtaaaacatattggcaaaacttggtcatgaagaatccaaccatgattacattatgagccctgtaagttattaatatcaatgtaactgtaatt

SEQ ID NO: 195491 - DNA, 741 bp, Homo sapiens
ccagccaatgttacgacttaggcagttgtcagattccagagcctgtcttattaatgatcacctgcgccacctcttgagtaaattaatagtacttatttttatcttaaaatgtcaattcctagtattttgttactcaaacgttttaaaaatgctgactgactcaaagaatcttactagaccaatgagttagattgatttctaagttaaaaatactgtgaggcagggagcggtggctcacacctgtaatgccagcactttgggaggccgaggcgggcggatcaccaggtcaagagattgagaccatcctggccaacatggtgaaaccccatctctactaaaaatacaaaaattagctgggcttggtggcgcccgcctgtagtccttagtcccagctactcgggaggctgaggcagaagaattggttgaacccaggaggcagaggttgcagtgagccgagatgacaccactgcactccagcctgggcaccagagtgagattccgtctcaaaaaaataaaataaaaaaaagtactgtctacttgctgcaaaaacttatttttctacttataaaactttaaatttgaaaactgttgattagcttttcagcatctgagggttatttgttttaattttactttaatagtttaatgtgtaaaacatattggcaaaacttggtcatgaagaatccaaccatgattacattatgagccctgtaagttattaatatcaatgtaactgtaatt

SEQ ID NO: 195492 - DNA, 196 bp, Homo sapiens
caagtctcaacacatttctgctctcggattcatgaggctccctgtatcttagcccaagtccccttccctagcgaggccacttgatactggagtcttaactggcagagatgagaaacaagactgagcacagacccgctgcctcgtgggagcccacgccagagggcccacacccaagacagacccagacagcatatca

SEQ ID NO: 195493 - DNA, 413 bp, Homo sapiens
gttcttctaccatttcatgaaaagattatccttctctactgaattgctttggtacgtcttcaaaaatcaattgatatgtgtggggctatttctgggcactttagtttgttccatggatctatatgtctagctatatcatattatcctgattactatgccctataataaatattaaaatcaggtagtgtggtaacatggaaagatatttggtctttgttcccagttattggtacagagctcctaaaactcttgtgtattagtccattctgtgttgctaaaataaattcctgagtctgggtaatttattcaaaaaaggtttatttggcccatgattctgatggctggaaagttcaagactgggcatctacatctagtgagggcctcaggctgcttctactcatggtagaaggtga

SEQ ID NO: 195494 - DNA, 385 bp, Homo sapiens
catacactaaccatagagtagcttgggggatgtttttacaggggatgccttatatgtgctacattagaaaacaaaaacttggtagtatcaaataaagcaccaacagaaaactgaatgaacttatttgcatttaaacacaagagcagagtgaaaaaatttagactgctatctcatcaaaaacaaagaaagcatataatgtttaaaatgcacagggatagctttagaagatatacctgatgctaaatgacgagttaatgggtgcagcacaccagcatggcacatgtatacatatgttactaccctgcacatcgtgcacatgtaccctaaaacttaaagtataataataataaaataaaataaaataaaatgcacatacactatggca

SEQ ID NO: 195495 - DNA, 431 bp, Homo sapiens
ataatctgtggcagaggggggcagagtgagctccattccctgtggactctaacccatatctgggtttgcagggtgttgtctatcaaaaggaggaattgcccttcacagggagagtgttagagccactgaggcagaggtagccatctcgctaagtgctcacaagctgcttctgtgaaaggccctcatcagagtccctgcagaccctgagagaatgcagccctggcaccttgttttggtgacttaaagacaaggcagaggttctaacatgacagggcacaaaaataaaactcagaggaaggtggggtctattctgttctttttttttttttttttttttgagatggaatctcactttgtcacccaggctggagtgcagtggcacgatctcggctcactgcgacctccaccccctgggttcaagcaattatcct

SEQ ID NO: 195496 - DNA, 407 bp, Homo sapiens
cttggatctgaaattaatgtttcccactaaatttggaaactttttacccattatttcttctttttttttcttgccaaacattttctgtcttcttctgagattccaattgcacatacgttgtaccacttcatattgtcccacaagtttccaagattctttttgtttttctttaatcttttttctttctgttttttgcattgaataatttctcttcctatagatctatcttcaatttcactgattattttgccatgtataatgtgttattaaccctacctagaaattttaaatttcagcattgataatttttatctctagaatttcctttttttttttcttatgcttcaaataaatagaaaaatggttataatatggatcttcaaccttgccattcatgcttttatgca

SEQ ID NO: 195497 - DNA, 331 bp, Homo sapiens
gcactgaggttgacagagctgaaatgtgacttgtggagccccaggatggacactggacactcaagagcaaaggccacatttgaaagtagagttaaagcaaaatagcgtaggggcccattggttgtttttatggccaggtgaacatggggccactcacctggtctgtggaatctgctcaggtacttatgcccttggctccgcaaaccttccaggaaaataggaaccataccttggccaagatcaacagcttttaaagatttcagaggagcaacaatccctggaggggtttaggaggccctgagcttggccatgcacagagttccaggtgtga

SEQ ID NO: 195498 - DNA, 205 bp, Homo sapiens
taggagaggcagggaggccccttcctgagagcccccggagggagcatggtcctgagacacctgatctcagacttttggtctccagagccagtagaggatgaattcctgttgaattaagttccccaggtgtggtcatttgtcacagcagcctcgggagacgagtagagacatagatcgggcaggaatagaatatctagttgcattg

SEQ ID NO: 195499 - DNA, 297 bp, Homo sapiens
ctggagagaggatggcccacattctgtaggagaggaaaaatcggtaaaactgttgcccatggtaactcagaaggttaagaaatccacctaataaacttgtgagtctggcaaaggggatttaaaagcaaaatttgggagaatcagttggcttttttttttttaagctgtgtatgatgcagcatggaaagaaaaagataaacaaaagaattgttcagtttgcaagtcaaatttagagaaaaaagagctagggtgttctagatcaggaaagaaaactgttcagtatttctaatatctcca

SEQ ID NO: 195500 - DNA, 293 bp, Homo sapiens
gttggggcctctgcagttgttccagctacccagtgcttttttattattcttcttgtccgaaaacatagagtagaaacagtccatactcattccttaatcttcctgtgttcataacgagcaagcaccctagatgagtaagaatctaccttatttttaagaattagcagagaaccatatgagtttcccttttcctcccctagaaacgtcctcaggttggctaactttcctattgagcaattcctcacagcaatcactccgcacacctctcatctgagaggctgtcttcccattcc

SEQ ID NO: 195501 - DNA, 760 bp, Homo sapiens
tcacagcacagctagggaggagaggggtgtggcctctgggaccagacggcctggattcaaattctagctctctcagttcctcgttgtgtgacttcaggcaacttacttcacctctctgtgcctcagtttccccctctatgtcatgggctgatagggttagagcctctagaaccaggtccctcaacaggggtggcacccacgctcgggctgggtaagtctttgttttaggagctgttgggtgcattgtgggaggctcctcggcatcttcagcctccacccagcagaggtcagtagcatcacacgccccatacccccgactttccctgccaattagagaaccgaaaacctctccagacagcgcagatgcccactggggagcacaggtgcccagctgagaacactgctcaggaacagtggctttcaaccctgtgcatgcaccagaatccctgggagcgcttgttaaaacacagcttttgggctgggcgtggtggctcacacctgtaatcccagcactttgggaggccgaggcaggtggatcacccgaggtcaggagtttcagaccagcctgattaacatggggaaaccctgtctctactaaaaatacaaaaaatcagccgggcctggtggaatgcatctctagtcccagctactcgggaggctgaggcaggagaatcgctagaacctgggaggtggaggttgcagtgagccaagatcgcgccactgcactaaagcctgggtgaccgagcgagactctgtctca

SEQ ID NO: 195502 - DNA, 302 bp, Homo sapiens
tccagctggtctcatatctacggggtgtaaagagaaaaagggggggatttcttcagtaatggaagcacacatcccaaaaacaaggaattaatattagccccagcatttgtcagagaaacatcagcagaagcttctgccgcactcttcagctgttttttgtacttcgccctttgcaacagattattataggactcactgataagcctctagatctcatacccattaaggatttaaactttccaaataaaacattcctccttgagaaatagaatctttgctgtgtgtctatatgtgccctcatt

SEQ ID NO: 195503 - DNA, 409 bp, Homo sapiens
gaactccctttttacaactgatattttccttaaaagctgaaaacacaatcacattctgcaaaccaaattccattttcaaatgaaagttcaactgccctataaatggatattactgtgaatttttataaagggggcaatcctatcattgtaaagcaaatgaccactccttaatgtattaatgtaggatatttagatgtttgtgtttggttttgattaaagctctgcccatattcttgtagccattttaccataaaactaagacagtaaaaccaagctccaaaaagacctcatgtcttgtccaagaacgccctaagactaactccacactatcatgactcaaatcccttccctagtcacccagtttcacagcctagatctctaaggaactaagggacttgatctgatctct

SEQ ID NO: 195504 - DNA, 108 bp, Homo sapiens
aattgttgagccaattaatgaaaataaatttcttggacaaatatcagagaaacattgtttatgatttatttatgtttactagaaaaccatctgaaataaagctgtcag

SEQ ID NO: 195505 - DNA, 497 bp, Homo sapiens
atactataggaagaatcctaactgatggacatttggttcatcttccctctttgaatgtaaccttgaatctattgtaagatcatgataggaatacatagactaagagtttgctttatgccctcagtttgctttctgtgttctattatatttgcttttcacatctaactggtaaagtaggcaagacaagtactattaatgttatctttcattttacagaggaggaagctgctcagtaaagatgagtaagctatctgggcacagtggctcatgcctgtaatcccatcactttggaaggccaagataggatgattccttgaggcaaggagttggggcaacatagtgagacctcatctctacaaaaacagaaaaaattagctgggtgtggtgatgtatgcctgtggtctcagctacttaggaggctgaggaggtaggatgaattgagctcacaggttccttgcaccatacactctagcttgggtgagacttgtctcttaaaa

SEQ ID NO: 195506 - DNA, 588 bp, Homo sapiens
atgaggtgttacaatgaaggtggtaatctggtaatagcaatcatcagatacaaggcaatagtcttattaagggcctattatgccgacacggtggcttacacctggaatcccagcacttcgggaggctgaggcaggtggatcacctgaagtcaggaattcaagaccagcctgaccaatacaatgaaaccctgtctctactaaaattacaaaaattagccaggcatgagctaccacactcagccctagcctacttgaaacgtgttcagagcatttaagttaccctacagttgggcaaagtcatctaacacaaagccctttttatagtaataaaatgttgtatatctcatgtgatttattgaatattgttactgaaagtgagaaacagcatggttgcatgaaaggaggcacagtcgagccaggcacagcctgggcaacagagcgagatcccgtctctctctctttctctctctctctctctctctctctctctctctctctctctcacagagagaaccatctctaataaaaacacaaaaattagacatgtgtgataacacacgcctgtactcacagatacacgagaggctg

SEQ ID NO: 195507 - DNA, 232 bp, Homo sapiens
ctatttattctactcttaactatgggtaaggcactggatcagattctagatatgttgctgaccaagtaaacagaaagcatagtcgataagtgcaccagtaacaagttcaaggtgcttagagggctgatttgaaggacactaaatttagtcacatgggagtagggaaaggcgaatgtggagggaagactaggagttcactaagtacagaggctgagaaaatagtgttcactaa

SEQ ID NO: 195508 - DNA, 636 bp, Homo sapiens
aaaaaagcaccgcctttactgccagttaccaatcctgcttctgacaagtatgtatttgttttgttttagttaaagaaaaatcataagtaacatagaatcttccaatctggaagctaaggagtataaggtagcaggtttaagcaaacaaacaaaaagctagtactctaaatgagaaacagaacaagcagcagaattagttggagttcatctaagctatacaagaagcatacatacaacgaataaatcacgcaaacaaaatcaactttgacagaggatgtggtcacttatcttagaaaaaaggatactattgtggggcaaattaaaccaggcaactatgtttcttcagggagtcatcataaatggctaaaaagcctagaacgtaaaagtttagcattatatagacactgtatactgccctatacaccgccaccataactgcactgaatcatgtagctggagtgccagcgaaatacagggcaactccaagtacaaactgccaaataggcgaattctaagttttagctcaaggtcagtggtgtattatgtgatttaatgctcagtacctcggttttaaaatacattagatttttactttaacgtagagtgatgataaagataagtctgccactactctgc

SEQ ID NO: 195509 - DNA, 466 bp, Homo sapiens
cttagcacccactggtattttaattatgtgtttacaccccatgtctccctactagactgtgcacttgagggcagggattgtgtcttgtttatcactgtagcccacccacagcctggcacaatagacgcttgttgaacaagtgactgaatgaattaataaaatggaggcagtgagagaataataaatcaaacagacatgtgtacttggtggaaaactagaaatgggagaaaaagagttctttagcaagagctgaaaggctcagggaatggaatttagtggaccagaagtttaccgaaacttgacagctagatcttaaaggtgaacaaaaaagcaatgcttggactgcctgaagagaggaataatatataaatcacaaggcactaaaagctaagaactccaagccagatatagatacatcccttagctagagggcaagaccagacagaaagaaatcagtgagaatctg

SEQ ID NO: 195510 - DNA, 330 bp, Homo sapiens
cggaaatttcggagactgtagagaaagtcattcttccacccagacctgtattgaatgatgtaagtgctgcattacagaagctgtgtggagaagtatggttaagttatccagctggaagggaattaggtcctggagaagtgaacccagaatttcctgaagcagtacagccagtatgtagccccctaaatcctccaggagtgatatcaccatgggctacgatggacaccatagttccagacaggaaggatttttattcctccaatgtagttcctgataaaactcatgaagttggatcttatttagctgcccaaatgtctccatcagaccaga

SEQ ID NO: 195511 - DNA, 339 bp, Homo sapiens
ggcaccctctcagctcccaagtgctgggatacaagcatgagccactgcacttggcaggttgaattttaacacagatttcaaaatgctaaaccaattctacactcctagtcatgatgaattactcttttaatatattgttcggtttgatgtgctaaaattatttgaagaatttttacatctgtgtttatgagggatattggtctgtagttttcttgcaatactttgtttttggtatgaaggtaatgctgacctcatgaaataagataggtatatttctccctcttcaattttctgggacagtttgtatacaattggtactacatctttctgaaatctgtg

SEQ ID NO: 195512 - DNA, 387 bp, Homo sapiens
acaaaccctgaactgtaaataattgggtcacatatgagctcatgatgtcttcatattagtatctgtcacagcaagttggacagtttcttatgaaaattggagtctcggctgggcgcagtggctcatgcctgtaatcccagcactttgggaggacaaggtgggtggatcatgaggtcaggagttcgagaccagcctgaccaacatggagaaaccccgtctctgctaaaaatacaaaattagctgggcatggtggcgcatgcctgtaaccccagctactcgggaggctgagacaggagaatcacttgaacctgggaggcagaggttgcggtgagccaagatcacgccattgcactccagcctaggcaaaaagagtgaaactccatctca

SEQ ID NO: 195513 - DNA, 185 bp, Homo sapiens
tctcaaggtattgggattataggtgtgagccactgcatctggcctcaattcacttttaaaatcaaaattaggttacctactttttataaggtaatgtatagaattattcttttaaaaataaaaccgatttggacagtgtgagattcacattctgtaaccaccagtgtgacatgggtagtcacaga

SEQ ID NO: 195514 - DNA, 406 bp, Homo sapiens
aagtttccaagatggtgtagaacatcagagaggggctcttggagattatctggccatcgtcaccccacctgcttatagatggaaatgcatagactcagagaggttgggggacatatgggcagctatagaaatccagtggacctcaaatcccgacatttctaacctgaattaaattctctcacccttgtatggaggtcctagagtcctattttccaaactttgcctctgaatgtctccatgtcaaagggtttctcagtgtgccagagggcaatggagaatggagcagaaatgaccacagaagaacaggtgggaagattcctgcaacagcaaaaattctgctgcccggttcctgagacatgaagaatgtgttgtctacacaactacatggccagctgcctccttaatt

SEQ ID NO: 195515 - DNA, 634 bp, Homo sapiens
gaggctccccgactagtccaaccatacagaggaagagtgaaatgctacaaagtttaaatagaagggggagaaggaagaaaaaaagaagagaaaaaaaggaagaaagaataagtgtaatttgagaagggagctaaaaaaaggtctgtaactggtagagacatagttaacaagtggcacatggggtgagaagcaggtaatggtatctgatagtgctagatattactataagatattttgggcagttctaaagaaaatgagattataaaactttccttgagcaatccagcgatagtaaggaaattcagtaaggttttaaggaaatccaataaggttattatcttccatgatgatgatttttgtcattaacattcacctttgtatctctaatacctaacactaagttagcactaaacaagtttctattgaacaattagattttgaactgtgaagatttagtggaaatttatttggtaattcttaaccattgcattcataaaagattgtgcttcaatttcctttagcaacttttaaaattataatttggacctaattttttaaaagagtgaaattgtgaatttttagttattctactaaaccagcatttgaaaaaaaaataataaataacacttggaag

SEQ ID NO: 195516 - DNA, 524 bp, Homo sapiens
tatgacggttgtttgcagggctcttggtctgggccgggtgctcgtcggagtggccagtggccttcgggggtggccccacagcggcctggctgtccccgtagggcatcacacatccaaggacatggtgaggcctgcggcagccctggaggtcagaatgcctcttcgccggcacagcagccatgaagggcagccacgggccctcatccgccacgaaaatggcggcggcggtggcggctgcggtgttggagccagcagtgtggcacctcagcgcggcgctgccgcagggagacgcgtcacaggagaaggtgggacagaagcaacaggatcttcattcccggtcccacagccatcaccggaggcaggggcagcctcattgttctgccttccgggcactgtgtcctgctactgcatctgctctttctccgagccaccccgccagtccctgcttaccgcagaggtgcatccgggccaagccctgccctcaacgctgtggcaaccccccaggccctgcccttcgcggccgc

SEQ ID NO: 195517 - DNA, 347 bp, Homo sapiens
atcctaccttactgttcttcaagacccatttctaatgttaactgctttgtgaagcttcgcttactctcttccatttttgttcttgtagaatttttataaaactcttttatggaatttcttacactttgtagaaattatttgtttttatatttgtctcctctactggaatatgtgccccttaagggcagagaaaatacctttcatttgtatctccagtgttaccatttttcacagcttataatagatactagtaaatgtttgcagcatgaatcagggcaaagagaataggataagatggaagaaatggagtaaatgcttgtcaaataaatttgttctgtgcccattcc

SEQ ID NO: 195518 - DNA, 198 bp, Homo sapiens
aagctattgcactcagtgagagcccgatttgttcgctttgtgcccctggaatggaatcccagtgggaagattggcatgagagtcgaggtctacggatgttcctataaatcagatgttgctgactttgatggccgaagctcacttctgtacaggttcaatcagaagttgatgagtactctcaaagatgtgatctccctg

SEQ ID NO: 195519 - DNA, 248 bp, Homo sapiens
actctagaggatacccccttccgcacagtgagctatgatggtaccactgcactctagcctgagtgacagagcaaggctctgattaaaaattacacacagaagtggcagatagattcctggtagcctataatgtcagaacataagtgctttgtgggctggaactttggcttgcttaccactctaaaccccagctgttacagatctgatggatgaatgaatgattgtaacaactgctgattaataagcca

SEQ ID NO: 195520 - DNA, 271 bp, Homo sapiens
tccacctgcctcggcctcccaaagtgctgggatgacaggcttgggccactgtgcctggccatattatgtatatttttaaaaaatttatgtagggtgactattctagggggtaagaattttcattaatgatggggtcatttaagtggcagtgggaaatgtgtagtccatactttaatgaaaaaggattgttagtgatattaaggcaaaaagactaaaagggcagtacttctgtttttgcttttgggaactataaagggctccatatgtttta

SEQ ID NO: 195521 - DNA, 543 bp, Homo sapiens
ctctgctaagccaagtgataaagagaaaatcttaattgtaaaggaagggaactagagcaaaaataaattttagtagctctgttgaacattaaaaatacaccataactatgtatatttagcctacagaactgtgactttttgggaaggtctcacagaaaactcttcactgtgcactcatttgttcatttatgcaaaaacatttattaagcatccaccttctgccaagcaagtggtttgtggcacttcagagacatcagtgaataaaatcgccaaagcccttgggcagcttaccaactaactacaagtgtacccaaagagcaaactactgagtgtctttcctgcctcatttatataatttttcagaaacacagagcaccccacataatcatccttattcctcagaacatcagctctaggaacatccctgggcacaggctgccagggtgcagcagcttagctgagagctgtggtcctgacattcaaactaggccaccgggctctggtcccacccaccaccttgtgcttggctatgcgcagatcaga

SEQ ID NO: 195522 - DNA, 384 bp, Homo sapiens
atctttcttgcctgctagctctgaagagattggctgatcctgatgagtgggattcccccagcacagccaacagcattgctaagggacagactgcctcctcaagcaggtctctgaccccatgcctcctgattgggtgagacctcccatcaggggtcaccagacacctcgtacaggagacctctggctggcatcaggtcagtgctcttctgggatgaagctaccggaggaagaaacaggcagcaatctttgctgttctgcagcctccacaggtgatacttaggcaaaaggatctggagtggacccccagcaaactccagcagacctgcagaagagaggcctgactgttagaagaaaaataaacagaaagcaacaacagcaatggca

SEQ ID NO: 195523 - DNA, 409 bp, Homo sapiens
agcatatttggaggaagaagatcaggaaattatttgggacatcataagaccagtaggcaggtggatatatgcatcttgtattcagaaaaggaatcttggctggagatctaaatttgagattctccagcatgtgactgaatggcaatccaagaagaatgcatagatgatgaagagagccctgggctgagccctaagaccttcttcttgtttaacgtggaaggagccaacaaacaaggtagcagaagtacagtcagaggcaagaccacactggagggtatcacattctagaagttaagtaaagcaagtatttcaaaataggacatggtcaactgtgtcaaatgccactaatcaagaaatgatctcctagtattgccatgggatttggcggctgtagagcttgatgaaactt

SEQ ID NO: 195524 - DNA, 1012 bp, Homo sapiens
tccgggctgcaggaattcggcacgagcagctgtctgtacacctacccacacacgtgcttgtccccacccacacagcacactgcttccccgcatcccacccaaccacaatctgcatacatctccacacacatacggacaccccacacccacctcccaaactcacttatgtgccgtcacacatgtgcccacccatgcataaaccccccccacccccaacacctgccccatccaaccccagccctcaccaactcacccactgccacccatgccttacacatgcacacagccacaagccactcccatatgtccccccccaacacaaacatactaacctcccctcgacacaaacataaacttcttcccacctggctcgcccaccagcacacatgaatgcacctttgctgaggctacttcctggccagggttcctgcaaggtgaggcctccatttgtgtagagccccacttgggggatacaggctctgccttgggcatgacacccctgaggatactggggttctaatcaggcttgtactggcccatgagcggaggaccaggcagggagaggcaagttgcgaagacccatgtctactgcctcctcctttccatcagagattaggtcctaaaacggaggtgtcacttacggagaagtatcccattgtcccgacccccagctccacagccttggctcagtgatttttgcccaggggagagacacaccataaaacagtgagcttcacacctcatcacaaagaaaccgatttcatttttaacagagcaaagacagtttcaagcctaatgttgagaggcatttggaaggagattggtaaattcactggagtaacagactaaactatagactggctaattgctagagaaaactaagaaaagagagacaggagaagccttcctgtggtcataacaagtctcacacaccccaaggactgatctaaagagcacacagcatacaaagaaacatttattcaataaaatcttttaaaattcagtaagaaca

SEQ ID NO: 195525 - DNA, 130 bp, Homo sapiens
taaaacaagaagggtgacatgttggtagctgttgaagatgggtgttagagacatgtgggttcattacactattttgtctctgtgtgtgaatttctgtaaaaaggtttttgtttttttttctttttttttt

SEQ ID NO: 195526 - DNA, 649 bp, Homo sapiens
tctcaaactcctcagctcaagtgatctgcctgcctcggcctcccaaagtgctgggattacaggtgtgagccagcgtgccctgccctaggatatactttttatttggttgtaaaaagtatgtggtagttaaaaaaatagatttgggacttaattctgagttaggttactggccctgccatctactagcctaatgattttatgcaagttttaactctgagcctctgtttcctcatctaccaaatggacatgtttgaggctacttgcctcatagagttgtaagaacttgaggtgatgtatgaagctcttagtgtagtactggagacaaggtcaagtgcttgcagtctctgaaatccttggtgaaacaggcaccctttaccacggtgtcagtgctaatggaaatgataggctggagtttgagaatgtagctgaacctccattgcctgtgtcagtgctaatggaaatgatagggtggaagtggagaaggtagctgtatctccattgcttgtatctggtattgttatcctcatgctgctttgtcacatcctcctcgcttgtactttcttcagtctcaagatatctatgcctctatgacttttatagtgaggtatagtttacgaagtcacttccatacatatcttatttgacatga

SEQ ID NO: 195527 - DNA, 530 bp, Homo sapiens
  misc_feature (41)..(41): n is a, c, g, or t
tcgagtcgtgaccgactgcaatctgtgctcgtgaattcagntgcttgttcggggcagtggaaatgttctaaaactggattgtggtgatggttgcacaaccatacacatttgttaaaaataagctgagtcgggcgtggtggcaggtgcctgtaatcccagctactccggaggctgaggcgggagaactgcttgaacctggaaggtggagattgcagtgagccgagatcatgccactgtactctagcctggatgacagagcaagactccatctcgggaaaaaaaaattaagaaattaacgttgatacaatattactttgtaatccacagatcccatttaaatttccctaattatcccagtaatgtcatatgtaggtccaggatgcagtctagagcatgtgtgctgcatttagctgtcatgcctctttagtctccctcaatggaaaaagttccatagtcttttttatttctgttgaccttgacatttttcaagagtacaggtttgtggaatgtgcagcttgggttggctgatg

SEQ ID NO: 195528 - DNA, 469 bp, Homo sapiens
agtgcaattacttaggccctcaattccaaattaaaaagaaattccttaatatctgatcatttattgtaagtcataattttaaccttatgtatatttttatgtatcctcaaatcagttctaaaattagcatcaggaaatagctaaagaaagagaaagtgtcagcagttagtaccaggtaattttatcactttactgtgtactctgagagagaagctttttgaatggaagtaagagtcatgatgatttagattggactaaagcccaaatgctcatagaacttttatactagtaatatgtagatacatgcgtgtctttcttccagaagaaaataatctataggaaaccatctaaatctcagagttcaagagaaaaaacttcaagactatcaaaaattccttaagatgactgagaaaattgagctaaatttatttgaattatttaaccaaaagagcactcctctatttttgac

SEQ ID NO: 195529 - DNA, 241 bp, Homo sapiens
tctgctcttggaacccagctgccatgctgtgagaaccgaaactagtccacattgggagaccacatggagaatacacaggtatgttttctggctgacagaccagctgaggtccctgctgacagccagcatcaactgccagacatgttagtgaagactgctggagatgattctaatcctcagccgttgagtcacaccgtcctctccttgccttcaagtcttcccagctgaggcctctgacatc

SEQ ID NO: 195530 - DNA, 292 bp, Homo sapiens
acagacaaattggcacacaggaagtgcccaataagtaatcaccaaggctcttcactgcccatcctagctgcttccgaaacaaaacaagccaaagggctcccagcggcagccctttttcctgaactgacctacgcaggaaagagtccttgccacaattaagaaaaatctttaatcaatacagttgaaaattgaaacattatttcacaaggaacagccattaaagccagtggttaccaagaagtgagtaagtagaagaccagccccttgttgaacgtaacaaactacatgtctc

SEQ ID NO: 195531 - DNA, 403 bp, Homo sapiens
cctgcacttggttgacagctctgctgtcacgttcttgaaatcttcaacaattttctctttgaacttgtattttgtaagggagccagaggagcatgaggatgagcagaggagacaggcggaagaagggagagagctttatattttagtaccttcagtggcacatctcccctgccttttgaacaaaagacccacaaattatgtagcaggctgtcagcagtcctgatggaaccccctcccatgtaaccagccaccgcacaaaggagggagttaaagactaacaatcaagctgggagcactggctcacgcctgtaccccagcactttgggaggctgacgtgggagaatcgcttgagaccaggagactgagaccagcctgggcaacatggtgaaactctgtctctaca

SEQ ID NO: 195532 - DNA, 477 bp, Homo sapiens
aacctattcatgtaacaatatctgtattcaaggaaatctggaaaacaatctttttttttttcccctgagttgccatacacctgcttaacatgtctacttttatagcaagggagaacaattattgagagataagtagcagtctctgtcatacttttgtagaatcttaattttgagaagctgtaattaatcttgtaattaatcatttgtatactttttcaaaaaacattcattgaatatctaacatctcactaccaagagtagatcaggacctcctgttccactcttatagattctaatacctttcatttgtaacattagttaataatattatgattttgaaatttgattaaagcttatctttcccacaagactttagaccccatgaaagtggatattgttgttcatcattttatctctaatgcctggcacctactatgtgattgatgtataatttttgcataaataaataagtaaata

SEQ ID NO: 195533 - DNA, 213 bp, Homo sapiens
tgaatataggataaggaggaggaggaggaggaaaaggaggggttagtcttgctttctcaggagtggcagaggtggaagaaaatctgtgtgtaagtggatccatgcaggtcaaaaccgtgttgttcaaaggtcaactgtactcacttttaccaaagagctgctggacagggagagggaggaatgtggaaaggggcatgttgatgaaaaagtgca

SEQ ID NO: 195534 - DNA, 362 bp, Homo sapiens
gttcctggcacagttcctaaaaccattggaatttcctgagtagtagtatcttttgttattcctaatgagcccctttgaactatctctgagtttaggctaataaagttactattggtgggctcctagatagcttcaggatggaggctggtggccagaggaaccagccatgtgcttagagagaaggggagagaagttgaattttggataaataactcaggatagaagtctaggagtcatcacaggctcttcgtgccttcccaccctccacatctgcttggccatcaagaaccactggtctgtctcctcactgtctcttggatccatttcctcttctccatatccatagccatttccccaaatca

SEQ ID NO: 195535 - DNA, 504 bp, Homo sapiens
tggcagtgattctgaagcctgtagaaattatcaggttttaagggattgagagttcaccagtggtccactcttggtgaagtaggatgccttgcttggtattgttaactcccacatcatctctgtgccaagaaaaagacagcacaatgccaccaacatctaaacagtggcatctaattgatttcaatcttagttcaacagtgtgaccagaaggatgtttcaattaccatcaccatatgggacactgagtgtctgattagtagggatgctcctgttcttcattctttaggcaactactcattattgcataagatgttgtctctgatgatgaaattgtatcccaatggactcaaatagtatgcatagaaacttgaaggtgtttcgcttacagccagagtgcaacagaggttttggaacaagctgggtcctaccagagccagaggtgtagcagctgcagacttccactctacccgcacctcacatattagttgtgaatttgataaatgc

SEQ ID NO: 195536 - DNA, 398 bp, Homo sapiens
gcaacggttttgggagcaaaaccttgataccaagttttactcaaaacagaaagtgccaggtagggaacagaaaaggaaggcctgccggtgcgtggcttttcccagagcttggcaaaggccttgttaccttaaatttctagcctcaaaaataaaatgctggtgccacactccccgacacagagccggcctcactgctgagtgtgagagtcaggcttgaaacatctgccttcccttgaacgtgctggtgggcatcgctgtgcaaagcatgacacctgaccccgtaggaaaccccttcttactcatttgcagtgtcactgaaagaaacttatctcctgtgcctgttaactgtcaggtatcactaaagttaaagcaataaagctcacttaagataaaatgga

SEQ ID NO: 195537 - DNA, 301 bp, Homo sapiens
taatactggaccggaaggtagctgttactgaaggaaagagcggtagggacaaggtcaaagaggctggggtgggggaccaagttctgtagggccctaaggatttggtttttgctctgagtggtgccgaaggctactgggggttgaacagaggagggaaaagtgacttctggatgtggtggtgagaataaactgcaggaagcaggggttgaggcagggagcacagtgagagggctactgcctaagccaggaagagggcacacagagcttggaccactgggcacagtaacagctacactggggg

SEQ ID NO: 195538 - DNA, 275 bp, Homo sapiens
agcactttctccacggaagtctctgactcatcgttcactgttcccatgggtgactgatgacatcccaaactctgaaggctggtgacaatccaagtcaggaatatctatcacccactacccacatgtgtggaggaagcattggctctgatgccagaaactcaaattagcttttgatatttaatgtcatttaatcttgtctgtttacttatttaaaataactgtgactttcttagttttcagtatgcattaaagtacattttgtacttgatggaaga

SEQ ID NO: 195539 - DNA, 415 bp, Homo sapiens
atggggtttcaccatgttggccaggctggtctcaaactcctgacctcaaatgatctgcccgccttggcctcgcaaagtgctgagagacaccatacccagcctaaagggagcgattctattctactattcttccttctgctaatccttccattctttaatttaataacgaagattttttgagtacctgtcatataccaggtgctgttctgggccctgggaatacagctgttaacaaaatcatcaaaccacttccctcgtggagcccacattgcagtgagagagacaaacacgacacacactctcaagtccttgaagataaagaaaactgggtaacggagagaagaggccagggtttgttctataatcattaataacacgagcagtaagaagtaaaatttatctaagtaacaactta

SEQ ID NO: 195540 - DNA, 166 bp, Homo sapiens
ggcagaaagcaattgcaataatccggatgagataattgtggtttggaataaggtgttaacaacgggagataaacagtggccagattttatgtgaatcttccctttgatctgtggaccaatataacaagactggagagaacacacaatttcctccctggatatacat

SEQ ID NO: 195541 - DNA, 450 bp, Homo sapiens
tacagagaccgaggtagctgcctctgtgaaaagacattgacaacccccagccccatggaagagctgcctgggaagccagggggacgctaggggccctgcttccatttccaagtgtagcaattccaatcacagcaaaattattttttaaatgttaggcacactctcatctggaaattgtgggaggtgaatcccatagctgtaacacgtaggcaggaattctgcttcttcgatggctcactttcctctggcaacatacgtggcactgagcctgccccatcaagagtccaggattgtggagagacccagggtcacactctccagtgtactcttcaaaaactaaaatgtgttatgcctgcacagtgcttgtgtggtttgccgttggccaatgaaccccagactgccttcctcgtatacacatcctgcaccaatagttgcgctatccttaaagga

SEQ ID NO: 195542 - DNA, 390 bp, Homo sapiens
aacctcagaaagagaagccttggagtgaaagggcagagctggctggaaagtggataggagttgggagacagcaaaaacaacaacccttctgagaatacactctaagctttcaaaacgtcagcttgccgatgataggtcctgtacttgaacttcgcctggtgaaatcaccgtgccttggaccaagtcaatagagcctgcctggccaccagccaagggttcccctgttggagtttcacctaactggagaaaggacctctctgaggccatctttgtggcttctgtactgaacccagtgtctggtgtgaaatggcattcaaagacaaattgatcatgttaggggtgaaggagaaaggactcagggaggggaggagaggctcaaaagggcttaca

SEQ ID NO: 195543 - DNA, 186 bp, Homo sapiens
cttaagtggaatgctccgtatgcacagccaagtactggaagtcagacatcccctgaaatttgttagcattttgagtatttttattgactctaatgtcattttagagcatgtttatgttcatttttactttctactggtatttgacagaatttagtaatctctgtattttaaaatactggtaattga

SEQ ID NO: 195544 - DNA, 385 bp, Homo sapiens
ggaccattgttttctgcaccctaatacttttagtagccatttctgtgctacaaaaacacctgaaatggtgtttcaggtaagcagaaaaaagctcctggcctctagctttcctatttccaaagctcagctagggctctttcttgggttctttctctgagctcaggcaggggatagttaagcctacagttcagttctctgagattcagtcataagtcactcttgctacaatcttctgtgattttgcatttttctttgggtcactgaagcagtatttacctaatgtgcctgtgaacactgtccactttccataaggtcacagtgctgctggcttctgctggtagccttccctgcaggtgactgctcctgactgagctttaggggaatg

SEQ ID NO: 195545 - DNA, 520 bp, Homo sapiens
tcaagctcaggcccttctctctgccttaagctcagagacgcagagcaatttgctggatatcataaaacagtggtgatgcacccggtctgacagtggatcccccagcctctgtagcacctcaagcctctgccggggcgctccgatccacattcaccaagggcaggtctgtgcaacctccagacaagctcctggcctctcttctagcccagccatggtaagtctagctaaacgtggctgggcatgtctccactgtgccagccaggaggaaaactcagaaatgtctttcttggtcaccccagtgaactggtacaagcaggaaagaatacatgggaagaaaagtaggatggagtctgtccctcagatgtggacctgaggcaaggctactgcattcatctccgggtctcagttctcacctgcaaaatgagtggactaaatcccaaccaataaagctcaaaggaggcaacagtaaagatttattcatttaggccaggcacgtttgctcgcatctataaatccaaca

SEQ ID NO: 195546 - DNA, 634 bp, Homo sapiens
tacctaaatggctgtcccagacattccgaatgtgcccgtatcttctgatgtgcgattctacctcaaggcacttgtctcaagtcactaatcattagatgtgcacagatatttagctaaaggatattcatcacagcacttcagcctgcagagtacaggtctcacgaacaagcccaacaacagggaaataaaatcacggtgcctcactgccatgagccactaagaggctgctaaaaataatgcagacatggcaatgtctgtgaaaattgaaaatgcacataccctagtggaaaatacagtaggatttaaatgaccatcaataggggattctttaattaagctgcacccacacactggactacacagccattcgagagaatgaaccaactccatatggtagaaaaccgactgaggccaagagattaatcaagcgaagcgcaaaactacacgactgtgtgtgtaagggaaagtgagaagcacagccatataggtgaggatcgtgtgcacacacacacctgctccgagaaaactaaccgctgcttcaggagagaagccgggcaacagtgaacgtggtcgggcaggaggcctgctttccagacttagtacctttgaatttttctaccgtgtggttctctgt

SEQ ID NO: 195547 - DNA, 352 bp, Homo sapiens
gttgaagatgaggagtctcggagagcaggatggtggtgacattcctcatgtcagctctcgaatttttttgtatttttagtagagatggggtttcaccatgttggccaggctggtctctatctcctgacctcgtgatctgcctgcctcggcctcccacagtgctgggattacaggtgtgagccaccgcacccggccgattgtcttcatttttaggaaagttttaggttcatggcaaagttgaatagaaaatacaaagaatgcccatgttcccctgttcccacatacgcatagcttccactgtcaacatcccgtatcagggtggtacatttgttagaactgatgaacctacatt

SEQ ID NO: 195548 - DNA, 344 bp, Homo sapiens
caatgccaataacctcctccaaagaggagtttaaggtgtaccatcgcaaattattggcttgtgtgggagattctaattttctgttggtttgagtcatcctaaaaaatggttcatttaatcattcattccttctgcctttgctagtttgcccgaagttattaagattatctttgtgttttcatcctcaaacacaaatgtgtattgcgcatagccagtgtgttttaaaagatcaagacttttcttaaaatgatgtcgataacttccaaaggcaactgtgaggtttttttgttttgtttgtttgtttgtcgttttcttttgttttggtctttggaggttattgggat

SEQ ID NO: 195549 - DNA, 462 bp, Homo sapiens
attgtggtctggtcttagcatgaatacacggttaaacttctacaggcacggtatatgttagagtacccgatttcaatgacaattgttcaacagctgtcctcgaaaaagatgcagtttgcagttcttcaccttccgtggttgtctccgctagaacactgaataatagatacactggcccttatacatttgcactggaagagaactacaagagagaatatcatgaaaatcctgcaaggattttaccattgaagacaccgtcattgctacagaaaaggccatgaaagctaccgagcctgaaacaaattcccgccagagaaaatatttgaattctagttctgcccccatactagctgatcttgggcaaatgattttatatctttgggtctcactttctttatctgtaaaatagggaatgatgttattgccaacaccttgttgttataaggatataaatatattgca

SEQ ID NO: 195550 - DNA, 148 bp, Homo sapiens
caatttattatgacatgtttaagcttataaaagtatattgtaacgtgtttggtttgaaaggataatcataacacaaccaaccaccactcaccttaagtcgattatcaatatctttgaagccactctgtattcctcctttatctcagct

SEQ ID NO: 195551 - DNA, 128 bp, Homo sapiens
agctggacttcaattaaaaaaaaatgtattcatattgttgtgcatccatcatcacaagcaattttaggacattttattaccctaaaaagaagccccattcaccttagctgttactctccaattcccct

SEQ ID NO: 195552 - DNA, 306 bp, Homo sapiens
tatacctgcaggagttgtttcaacgtttaaaaatgccatatctgctaggcacggtggcccacatctataatcctgacactttgggaggctgaggcgggcagattacttgagcctaggagtttgagaccagcctgggcaaaatgaccaaaaagaaaaaaaagttgccaggcatggtggtacacgtctgtagatccagctactcaggaggctgaggtgagaggatcgcttgaactgaggaggtggaggctgcagtgaaacatgattgtgctactgcactccaacctgggcaacaacaagactgcctca

SEQ ID NO: 195553 - DNA, 508 bp, Homo sapiens
ttatcttgggcagttcttaggctatagatacagatactgcataaacatgaattggtagtgtgcatcagcaagtacagaagctcgtcaaaaggatgacaacagcttttctaggtttattttttcattttactgaggaaactatttaaacagttttttatttagccagagattgggctttccagtcaagtgagaggagaaaccatggaaatttgatgtatattgatttgagaatcattattggttaatgtattccaaactttttaaggggggaaatggtttggaaaatcaaattgaaatgaaatctgtttgcattgggagtttgaaggtttcagccttaggcgagtacggtaggaactgagagtaaaatacctctctctaggtcatatgatctccaattattagattcattttgaagagaaaagacactgccctaatttaaaaagctgaagtgacttgtgtgaccattttctttaagatgtgattaagtacagaaggcaatcatggttat

SEQ ID NO: 195554 - DNA, 608 bp, Homo sapiens
ggggtaaggggtgagtgtcagccaagtcatcagctatcagaacaggaagccatcaggtaatatatcaagttgatatattgagaaggagcaggatctacctattatataatatagagataagcactcagatatatagattagaaatagtttagaaaatttagacatttgattattcgggaagtagatctgggagtattggagaaacagggtgggggagtagactgcatggaaagctctttcttagtttgtgatttttcatttatgcacataggtttcttacataacatggaaaattcaattaaagaagaaacaacattgtgttctgaggtcccaaaggtgtagtgattaattagaaagactcacaaaaccgagtgaagctgttttactcatagtttattacaacaaaaagatacagattaaaatcagcagcagaaaaaggtgcacaggtcagagtccaggagagacaaagcacaagcttccagttgtcctctcccagtgacatcgtgtggacagtgcctaattcacccagcgatatgtggcaaacagtatagaatatactccccaacaaaaagcttacctgagccttggtgttggagcattttactgga

SEQ ID NO: 195555 - DNA, 425 bp, Homo sapiens
tctagaaccttctctccaagtttggggctaggggcaaggcaccaacaaataatcatacaactacagtaagagaggtttggaatcaaggagacgaaaggtgatagggaccaacccagtcctgggctaccccagcagttagtgactaagaggaggccgggcttggcggaccctctctatggagcgctgtgcctttaagtgcggagaggactctgggttggacttctggggcactgctctgggatgggtgcagtgcggaggacaggctgggggctggggccagggaggagcaccaagtgccagaagcagggcctgcttggtttggggccgagggcccaaaggcatcaggctggacaagatgacctcacagggagcccttccagcttcaggctctttcccctgatggcacagggctaaccctccacccg

SEQ ID NO: 195556 - DNA, 599 bp, Homo sapiens
gaacaatgggaaccagtctttaaaattgggaaaatggctttgtcgacctcaaatagctgctttattagatacagtgaagcagaggacatagaagcaaaaagtaaaacagcaggagaagaagaaatgatcaaggctctcctaatctctgtcagcccttcacctttatgaccttgccttgtctaccagaacacagacccctcttactaaagattagatcctgtgctgaaagagaaaccaagaaaaaagatgacattccagaagaagacaaaggaaatgtaaaacaatgtgaaatcaattatgtgtatgtatgcttttccttttagacctacagatttgacagtgaagtgcttctcaaagtgctttcaaaataaattacctaattagctggggatggtggtgcatgcctgtaggccccactacatgaaaggctgagacaggaggattgttttagcccaggagttcaaggctgcagtgagctctgatcaccactgcattccagcctgggtgacagagcaagaccctgtctgaaaaaatgaaaactgatggacaagaagaggcaacacaatgtagcctctaggacagagcactgagctaaatgc

SEQ ID NO: 195557 - DNA, 833 bp, Homo sapiens
gaacaatgggaaccagtctttaaaattgggaaaatggctttgtcgacctcaaatagctgctttattagatacagtgaagcagaggacatagaagcaaaaagtaaaacagcaggagaagaagaaatgatcaaggctctcctaatctctgtcagcccttcacctttatgaccttgccttgtctaccagaacacagacccctcttactaaagattagatcctgtgctgaaagagaaaccaagaaaaaagatgacattccagaagaagacaaaggaaatgtaaaacaatgtgaaatcaattatgtaaaatttcagagcttccaagaccacaagcttaaaataagtaaagaagacagtaaaattcttaaaaaggctcagaaagatggatttttgcatgagacgcttctggacagagtctcagtcatagtctgccttcatctctgaagggaccaggcgacccacggagtgccttggcagccgcgtcattgcatgcaatcttcacagacaagatctcactgcaaccacctttctacaggagcacaggtgtgatattatactgatgacatcattctcagagaaaattcattttacaaactaaggacacacagaacaaagaaggcttacacaaagggaatggacctttcccaacacagtagtgcaaggccctgccactttgcttcaattcctgaaaattccttggtaaatatggggctgccctattcctgagactttcaaaaaatagttattcatcctctcagcgtctaaaatgttaatacaagcctaatattctttaatctgtgttttgttttttggatgacagagtgaggctccatctta

SEQ ID NO: 195558 - DNA, 512 bp, Homo sapiens
cctttcttattccaggtatccctaggactggagtcatgatcagtcttttcttctttaatatataaatggtgatgagtgtctgggaatgagatgccagatcacgaatgccatctgtacaaggatcttgggaagaagctcagttgcttagatctctaatcatcgatcaggtttaggaaaactgagagtcatggcatttgtatgccacaccagtaacacatccagtcccatcaagagctacatggtcgctccaagcaccgggagcggggaggtacttctatagaggtgcgtaggaaaggcaaaggcatttttgttcactggactggcacgtgcttccccacagaagctgttcaaatgcatactgtactttctggcaaaatcttgtctctcagagttgatgattaagacttttctcaaagaccagagtcaagagccaaaagaaaaggccacagaagaaaccagaatccttctcttggaagttcaaagtcttgttctacccaccagcttacattagt

SEQ ID NO: 195559 - DNA, 932 bp, Homo sapiens
tagtaagccggtgtaatcggcgaggagccacagccaggtctagcctcgccggttcccgggtggcgcgcgttcgctgcctcctcagctccaggatgatcggccagaagacgctctactcctttttctcccccagccccgccaggaagcgacacgcccccagccccgagccggccgtccaggggaccggcgtggctggggtgcctgaggaaagcggagatgcggcggccatcccagccaagaaggccccggctgggcaggaggagcctgggacgccgccctcctcgccgctgagtgccgagcagttggaccggatccagaggaacaaggccgcggccctgctcagactcgcggcccgcaacgtgcccgtgggctttggagagagctggaagaagcacctcagcggggagttcgggaaaccgtattttatcaagctaatgggatttgttgcagaagaaagaaagcattacactgtttatccacccccacaccaagtcttcacctggacccagatgtgtgacataaaagatgtgaaggttgtcatcctgggacaggatccatatcatggacctaatcaagctcacgggctctgctttagtgttcaaaggcctgttccgcctccgcccagtttggagaacatttataaagagttgtctacagacatagaggatttgttcatcctggccatggagattatctgggtgggccaagcaaggtgtctccttctcaacgctgtcctcacggttcgtgcccatcaagccaactctcattaggagcgaagctgggagcagttcactgatgcagtgtgtctgggtacatagcaactccatgcctgtttcttgcccgggcgtctatgccagagaaggcggccctgtagaacgcccctgtcaccgcggcacccccctgaggaaaggccggcattccttcaacacccg

SEQ ID NO: 195560 - DNA, 927 bp, Homo sapiens
cgccaattgctgaccgccacagccacagccaggtctagcctcgccggttcccgggtggcgcgcgttcgctgcctcctcagctccaggatgatcggccagaagacgctctactcctttttctcccccagccccgccaggaagcgacacgcccccagccccgagccggccgtccaggggaccggcgtggctggggtgcctgaggaaagcggagatgcggcggccatcccagccaagaaggccccggctgggcaggaggagcctgggacgccgccctcctcgccgctgagtgccgagcagttggaccggatccagaggaacaaggccgcggccctgctcagactcgcggcccgcaacgtgcccgtgggctttggagagagctggaagaagcacctcagcggggagttcgggaaaccgtattttatcaagctaatgggatttgttgcagaagaaagaaagcattacactgtttatccacccccacaccaagtcttcacctggacccagatgtgtgacataaaagatgtgaaggttgtcatcctgggacaggatccatatcatggacctaatcaagctcacgggctctgctttagtgttcaaaggcctgttccgcctccgcccagtttggagaacatttataaagagttgtctacagacatagaggatttgttcatcctggccatggagattatctgggtgggccaagcaaggtgtctccttctcaacgctgtcctcacggttcgtgcccatcaagccaactctcattaggagcgaagctgggagcagttcactgatgcagtgtgtctgggtacatagcaactccatgcctgtttcttgcccgggcgtctatgccagagaaggcggccctgtagaacgcccctgtcaccgcggcacccccctgaggaaaggccggcattccttcaacacccg

SEQ ID NO: 195561 - DNA, 217 bp, Homo sapiens
ctctaacataaagccttccaaagtaaaagcaagcataatctaagatttttaactaccacaatcaaccaaagcaaaattttttcacctatgcaataaatgttttacaattttatttttcaacaaatgaaacaaaatgatcaattttttacttttaatagattaagaaaaaacaggtttttctggccgggcgcagtggctcacacctgtaatcccaaca

SEQ ID NO: 195562 - DNA, 300 bp, Homo sapiens
taatgtcggcaaagattggtagagtcctcaagtttttggagaagcaagtacaatttattctggagaaacatcaaaataaacatcatgataacttaaaataatttcttcaaataattttctaaggaaaatgagaagctcataggactaaaataaaagcagcacaagaaaatgaggcatatgagcaagaaccatcagaaatattattaattacagctctacaaatattttatgttaaattctcagatgtagaagatagtgcattcaatatcttgaaaaataaaggctaaacataaaaataat

SEQ ID NO: 195563 - DNA, 458 bp, Homo sapiens
taggaggatggtatgatatgtgtatcatatctcaaaaaaaaaactgttaaaaaaaaaaaagaaaaaagaaagcaagcccacctctaaagctatggggaaaaggaggagtttggcttagagcaggcagatgagtgtcatgggcctagcacagccaagaccagggcaggaactaagggctggccatgggcctagcaacagaaggaaaccacagtgatctacttccagttcaccacatatgaccgctcttataacctctggatcaaccttacaggctcctggccaggagcctggcttcagaaggctcctggcccaccttgtctggcaaatgccaatttctcaacccacctgagaacactgagcagcagcccagttccaatggagtgagaacgagaccaatgaagcagttcctccaggtggccatccaacatccctggaggccctatttctgacacaagggc

SEQ ID NO: 195564 - DNA, 280 bp, Homo sapiens
ctttttgcagagggttaaggagctccaaaatgtttgctgaaagagagattttacagttagttagtgaaaaataacccacgactgagagtcagtttaggtgtaaccttgacccgagtgaggacatttgggtccagccctgccatattagtttgaatcccatagcttctctgggcctctggttctttgcctataaaatgagggggaaaataactagtttgaggaattcatgggtcttgatgggatccattgataaggttcttggatgaggaatccatgaatt

SEQ ID NO: 195565 - DNA, 212 bp, Homo sapiens
tgaagttggcccactaccactgccagttaatgaccatctacatcagctataagagcctagctttaacacatactgaagtttttgagttcattcaattgtcatttagtctacagatagcataaaaacagaaggaaattttacttcaagtgactgactcacacctcatattaaaacgactagtctgtcctgccctttacatatggcaccagcat

SEQ ID NO: 195566 - DNA, 276 bp, Homo sapiens
gaaaatgcctatcatcaagttcttccctatgtctatggcctagatggggtgggtgtcggatggtgctgaggcaggaagaggagaggagaactctcagtaagttgctaatgagaagagatcccagaagctagttcctgtgttccattctgcagtaacatgtcctctctaccatgagtgatacaataggagaatgggtgaacactcccactgtggtagatcctaagcaaagcatgacatggccctgccctccaagaaattttgtccataagataagtc

SEQ ID NO: 195567 - DNA, 704 bp, Homo sapiens
aacgttttctaggtgtcatgaaaattagacaattttgtatcctctattttcacaaggaaggagattgcgtaaatcaaactatgctaaagaaaaacatgaaagactgcagctacttaaaatatggaaactaatcaagaatgtctaaaccactttctgtttacccagcacatactgtatttagaaattcattcattgcttagcagtgatgctaccccatcaagttgagacttttcccaagtcctctgttctgttcctccatcctcatgtgagtaagggttttggcctttgccaggcagcctggtacaggcagtctatgttgaactctgggaggaacggtcgtcatgtgggctcccgtcagaattttccgtctctccctcggagattgcctgcatgggcgtattgtacagccggcagcggacactgtagcggctgctgctggctgcaggaggggcccgagaacgtccaacccttgctgatgctgaggtggcaaagctcttcgaggaaaagccttctgcattaactcgtggggagcatggagagagtggggacaatgcctcagccccttgtgacccctgatgggcatcatcggtgctctgaggggactctgctgtgagctccccaggaggtttgggcagtatggggctcttcaggatctcagtggcagacatgcggtaactagaatctgagcgactgcctttcttgag

SEQ ID NO: 195568 - DNA, 388 bp, Homo sapiens
gtgtgtttgctcagattacaccctgtctgtgtcattgctgctgctgttctccctctgccagacgacagcactgaaagagtggctgttactctctaacttggggtttgcctgcatccatgcataaacatttcagctcattatcttaagaaacggaggaccagagcatttgggaaccactgaatactgaatcctttaaggtttgttttctgtttgtttttattatgattgatgagattggggattctaaattaaaagtgactcctaaggattcagttaaaggatggtgtcataatgagaatgatggttttacctgggaggcagaggttgcagtgagccgagatcgagccactacactccagcctgggtgacagagcaagactccatctcc

SEQ ID NO: 195569 - DNA, 278 bp, Homo sapiens
ttaagaaaatgaacaggggaaggaagagtgttctgggcagggggaagagcatgtgcaaaggccctggggtaggaaggagcctggtaagtgtgaagaggctgggaagagggcccacatgcagaagagagatgatatatataggtgtggaggatgaccaagtcagcaggggtcagaccttgtcttttaaacttctaggaagagttctgcctttatcctgagagctacagagacaagctcaatggttctcatgaaaatagagaaatcaggctgtacagctg

SEQ ID NO: 195570 - DNA, 435 bp, Homo sapiens
caatgcccatttacaattaatcctcattccttcctccaaccccaagcaactactaatcaactttttctcttttagatttgcttttttggacttttcacacaaatggaatcctacaatatgtgggttttctgtctggcttctctcacttagcatgatgtttttgaggttgagcatccatgttatcacatgtatcagtattttgctcctttttgttactgaatagcattccgttacatggatcctgtagcagtttttttgtttgtttgtttgtttgttttggtttggtttttggcttaaatttagatggcccaaaagtatagccacttcttactgtgtgtcagatgtggctatgaaaatgtgtggtagatactaatcaaatatggcctccaacaattcgtcgacgcggccgcgaatttagtagtagtaggcggccgc

SEQ ID NO: 195571 - DNA, 276 bp, Homo sapiens
agtcccagcactttggaaggctgcagtaggcagattgcttgagcccaggagtttgagaccaccctgggcaaaatggtgagaccccatctctatttttacttcttaaaaaaagtctgaaactcaatctacaactcaaggtctttaatccagcaaagcccacattgagagtttctgagtctccaactataccacatttattggcagaaaaaattcttttcctctctgtttagagtatattgaaaggacaatatttgccatctttcctctgaattccta

SEQ ID NO: 195572 - DNA, 413 bp, Homo sapiens
gctctgctcgggaatgcggggaacccacttacgctggcatccaagacaccccacatgcccgggaccagcagaccaagctcagctttgtcagagtttcacttggcacctttagttttagccacacaatattatagtgcaggagctaagttttgatttcatgaaggacttcagaggtagaagatgcctggaaggggtgtgtgtgtgcttttggcactgtgagatgttctctctcgatttggaagacagcaagaaaaagcacagcaatttgctcccccagggttcttctgtgttttgaaggtacctgaagcttattgatttgctcacggttgccaggccattgaaaaagggtatttctttctttgcataggtacttctgggttcttggcaatcagttacagttcgtttgactccca

SEQ ID NO: 195573 - DNA, 407 bp, Homo sapiens
caaacacgcattgaatgcttagtgtttaagacactattccagggtacagtggcccacacctgtaatctcagcacttcagaaagatcacttgagcccaggaatttaagaccagcctggacaacatgacataccatctctattaaaaaaaaaaggttggctgagtgtggtggtatgcgcctgtggtcccatctacttgggaggctgaggggaggattgtttgagttcaaaaggtcaaggctgccatgagctgtgattgcaccactgcactccagcctgggtgacacagtaagacctcatcttaaaaagaaaaagaaaaagacactattcgaggcactgtgaaaaagactaaaatatactctccttgctgctgctcagatgagggagatcagatctacgtatgtggggga

SEQ ID NO: 195574 - DNA, 360 bp, Homo sapiens
tcttgtatatacatttgagaatctaattggaaaaacaaaactcaaatattaaaatgaaaacaggccgggcgtggtggctcaacaaatgccggtattgcctaagttgaattcagctttaactggcatttgttgagcccctactaatagctcattgtctaggaagtattgttttcctcctgctctataagtaaagaaccagaaactcatttacccaacattactcactagcaggaaacagattggatatttgcaatttcagtatcacatattcttaattaatgaaatttatgaatgaaatttcctgttgtacatcatctatgataagtatgcagaattttgtgcttaaaacctatgtatatg

SEQ ID NO: 195575 - DNA, 641 bp, Homo sapiens
taccattcatgagagttctgcctaatcacctcccagagactctacctcctaatactataacattgggaattagtatttcaacatatgaattttggaggaggggccccatggttttgctaggcataaccctagtggcaactctctgtgttggctccaaccttacgatagcccactgcttgagtcttgagcctgaggctctgcctggcttcattcttcaaaatctatgtgggggtagccatacccccatggtttatgcattttgtacttctttggagatggcaccacatgtaccctgccaaggtttatcatctgtgctgtgtggagggcagaccaccatgtcctgtgctgcacctgggcacactggagcctgggtgacaagagcgaaactctggctcaaaacagaaaaaaaaaattctttgttttcctccgggtcaggaagatattctcctatgttatcttccagaagtttgctttcctttcagatttacattttaatctttctagaatttgttatatttttgcatggtactaaaggtaaaggtcaagattcttccctggccctcttccccaaggatatgtcgattgcctggcaccatttattaaaaagatggttcttttctttattgcactgcagtggtacg

SEQ ID NO: 195576 - DNA, 486 bp, Homo sapiens
aagattgcatgtgtccagaaatttattcttctgttttccaatttgttggtgtatagttgttcataatagtctctgattctttgcatttctgtgctgcctgtacttatgtcttcattttcatttctaatttgatttgggccttctatatttttttcttagtgtagctaaaagtttgtcaatttatttatcttttcaaatagccaattttaaatttcattgattttttgtattttttttagtctcaatttcatttgtttctgttctggtctttattatctctttcctgctaataattttgggtttggtttgttcttgcttttctagttccttgaggtacatcgttaggctgtttatttggaatctattttttgatgtatgcatttattattataaacttcctcttagtcttgcttttgctgtatcccatagattttggtatgttgtatttccatttttgtttcaataaatttttaaaccactttctta

SEQ ID NO: 195577 - DNA, 142 bp, Homo sapiens
attaatgttagtttggagcctatagttacagatttccacctttgatttccatggaaacagggaggttactatacctacctatgctctgattgtcaaacatgcatgaagtttttgaaagtgaggctcttccttcttgaccaag

SEQ ID NO: 195578 - DNA, 274 bp, Homo sapiens
atggcggccgtgccggggtcggtggccgcggcggctgtggggctacgcgcgggccgggcccactgaggcggcggcgcagggagcggggctgcgggttcgcggcggcggcggcaggagagcggcgggagcgcgcggcgcccctaacttctagtcgggggagcgcgccggcatccgcccgccgggccggccggccgctatgtccggcgccgaggaggccggcgggggcggcccggccgcggggcccgcgggctccgtgccggccggggtcggggtc

SEQ ID NO: 195579 - DNA, 537 bp, Homo sapiens
ggattacaggcatgagccaccatgcccagcttttaaagactttttaaaaaacctatcttaagttctagttactgagagaaaatccatattgaggcaagggctttgcatgtaggtagtttattttgggaagtggccccagggcacaagagtgggatactgggaaaagtgaaattagaggaaaagaatacagtgaagtatgactactgacctagtcactgctgtgggcaaagtgggcttaagtcttttggggtcttttgaggacctgtatagaatgcctctcagtgttcactacctgagtatcttggttatagaagtggataacatttattcaccatttaccatctctcattgcttaagactcttttttttttttttgagacagagtcttgctctgtcgcccaggctggagtgcagtggtgcgatctcggcccactgcaagctctgcctcctgggcctaacactcttgtacttctggatttgcacatgtgtggtgccaggatgcagatgtcttgtctcttggtgtcagagaagttgtag

SEQ ID NO: 195580 - DNA, 355 bp, Homo sapiens
gatcgcctgaggtcaggagttcgagactagcctggagaacccccgtctctactaaaaatataaaaatcagccgagcgtggtagcacacacctgtggtcccagctacttgggaggctgtgaggcaggagaatggcatgaacctaggaggcagagcttacataagccaagattgcgccactgcacttcagcctgggcaacagagtcttgctctgtcgcccaggctggagtgcagtggtgcgatctcggcccactgcaagctctgcctcctgggcctaacactcttgtacttctggatttgcacatgtgtggtgccaggatgcagatgtcttgtctcttggtgtcagagaagttgtag

SEQ ID NO: 195581 - DNA, 268 bp, Homo sapiens
gaaaccaatattaccataggctaactgatactaaacaatagttaagttcctatggcagattacagaaggacaaaaaatgagatggataaacaaatgaggacaggccaggcatggtggctcaggcctgtaatcccaggattttgggacgccgaagcaggcaaatcacttgacgtcaggagctcgagaccagcctggccaacatggcaaaaccccacctctacaaaaatacaaaaattagctgggcatggtggcgggtgcctgtaatccc

SEQ ID NO: 195582 - DNA, 1054 bp, Homo sapiens
ccttggctggccctgtgattattaaactctttctttgctgcagcacctgctgttctcagtgcattagtctttctgggcagcaggcaagaagaactcgttgggctataacactgttgtcttttcctagaatcctatgcatcccaatcagttctgtagttctcccaggggtgatttagggattgagagtggcagccatcttggcaggatgttgccacacctcccattctcacatctgacccaccagtccccaaacttgatgttgtgctttgtttcctgtatggactgatcttggtattccctcagagaaaaatctggctgtgccgtctatcagacttcattcccacacagctgcccagacacagggcagccttcctctcagaacatcttctgtatcctgaaagcctccagtgggttcatccttcaagttaatggacaggaaaactaagaccagtgaggaatcccaacgctcatcctgccaggatagaaaggaaagcccagaggcattgcaaagagtgctgaagagcagggatttgctgtatggggacaactcttgctttgtgtttcaggacagggaacccaggagtgcaaacctcagtcaggtgcagtccagagcctgtcttgagcataatggctgctctgctctgcccccgaccctcaccacctccagcggggttcatcatcccagtttatggacagaaaaactaagactagagggggagggcttagctcctgctcggaggagaccttcaactccttcacctgcctggacttggcaccctcccaagagactgcaaccaaggttatgaaaatagcatctactcaccatccttcctcagcacacccccaaccaatccacccctcagtcccacccctgtctcaaggagactgagccccgagaagcacagcctcctgcacctcctcacctcccagcctgccttcctggtctatctgcaatgtcctcaagtcctttcccctcctcctcatccaaactccaagacctgcctcacctcaccctcctccaggaagcccccttcatggtctgggttcactccct

SEQ ID NO: 195583 - DNA, 317 bp, Homo sapiens
taaagctagagattactgctactaaaaaatttgggaatagtatctacgtttatgaatggttcagtaaaataacctcatcatttccattagatcactgatagagatgctctcaaagagttgaaggagattaccttatgctgagtattcacaacataaaaggaacagaatggagaatatttattttggaataactttgagtaatggaggaagaaacctttcaaagagagtatctatgccactggtagcccccaaataatatagctcagtgtctcaagatattcgccacttgctcatgctagaaacaagaggtctttaca

SEQ ID NO: 195584 - DNA, 580 bp, Homo sapiens
tgcatatggcaggccaaggaggtgggacgaaattttgaaatgtgctatcaaaccaagaggaaactgtgattcaagaagggagtggccaactattaaggtggcaagaggaggaacaaaaagtatccattagactagaaggataatatctgaatgttaacagtgattcactctgagtggtgggatgacaagaaacttccactttcattacgctttcctgtactttcctcatatcttgaatgaatatgtatgtatgacttttataatcagacaacagcaaactgacatttcaaaatatgttcagatatacaggtaacaattttctaaagtgggggagtggagagggaagaagtttttcatgccagtgggtagaaaaattgactggcaagggaagaaaatggggacagcaagtagagacttccttcttaataaagagaacttagactttcagccggaactgccatcttccagtaattcaccaaaaacaaacacaaagggaaagaggagaggcacccgatatatgttctctaggtcttttagaaaagatggagttgttcctttggccatgcatatgcgaatctat

SEQ ID NO: 195585 - DNA, 319 bp, Homo sapiens
actgctcagcaccaggacacagagctgcattgcttgattctgcaggctgcacatctaagaccagatgttgtcctcatacataccagccctgagaaaaaagtttcttggatttgttttcaagaaaaacaagatattgagctttgttcccttgtcaaagaataagaaactctcctattagcctttacaaatcaagacagtcaaacagatctgagatagtaactcatatctagggatcaaccaaagtaatcccctaaaggtattaggagaattttcccagatatttaagtttcattaaatgcaaagttagttcactggtacc

SEQ ID NO: 195586 - DNA, 680 bp, Homo sapiens
  misc_feature (63)..(63): n is a, c, g, or t
cctttcaggagtcttctctggcactcaagacaggagaggggcccttccctgcctagggtgtgnagggagtcttccaatggaagagaaaaataaagagaggcggatgctcaggcagctgacagaacggagggatgagggaccataagagcactgaaggcagcccaggaagatttccaatgcaagcagcaagttggtccaggttgtaagggggcagagaagggcccctctcctttcaggagtcttctctggcactcaagacaaaatcttacaaaagaggacgttcagagggaggaagagattggggttgcctttcagtttccatttttcatctctgcctctgtcttgatcaggctgctgattgtactaggactactgcaatttcttttcatcatgccgtcattgttacttccctccaatccattctcctcattgctctaggtgttgggaaacacttagtaaaatctgaatgcgacatactgtttcacgcttccagagcctttgcacctgctttctttgcctagaacacctttcccgtcttcatctgacaatatcatgtgcgttcacaggaggcccttcctggcctggccttttccgtgctcccacagtgctctgagcttgcctctgtcagcgctcactccagaccacgttactttcactttctggctcctccacacaaagga

SEQ ID NO: 195587 - DNA, 278 bp, Homo sapiens
accctaaattttcaaacccgttccaaactggcctcgttgccctctacaccggtgtgcaggatcacctctctcctgtgtcccttaggcaaccatttgtctgtttctttttccttcctgtctatgcccaccttttggtgaaactcaacctccagaagcttcctcagaaagaatataaagacaatattttttctgaggtcttgctttctctgagatttttattctacctttttttgagatggaatttcgctcttggcacccaggctggagtgcagtgacgc

SEQ ID NO: 195588 - DNA, 341 bp, Homo sapiens
cttgtagttttccatccagattttttcctaaggactccaaatgtggaataaaagttttgtcactttcaagggcaaccactttggcaccaatttcaagtaatgcctgagtcaggattccaggacctggactgcactgcagcaataggtgtggaggtctattttgttttctccatacgatttgcgccagggtctcagccaatctccgattggttacgtaacgcttaaagtctaagatggagtttaacaccctccttggtgagttcctgaaatccggatccggccacagctgcggagaggagtcagacaggccacggcggttcctcgccggcaagtgctttcgc

SEQ ID NO: 195589 - DNA, 193 bp, Homo sapiens
ctcattcttttcccctaacaaatcccattaaattatctctgtcttcctcttttgagctgctgattgtctttataaatctagtgatttttgctccctgcagtctactcacacctacgaaaggcggtttacactgttcagaatctgtggcaagtataggcccatctgacaagtagttttgtgttgggggattctt

SEQ ID NO: 195590 - DNA, 386 bp, Homo sapiens
ctgctgtgaaggctttggaggagacagaccatgaccagacacaggccctgtttctgatgctgagaagagaggaactaaataaatcctggttaacaagtgcatcagaaagctcctctaactgtaaatgcagagccctagcatgaagtggtacctgcagcctgaatgcatcgcatctgagttatgggcaaaggcagcactgcctgatggcctccttcccatgtcatctcctcaccgatgatctgttacaggtctggtcttccattttcaaataaggtctatcatttttttgtccttaataagataaaaatgaatttatcgagttttattataagggaaaaactatttgccaaatgattattcttcaataaataatttatctgagaaat

SEQ ID NO: 195591 - DNA, 343 bp, Homo sapiens
ccaggaaaaacttaaagaactagatgcacttagctaattaaatcctgttttcccctcggagttagatgatgcagcagcagtatctaatagaactagagtttaaaactacatttttgtagcataaccacagcaagaagtacagcaaaatgacaccatcagtcctgtcaccatgggcaactgctcacataatacgtcagtgtttaacttatctctcagtctatactccaattacagttctatgaccttgaaaatgataaatattggactgtaaaagatgttaaagtgtcaggctaaggctttaatactatcttaataaacacaagtattcacgtgttactttact

SEQ ID NO: 195592 - DNA, 239 bp, Homo sapiens
tctcaaagataatgttaacatatgttgggataaaccctttctgctttacctcttcttgttatctttttcttattttagattgtgtagtgttacagatatatttgtataaccagtggtatattttatgtactctatgaaatttctcttctctcaagaaagttgtagactagccatatttatcttaggttgaagatcatatgttctgttttgccctggacatttctggttgtcatagggta

SEQ ID NO: 195593 - DNA, 189 bp, Homo sapiens
tggctggtacatcatccctccttatgctcatccctccttatgctcatccctccttatgctcatccttcctttcgtgaagatttctttcattctttccagaagcctttcttccttgctaataagagaaaatgcagaagtcctacccacaggcctttgctaccctatcaagcagggaagcctacctgcctt

SEQ ID NO: 195594 - DNA, 183 bp, Homo sapiens
gcagtgtggtggccaagggcagcgtagaaaaccagggctcttgtcccaaaagaggagaggaaagagggttttgcagtcaaggaaaaacagaatcaaaacccaacatgatcgaagagaagccctgaatctgcatcagagggaggggccgtgggcagtgtcgcaacttggctactgcggcggcac

SEQ ID NO: 195595 - DNA, 568 bp, Homo sapiens
aggaggtgaaggttgcgagcagagattgctccactgtactctagcctgggcaacagagccagagtccgagtccgtctctaaaaaaaaaaaagaactgaatccttaactgtgattactaacagtactggaataagtgaactatctcccaaaaaaagtaaaactactggggaaaccaatcttaataagtccaaaagggaagacaaaactactactactcattttcacacatattggagagttggtagtgttaaaatatactggagcccaatttcatttttcagaactctgctgcgtacttgggatgttttttgagacggagtttcactcttgtcgcccaggctggagtgcaatggcatgatctcggctcaccacaacctccgcctcccgggttcagttgattctcctgcctcagcctctcgagtagctgggattacaggcgcctgccaccaagcccagctaatttttgtatttttagtacagacagggtctcaccttgttggccaggctggtcttgaactcctgacctcaggtgatccacccgcctcagcctcccaaagtgctgggatta

SEQ ID NO: 195596 - DNA, 209 bp, Homo sapiens
acgatcgagctcgctacccgtcagacgctgaactatgtgaggcagaggttgcagtgagcctagattgtaccactgcactccaacctggatgacagagtaagacttcgtctcaacaacgacaaaaaaggcttttgaataggttagcctttctattccagcaaattctagtatcatggtcagcaaaattaaacacatagttcagcgtctga

SEQ ID NO: 195597 - DNA, 129 bp, Homo sapiens
gtgtggaccttagtcccaacaccatcagtaaagcaaatcgagtgagcagcttcccgatagaaattcaccaaagtgtgaccagcattcctccctgtctgtctggggtcatttattagtgttggataccct

SEQ ID NO: 195598 - DNA, 492 bp, Homo sapiens
atggggtttctcatgattttggtccgtgcctaccgtgcagtgcttcagtgtgtgcttgtcttgctccataactatttcagtcgtttttattaacagaaacatcatctcaggaccatgtcttgggcttgccttacgtctccacataaataggacattatagatgctttatctgtgttttcagttagcttttttttccccaacagatccaagtaatataagttgatgtgaataacagaaatcatctgaggcgcttgttgaaagcataaattccctggctcctctcctagagattctgttcctgattccgagcatctggaataggactggagcctttaacgttcagcaagggccccaggtgattcttataatcacacaagtttgaaaacatggtgctaagtgattcactgcagtaccgtgttcaatgatctctctggtacttttgatatttgagaccctaatgaacctaaataaaaaataatccgctgacaaaca

SEQ ID NO: 195599 - DNA, 532 bp, Homo sapiens
cttgcccagagaaaaggggcacaaccagacaagggctagcatgggccctgggaagcacggagttcagggtggggcaggcttgctgtgtcctggcctggcaacatacctgcactgtgttgtggtagaagaacacaaagctgggaggcagagaactggttctaatcctagctgtaccctgacaagctgtgtgaccttggccaagttactttcctctcctggacttcatatatggtttttccattctttgcatccctgaagctccatgacttaggggccatcaacttggttgtccctgagtgtttccaagaataccaacagtgcccagggttttactcagcttggagaggaggcctagagcctccctgtggtgaggaggaaagaggttagagcaagtttgggtctgcagtgctaggattagaggtggcctcacaagccaaaaccgctatactcacagccttaggacagtgactccctactcgctgcctcagtgtttccagctgtaaaaaaggacccttggtaccttcgacagaac

SEQ ID NO: 195600 - DNA, 412 bp, Homo sapiens
aaaacaaaggaagccatctctccctggaagctgtcagtaccacccctgccccctcctatgactctccccacccaaagtccttccacctccatgtcactgaggttcctcggagactgtcaatactggattgacctgactggatctgcacaacggatgtggtgatgtcatgcctctcccctgggtttcttcctggacccagcaagggaggccttcacagcttgcagtggaatatctgaggcaaaaccttgaaacagaatttcatagtatctgtcacattctcatattttctttctttaaaaatttagttgaataatttcaacttatttcactggataaagtaaataaatattttacatttgctaaaactttatactttgttccaagttttttaagtggaaaaaaatgcatgtaa

SEQ ID NO: 195601 - DNA, 231 bp, Homo sapiens
tcttgccatctaattgaaagtataatgggtttcaggtttttaggagttctaaagaattacgctttccatagagaataagaggaagaatgttctacatagtggggagagaggatgagggttggcagtgtggttaaagagcaaaaccaccaagaaagagtcagagccctgaggacgtctctgtccgcgtggttcttgattctgagccagaaggtgacttggtatagcacggga

SEQ ID NO: 195602 - DNA, 277 bp, Homo sapiens
cagctgcttgctgttggtgactctagaggaccccccgctcagagcatttcttccgctagagcctcctgagtacctgagactataccatgcccaagtaattaaaaaaaattttgttttataaagacaggatctcactatattgctcaggatggtctcaaactcctggcctcatgcaatcctcccacctcagcttgggagtagctaggattacaggcacatgcaatcacgcctggctaatttttgtatttttagtagagatggagttttaccatgctgg

SEQ ID NO: 195603 - DNA, 1240 bp, Homo sapiens
tactaaatggttctgtgggctaaggtacaaagctactaatataacaagatggaaaatgaattccttaacactactaatattataacaataaagatttttgtagcagtaaatgagtgggtattactgtcttccccagaagcaatcaaaagagtattttaaaaggaagaatcttacagtactcccagactgctaacttggacatcatctgagaagacatctggtccacctacacctgtcctaagattggcgcaagatgtagaaaacttcccacagcaactgttaaaggaactgcagctgaggattctcaaccaccacaagcatcagcaattatttctgcccacattaagaagaaatgtggacctcagactgagggcttttctggggaccaagtactactccacagctccagctcttggtggcatggacctggcttacaatcaccgtatgcgggacacagctcctcttctgactgcagcgcactcggcccgacgtgacctccacccctagtgcctgcgatctgactgcccgacgtgacgacctccacccctagtgcctgtgatctgactccgtcctgggtcttaggctctggctgcagccctgcccgcaggctccaggtcctctgcaaggacctaactgctgaggacaagcccacaagtgaggaaacagatgctcctctagctgacactaaagataagatgcctctagaaaaacaaactcctgttatacaggaacaggatgataaatgcgataagctccatgtttgtggtaatttcctacttagcaattttctcttgctgtgtcttttacaaaccatataacatagataaacctcttatttctttcttagagcctttaattttggtcatttttctctgggtcgaatttcctcaatagtggacaaaagtcacctttttttcttttttctttttttgagacagggccttgctctgttacccaggctggagtgcagcttgtgccatcttggctcattgcagcctcgacctcctgggctcaagtgatcctcccacttcagcctcccacgtaactgggactatacaggtgtgcatcaacacaaacctggctaattttttattttttgtcgagatgaggtctcactatactaatttaagtatctgacccaggctggtctctcactcctggacttaagtgatcctcccaccttgaactcccaaagtgctggaattagaggtgtgagccaccttgcctgcccacctttttt

SEQ ID NO: 195604 - DNA, 1195 bp, Homo sapiens
tactaaatggttctgtgggctaaggtacaaagctactaatataacaagatggaaaatgaattccttaacactactaatattataacaataaagatttttgtagcagtaaatgagtgggtattactgtcttccccagaagcaatcaaaagagtattttaaaaggaagaatcttacagtactcccagactgctaacttggacatcatctgagaagacatctggtccacctacacctgtcctaagattggcgcaagatgtagaaaacttcccacagcaactgttaaaggaactgcagctgaggattctcaaccaccacaagcatcagcaattatttctgcccacattaagaagaaatgtggacctcagactgagggcttttctggggaccaagtactactccacagctccagctcttggtggcatggacctggcttacaatcaccgtatgcgggacacagctcctcttctgactgcagcgcactcggcccgacgacctccacccctagtgcctgtgatctgactccgtcctgggtcttaggctctggctgcagccctgcccgcaggctccaggtcctctgcaaggacctaactgctgaggacaagcccacaagtgaggaaacagatgctcctctagctgacactaaagataagatgcctctagaaaaacaaactcctgttatacaggaacaggatgataaatgcgataagctccatgtttgtggtaatttcctacttagcaattttctcttgctgtgtcttttacaaaccatataacatagataaacctcttatttctttcttagagcctttaattttggtcatttttctctgggtcgaatttcctcaatagtggacaaaagtcacctttttttcttttttctttttttgagacagggccttgctctgttacccaggctggagtgcagcttgtgccatcttggctcattgcagcctcgacctcctgggctcaagtgatcctcccacttcagcctcccacgtaactgggactatacaggtgtgcatcaacacaaacctggctaattttttattttttgtcgagatgaggtctcactatactaatttaagtatctgacccaggctggtctctcactcctggacttaagtgatcctcccaccttgaactcccaaagtgctggaattagaggtgtgagccaccttgcctgcccacctttttt

SEQ ID NO: 195605 - DNA, 1653 bp, Homo sapiens
tactaaatggttctgtgggctaaggtacaaagctactaatataacaagatggaaaatgaattccttaacactactaatattataacaataaagatttttgtagcagtaaatgagtgggtattactgtcttccccagaagcaatcaaaagagtattttaaaaggaagaatcttacagtactcccagactgctaacttggacatcatctgagaagacatctggtccacctacacctgtcctaagattggcgcaagatgtagaaaacttcccacagcaactgttaaaggaactgcagctgaggattctcaaccaccacaagcatcagcaattatttctgcccacattaagaagaaatgtggacctcagactgagggcttttctggggaccaagtactactccacagctccagctcttggtggcatggacctggcttacaatcaccgtatgcgggacacagctcctcttctgactgcagcgcactcggcccgacgtgacctccacccctagtgcctgcgatctgactgcccgacgtgacctccacccctagtgcctgtgatctgactctgcccgacgtgacctccacccctagtgcctgtgatctgactctgcccgacgtgacctccacccctagtgcctgtgatctgactctgcccgacgtgacctccacccctagtgcctgtgatctgactctgcccgacgtgacctccacccctagtgcctgtgatctgactgcccgacgtgacctccacccctagtgcctgcgatctgactctgcccgacgtgacctccacccctagtgcctgtgatctgactctgcccgacatgacctccacccctagtgcctgtgatctgactgcccgacgtgacctccacccctagtgcctgtgatctgactctgcccgacgtgacctccacccttagtgcctgcgatctgactctgcccgacgtgacctccacccctagtgcctgtgatctgactccgtcctgggtcttaggctctggctgcagccctgcccgcaggctccaggtcctctgcaaggacctaactgctgaggacaagcccacaagtgaggaaacagatgctcctctagctgacactaaagataagatgcctctagaaaaacaaactcctgttatacaggaacaggatgataaatgcgataagctccatgtttgtggtaatttcctacttagcaattttctcttgctgtgtcttttacaaaccatataacatagataaacctcttatttctttcttagagcctttaattttggtcatttttctctgggtcgaatttcctcaatagtggacaaaagtcacctttttttcttttttctttttttgagacagggccttgctctgttacccaggctggagtgcagcttgtgccatcttggctcattgcagcctcgacctcctgggctcaagtgatcctcccacttcagcctcccacgtaactgggactatacaggtgtgcatcaacacaaacctggctaattttttattttttgtcgagatgaggtctcactatactaatttaagtatctgacccaggctggtctctcactcctggacttaagtgatcctcccaccttgaactcccaaagtgctggaattagaggtgtgagccaccttgcctgcccacctttttt

SEQ ID NO: 195606 - DNA, 235 bp, Homo sapiens
tgttgagctactttctggttttatcatcttattcttcttactgtttatttaagttctgtacatgtttgcccagagatttgactctgttactcttattctattcctttaaaagagaggtgattttcatttttttctctccctctttttcttttttcttttttgagacagagtctcactctgtcatccaggctggagtacagtggcacgatcttggctcactgcagactgcctccca

SEQ ID NO: 195607 - DNA, 388 bp, Homo sapiens
ttttataaaacagaaattaaagaagatgtgacatttggttgaatttggaagaatgactaatttactcaaaccagtatgtctggtaatgttgtgcatgtatgtccagtacccatgcatggctggcagagagagcggggctgaatcccaggccatgaagtgatcacaaacctaatatctttgcttggattccccatgggggaagtgccaaactccaaatttacttcatgacaaggtattggccaaagaggaaggggttctgacactccgttagaattaaagtatagcacattcccagttaatagaactggagataagtctacttctgattgctttacactgcctattgcaacatgatgttggaaaataagcaaagtgagtatctggcagg

SEQ ID NO: 195608 - DNA, 229 bp, Homo sapiens
cagcactttttgcagttgtgaaattgaaaaatcaattgtttagtttttaccaaaggaaaattagagttttgtatacatatttgatgaatacagtaaacaggttaaaatttagcaaatagaattttgtaagcatttttaaaatgtgtgaattctgtgataagggggtggctttgctacaatttattacaaagctaagttatatttcatacttatgtaaaatagtgttctt

SEQ ID NO: 195609 - DNA, 409 bp, Homo sapiens
attcgtaacatccaccaaactcttaggattaattcaagcttataacatagtccttcctatttgacagacttgagaaggcaggatcttttaatactttcaatttgctttttattctcttataccctaaatatttgatgaaatattcaacccacccattgctaatggcagcttccactttctgaacatctacatatgggtcagggatgttatataataatatctctacaggcatatggtctcaaaactcctgggctcaagtgatctgcccacctcggccttccaaggtgctgggattacaggcgtgatccaccacgcctggctttttgatttaagtgtatgatttattggttcttactctattcacacatttgtgcagctctcaccgctgtctaattctagagcattttca

SEQ ID NO: 195610 - DNA, 659 bp, Homo sapiens
atgctgacagtaatctgttatacaatattttctgaatgggaaaaatattggacttgaaaggcatctcttggtatgacagaattttgttctttgaaataggtttcttgatggagtgtcatttgacaggcaggcttagtattcattgctgcaagacacagcggccatttgctttgattagttgaaagttgcatcacactgaatttggatttgtggtaggcactgatagtttttattccattgtaaatgatcattaagctttattatagtatcttccaattttatcttctggaaaagttagagctgctttattgtatacagaataaacttttgacacttttgttacttattttaagttagacctaagtcttttacctgatttgtgcccagattgacagtttaatttcctgagggcagggagcaggattgttgaagttatcacttgtgtaaaggattaacagtttatcacaaatataaggctttctcagttttattttataaacccagttgctgccttttacctctgagagtttatatatgtccagagttaattctgaattatcttccttcaccactctctactaatccatttaaagattgattaaataaaattatttgcagttagcatatgttgaataagaattagggcaagattgggccaa

SEQ ID NO: 195611 - DNA, 491 bp, Homo sapiens
ccaagaggaagataaggacctagacggaaggatgctcttcatcctatgggggagttgaggccttaagcaagacaatattaatgggcttaaatttaagagatgagataaaaggtatttaaaaattattagaatgagcactttacaacattgtgtatgcggttgaaaagcgaagtcaccaactttagtggaagaggaagaaaggaaggggtgggatctggcctaggaaaatttattgtctagaccattctggaaaaaaaaaatctatagaacctgttatccttcaagtccaatgtacattatttgaatgatggataccttaaaagccctcacttgaccactgtgtaatcaatgcatgtaaccaaattgcacatgtatctcataaatgtgtacacatttcttttaagttttgagaatcccttgtctaagccacgacatagacatgggtatattttgctggagatcaaaaaataaaaccaggtgtttctacatgt

SEQ ID NO: 195612 - DNA, 561 bp, Homo sapiens
  misc_feature (7)..(7): n is a, c, g, or t
tgccgcntgcgcacactctatattcagcaattaaaaagcaaaaaaaaagagaaggaaatggcggatcagacatgtattgaagaatttgtgatccacgcattggcattttgtgaaagcttatatgatccatatcggaattggagacatagaatttcaggacgaatccttagtactgtggaaaagagcagacagaaatataaaccagcttctctcacagtggaattcgtccctttcttttatcaatgttttcaggaaagtgaacatctcaaggaaagtcttaaatgttgcttattgcatctctttggagccattgtagccggtgggcagaggaatgctttgcaagcaatttctccagccactatggaagttcttatgcgagtattggcagattgtgattcctgggaggatggagatcctgaagaagtgggtaggaaggcagaactaactctgaagtgccttacagaagtggtacatatccttctcagtagcaactctgatcagcgtcaagtggaaaccagtactattctggagaactattttaaattgctaaattcagatcat

SEQ ID NO: 195613 - DNA, 403 bp, Homo sapiens
tgctaacatactcagtacaccatcagaaaccatcaatacacctcagaaactgaggcacagacaagttaaacagttttccttaagttatatggctagtaagtggcagggctagaatttaaatctgaacctacatctgtttgaaagttgattcttgctctctacactgtgctgtctttaagtcctttctcttcccactcacatccaatcaatttctgagtcttgtccattatattattgtagtgtttctttcatttgtccctgctgttctgttcctgctgtcctagtttaaatttccattacttttggatagtttattgtggtaatcttctcattggtcttcccacctatcttttcaccctacacagtgcttcacaatatgatagttttcttaaatacagatcag

SEQ ID NO: 195614 - DNA, 285 bp, Homo sapiens
cacagggtacagccctacaaccccggtacaacagagcttcatgcttaacctaaccgcgtatcaccacgccatagtaacacactccaacaacacagggtacaaccccacaaccctacaaccccacaaccctggtacaacagagcttaatgataaacctaacctcagctaagcaaactcaatcaaggatgatttcctgcagagaatataccataattattcaatttttccctttgagaaacacttccttaaaggtataaataaaggaagcatttgggggtttgtttc

SEQ ID NO: 195615 - DNA, 484 bp, Homo sapiens
tcagcctcccaaagtgctgggattataggcgtgagacaccacgcccaggtgaacagaatagttttccattcaccacagtttgtgacagtctctacattgtgaagtgacaagttctcttctattttccttctgcccctcatcacctttttcttcctcatttcttttttgaattttgctgtcttgaattgatgtctaaaggatgacatagcagacaaggggactgacacatgaactctcatgagttactgaggagtttctcagtgctctgtctgcatcatctgctcactctctccttcctaggtgctagcctgccaacctgctttgagaaattggaaatgaattggggggtaatcagcctccccttgtacatgtagggaccgcatctccaatgccttgctttacataatgacgaatggtgttttgcttacctacttccacacaaactgctgatatggttaggatttgggaaaggggaagaagggaa

SEQ ID NO: 195616 - DNA, 842 bp, Homo sapiens
gggctaggaggaaggctgggtggtggtagtgaataactctcacaagatctgatggtttgataaggggaaacccgtttcacttggctttcattctctcttgcagccaccatgccaccttccaccatgattttgaggcctccccagacacgtggacctagcaacacatgttctaacatgtgtgagactgactgcctctcctctatgaagagatgccagtgacagccaggactggtgtaggctctattgagcatcacagtcatatgtgagtgcccaagagaagctattcactttctcagatgcggtttgcagagggaacttcacaggctctctgggattgctcacatttggcagctaaagtggaatcaccaatccaaaatactcaccccaggcgtggggtcactcccagtggcggagatgccctgcatttccattgcctggactgaggaacagatgaaaggggaaccacaccagggtggtggcctgggatgtgcctactccctaagccaagcttctctgtcctgagtgggcttagggtcccctgcagcgtgggtgttaaatgctgcttcctaggcctcaccctcagagcttccagttcagtcgagtccaggtccctaacctgtcgtcgtccaattgattttgatcaggtgccccatggccccactttgagaagcagatcgagtccacctgtgcatcttccctgttgtccctaaaaataaggctaaaaaaaggcaccagttcaaaaatccagtttatttgtttgaagttcaggtttacagttcctccaattctcagatcgcagaagaagcatctggaaggaaatgacccctgcacccaccacaccc

SEQ ID NO: 195617 - DNA, 229 bp, Homo sapiens
agaggcttccataccacctggccctcactgctcttcagaccccatcttttcctccctcatggagctctggccacaggggctccttgctgttccttgatctggcagccaagcttccatcccagggtttttgtatttgctgtgaactatgcttggaatgttcttccccttgacaaagtcttccccttataatgtcacctcgcaagagatcttctctgacaccttacataaa

SEQ ID NO: 195618 - DNA, 115 bp, Homo sapiens
ctttggagttggaatggaacttggagatcaacccttgtacactttcatttcataaataaggaaattgagacccaacaaggtcagtccctaagccctcaacagtttgttctaaaac

SEQ ID NO: 195619 - DNA, 178 bp, Homo sapiens
acccaggagggagaggttgcagtactggagatcacaccactgcactccagactgggcacagggcaagacacagtctaaaaaaaaaagaaagaaaagagaaaaacaagaataaatcaattatttttctataatacttgccacaatcaattgaaccatgaaaaattttaaataccattta

SEQ ID NO: 195620 - DNA, 366 bp, Homo sapiens
cttctccttgtggtctttccccaatttcactggcagccctccccaaggatacctgagagacagagtcagaaatggcttccctggggatggaaagttactcacagggctcttcctgttgcttcccctacccctgtatttggctcagctctctaaatttgtctcagctcccaggcaaggtcaaattcttctgtgatctggaccttcaggttccccaatgaagatgtgtgtttgggggcaaatgatccccctttcacactttcacaccttgggcactcacagttttctggctgtctcccagagcctgcagcctgcctgtttgtgtactgggttctaatgtaaaatatatttcttcccataggttacagt

SEQ ID NO: 195621 - DNA, 135 bp, Homo sapiens
taaaagttgagcaatatcctttgtaagacagtatactgcaaatacctactctttagagcaaatactcaaacagtgtaatggctaaaaaaccaagctctgggccaggcatggtggctcacacctgtaattccagca

SEQ ID NO: 195622 - DNA, 359 bp, Homo sapiens
tgggggctggggacacagcccctgcccacctggtaccctctaaactgctgatcatgcatgacagccttgaggcagaggggctcacctgcctcagtttccccatctgttcagagcgggattaaaggcagtctccgagaaccctcccagctctgtcatcctgggagcccaacaactacattttttttgttttttttttttctttgtttggagatgggtcccactctgtcacccaggttggagtgcaatggcgcgatctcggctcactacaacctcctcctcccgggctcaggtgatccttccatctcagcctcttgagtagctgggaccaaaggcacacgccaccatgcttggctaatttc

SEQ ID NO: 195623 - DNA, 353 bp, Homo sapiens
tggtggttggacgacactgtgaatgtcctaaatgctactgaattgttcattttaaaaggttaattttatgttatatggatttcacctcaatttttaaaaactcttatagcaacaacaaaatcatacctcattgtgagatccaccagaaaagctaaaatgaaaaaagacatacaatatcaagtgttgtcagggtgtggagcaacagaaatcctcatgaactaactggtggatgtataaattggttacaattacttgggaagactggcaacatttaccagacgtaaaccatatgcataccaagcataatgcttggttaggtgctcaataaatatttattgattgaactcgtccaa

SEQ ID NO: 195624 - DNA, 791 bp, Homo sapiens
gtcatgtcttgcattttcctgcttctgccttagctccagcttatcaccatcctcctcatccatacctgttcatcagtttctgactttaagaaggttaccctcttcaggaatcagaactctgctgattcctactttctgttcccagcctgatcacctctgccttatgttctttggtgcagggctgatagtttgtgtttcttttatgaccctaaatagattgttaacccttgtgcctgatgtcagatttgttaactaggacttaccacactatcccaaggacattcaactacacttacttggtctcaggcactgtggttcaagtaacaaggaattcctggtgctgaggaggaggcagtacatctgtggccttgcaggaaaattcagaagtcaatacattcctccatccacctcatttacctaaactcattcatcaccgtgtcaaagatatatgttcctgctctcattcccttgagtaggaaatctccaggtgacctgatggtcattctgtggtcattgcttctgaccacacagttcattaagttgaccatccttgaatgacacattccgaccagggatggcggttgttatgggctcagttgtgttcttttccagttcatacgttgaaattctaaccctcaggaactcagagtatgaccgtatgtggagatagggcctttaaagaggtaattaaggtaaaatgagataatatgagtggcccctgatccaagatgactggtgtcctgataagaagaaattaggacacatacaacactgactaagggaccaccctg

SEQ ID NO: 195625 - DNA, 459 bp, Homo sapiens
aaacaccaattcaagcgatagcagatttctcatcagaagccacagaggccagcaggaagtgtcctgacgtctttcacgtgctgaaagagcagaactgtccgcatgaatcctgtgttcagtgagatatcctgcagagctacccgtaaggaatcttctccaaacagaaaggaaatgataatagaagaaggcttggaacttcagaaaggaaagaagaacgtcggaataggtaaaaccggggacaaaacataatagccctcttcttggaaagaatcatattcttatatcacattggatggttgaagcagaatttctagcaccatctgatacgggtgctcaggggaaacagaagacgtccctgagactatcatagtcaaagtggggaggataaaatggccttcgcggaagcaaggtttccacctgcatgtgaagtggttaaaagttgagaccggtcggcggcag

SEQ ID NO: 195626 - DNA, 407 bp, Homo sapiens
ataaaattatacgtatgattgcaactatgtaaaatatgttaggagaagtagaaggtaataaaaataaaacggttgtgaatagaatattgatgataggaaattgatttttttctcctattcagttttaatataatattgtggtacaaccttttagtaaaactaaattatttcatgttcatacggtttcctgtacaaagaccttcatgcacttattattttctcagagtacttattttcaaaacagaattaattcaaaacattctattttgttaattagaaaaaaaaaaaatctgctattaagattaccactagagggagggagagatcaagactatgaaggaaaatgaagacacttggttgctggaaattaattttcttttcctgggttggggtgggtatatgtttta

SEQ ID NO: 195627 - DNA, 316 bp, Homo sapiens
agcgtgtgtgtgtgtgtgtacagggagagtaagcatgtgtgtgtgtgtgtacagggagagtgagagtgtgtgtgtgtgcctgtgtgtgcgcccgagtgtgtgtgaggatccaggtggccagcagcattgagccaccccacaccacagcccctgtcccatctgggagggacactcctgtcctgcagggaagcaggagaggctgacagaggcaatgtgagctccctgtggtcactaggccatggcattaaagacacactcacccccagaactgagccctggggacggtgcccagggtgcccagagcacgagggccatc

SEQ ID NO: 195628 - DNA, 689 bp, Homo sapiens
  misc_feature (449)..(449): n is a, c, g, or t
  misc_feature (455)..(455): n is a, c, g, or t
  misc_feature (520)..(520): n is a, c, g, or t
  misc_feature (539)..(539): n is a, c, g, or t
  misc_feature (551)..(551): n is a, c, g, or t
  misc_feature (625)..(625): n is a, c, g, or t
  misc_feature (628)..(628): n is a, c, g, or t
  misc_feature (657)..(657): n is a, c, g, or t
gtgactatttctcgtactgttcgccaaatactctctgcgtggtatttgttagattggaagtgtcctgaagggagggaccctaagcatctctttggctcattgctgtttttttttgagacagtttctcactctgttgtgatctcagctcattgcagcctccacttcccaggttcaagcgattctcatgcgtcagcctcccgagtagctgaccaccctgccggctaatttttgtatttttagtagagtttttgccatgttgatcaggctggtctcgaactcctgaactcaagtgagccgcctgccttggcctcccaaagcactgggattacaggcatgagccacctgtgttttatttgtatctgaatcaatccttgaaaactttgatagctcattccagcacagctcctttctctcaaaacagcaagcaccttaatgaggacatctccttngttctnggctgagaataaatttcagagaacttcttactgtctggttttcaacctaccaggatccatccttngccttagttctaccttctngttatacggttngtgcaagtcaccatttatatcccattagtattttattaatggctgctgatggaacttgggtgacccacttgtanatnacatcccagccctgcaatgaccgcagatncgggctattctggttggtagcgaaatccattg

SEQ ID NO: 195629 - DNA, 242 bp, Homo sapiens
tgtaggccttgaaggctgacagctctagatgagcagtgaacccaaattaatttgctgactatgaagaacagtgtcactgtttgactggttgagtcagttatgtcattgggcatgaagatgtagccaaaactaaatatgatggctttagtatgaaggactgaggaaaggggcagaaaagaagcctttctttatcttatttttattattattattattattttttctgagacggagtctcgctt

SEQ ID NO: 195630 - DNA, 391 bp, Homo sapiens
atcagattttccaaatagttgccatttagcaaatgcttctgtaacaggattgtaactggtattaatacatctaatccacacaaccaccctctgtgatacatacatagccaatcttcattattcatgaatcccatatttgcaaatatgtctactcactgaaatttatttttaaccccaaaattaataatcatggtactttcgcagtcatttgtggacatgcacagagcagcgaaaaattgagtcacccaacatacacattcccagctggcaacaaatgaggacacgcagccttctgctttcagcccttgcacagagatgaccagagggggaaactgtagggagcagcacagtgtagcgtagtgtgttaacttacaccaaatttggcctgagg

SEQ ID NO: 195631 - DNA, 420 bp, Homo sapiens
aacttttggacgatgatgtgtttctaacctgtgaccatttcacatagccactcaaatatggtaaaggtatggtaaagatgatgaaacagttacttggcatcattttgtaagtaatgagtttttagtgcgctttggaccttgagaccacttcataagctttagattttgagaatttcacagcataaagctcatcgctgatgcagtaatgaaggaaatgttctacaagttaatagatgagtgagaggagagggcattcatattagatttatttacttactgaactcagagccttgggttactacttgacccccactgttatctagtttaagggtccttttattttttgttttttcgaggtggagtttcactcttgttccccaggctagagtgcaatggcccggtctctgctcactgcaatct

SEQ ID NO: 195632 - DNA, 189 bp, Homo sapiens
tgctgggattagaagcatggaccaccatgcccagccctcattcatttcttgtactagaagtggtgatctttgacaatttgttttaatatgaagttgttttaatgaggggcaaatatttggagcaattagctaatcattacaacgttttttttttttttcttgttttgtttttctcttttctttttttcc

SEQ ID NO: 195633 - DNA, 512 bp, Homo sapiens
gcaaagctacccatatgttgttgttgctgctgctgctgctgctgttgttgtttctgaaacttgggcttcagaatggctccaaaatatgactcagctgccattgtaattggggaaagtcagaagagaagagaaatttgttgccaaagcatgttttctttactcaacattcatcaggcacctacaatatgccaggcatcatgacaggcatttttatatgtactatatcccaacaactctgtgaaaaaggtagaattactcccatttctaaaggggagaagactgagatgcatagagattaagagttctgccaaaatcacacagcacattagcagcagaactgggggtctagcccagtttttctgaagccaaaggcactgatcttctccattaatcctagatgctcattggtgactttgtttacatattatgattaagggacactgctatttaaatacaaatttgtcttgatcagttgggcaaaaagatagacatcaaatgatcttaggaacttt

SEQ ID NO: 195634 - DNA, 757 bp, Homo sapiens
gaagtataggccccaggtgtgagaagggactgtccccatggctgccctctgcctggtggttttccaggctccttgactagtggctctttgcttcccagaagtggagtctgtaaaagctgtacccctccacaggacctggggcagagggacagactggtgatctattattgaaaaggatttggggctggacatggtggcttacacctgtaatcctagcactttgggaggctgaggtgagcggatcacctgaggtcaggagctcgagaccagcctgaccaatgtggtgaaaccctgtatctactaaagatacaaaaattagccagaagtggtggcaggcgcctgtaatcccagctactagggagggtgaggcaggacaattgcttgaacccaggaggcagaggatgcagtgagccgagattgtgccactgcgctccagcctggtcaacaagagcaaaattgtgtgtcaaaaacaaaaaaaaaaaaaaggatttgggcctcaagccatggaaacccagtttagagtggctggaactagtgggcttggcttcctcacctccagagaagtcagctgggaggtttgctgctcccagaggtcctgagccagacctggggatttgaacttttgtgtgtagctggggaggggagaagatgaccagctgtggcaggactccccccacacctgagaccagatggagacactctccctgggaaatgcccgaagtcccttctctcctaggggtttcttcagaggccacct

SEQ ID NO: 195635 - DNA, 122 bp, Homo sapiens
gaaagagagggagagaaatagaattcgagaaaaaaaagtctccaaaatataaacaatagaagaaatacttcaaacccaagataatgaaactcagtggactaattttagggcaccagaaaaaa

SEQ ID NO: 195636 - DNA, 418 bp, Homo sapiens
gggacaacctattaaggctcaaatctctctttctaacctttgcctggaaaaagaatttgaagtcagagtttttacctaacatttcaaaccctacagtgccacctactaggatgggagttttctctgtggggatcctttttggccctttgcacaaaacctctagttccctgattcctttctcttttatgtccctctctgtgatgaggctccatgccctgtttgtagacaggaaaattcccctttcaacagctgggaggaagctaccctagcaagacagaatttgtttcagtgctatccccatcagaggaaagacagccattcaattcttacattcatttgaggcacctgttcattatccagctactttgacatctaagcaagaaagggatcttatgtttagaagtcaattggttccatt

SEQ ID NO: 195637 - DNA, 409 bp, Homo sapiens
gcttggtttgggtagaagggtcaggactctggatgcagacaaatctgggtgtgagcacccgctttgctgcataggacaggaccacctgttgtttggtctgctgcagatctcagccacagcacctcccaccgtgagaccatgaaagggcatgcaggggagtatgagaaggctgatgttgaaggcttcgtgttgcttaattgatacagtgtgcagtatttaggtgaaaaagcccagacttcaccactgtgcaatatatccatgtcacagaattgcactggcaccccaaacaaaaggccccagactagtgaatttcccagggggccaatcattctctttccctttcaaattaaaacaaaatatatggaccaggcacatatatatatacaggctcacacctgtaatcctacta

SEQ ID NO: 195638 - DNA, 556 bp, Homo sapiens
ctgttgtgggaaggcgaagctagaggaaggtaggatgaaagaaaggagaggtagcccttctactttgttttggggtgggtttggaggcaaagggaaattgactgtcatgtgggtggacgtacatgtgaaccttaaagaacttttagcttcagtcaaaaaagacttcagtaagccatcttcttgggtccaggccagctaccagggaagtagtctacttgagggactagaaaaaccagaaaagtttctaggagagtcatatcaaattccagaaaaaattaaatgggaaaaagctgctggatgaaggaaaagatgaagctctatgaacattggcataagaattgggttcatgctaggcgcggtggctcacacctgtaatcctagctcttagggaggtagaggcgggaggatagcttgagcccaggagttcacgacctgcctgggcaatatagcgagaccccattttccacagaaagggggggaaagacaataaaaagtgtaagaattgggttcatgaggccccctttcctcaagtggggtgataggggatactcagttc

SEQ ID NO: 195639 - DNA, 407 bp, Homo sapiens
aaaaatagaggggtaaaattcagatcatgcatgacctggaagaccatggcaagaagtttggatattaacaaatagaaatatatataacatgggagtgggtggtttccaagttataaagacttaagcccctctaggagaataaagcattaattttgccatggacttcatggcatttattttgcctctgggaccatttttgcttcctttttttattataagttaaagtttcctggatccatgtgtttaaaatagaagttctttcatcactaagagctctggaaaacttctagataatgagatactagatagtagagttccaggtcagtttcctggatagctgtgttttgtataggtgcagtttctgaagctaagttagggtgtataagaaatattccagactgactgat

SEQ ID NO: 195640 - DNA, 478 bp, Homo sapiens
aaatgtaccaaattagtcaattcagtaaacttagcgaagaacaacaacaacaaaaggaacaagttggattttttggggtgaagataaaatactttgctgaatttctgacttccccaggttttgtgcatgttaggctaaggggtcacaatcaccacgcaaacaagatcggcaaacacgttccttcttcctctacctgtctggcctgcagtgatagatccctgaggggacaaactaaactctgactgaattagaggttcctttaaaggctgtttccctgtgatgaactaagtctagggtcacttgagtggggattaggggctctggcaggctcattaattctctgaaatagactggcaggacctggactaggcaaggaggctctgacagtgagggagagagagagccagctaagagttttactacgtaaattaaccacagagcaacgccttccctcttcggtttgtttctttctctccac

SEQ ID NO: 195641 - DNA, 486 bp, Homo sapiens
atgagcaattataaacaggttagaaacaggaaaaaatagtctcaacaaagaaataagacatatagagaggaacaaaatggaaattttagaattaaaaaatataaccaaaacaatatactcaatggattggctgagcaacagaacatagagagacagagaaagaatcagtgagctggaagacagattagaaattatccaatctgggctgggcacggtggctcacgcctgtaatcccagcactttgggaggctgaggcaggtggatcacgaagtcaagagatcgaccatcctggccaacatggtgaaaccccatctctactaaaaatacataaactagctgggtgtggtggtgtgtgcttgtagtcccaaatactcgggaggctgaggcaggagaatggggtgaacccgggaggcggagcttgcagtgagccgagatcatgccactgcactccaacccgggtgacagagcaagactccatctcaaaaa

SEQ ID NO: 195642 - DNA, 200 bp, Homo sapiens
cattctttctttttctttctatatcacaagtcgtcaggcaacatcattaattctttaggaaagaggttaatataggctaatgtaagttctttgtatgcattcaagaagtttgctagctaaaattttctgccaaataccttatttccttcaggcagtagaatttcatgtattaacttagtacaactgttgtttcccatggc

SEQ ID NO: 195643 - DNA, 361 bp, Homo sapiens
gcagggagggcgggtgtgcgacctttggttagagaggaggcagcgagggagagccagctatgtggcagggaatggagagaacctttgttggcctcggcttccaaaccacagacaccgagggctaattggtagcagtttctagaatgtcctcgggctactcggtaggtggagcaggactgtgcttcaccggaatcttcagaagctcaaccccaggcctgacgcgtgtggcgccggagctctgcgttcactgtgcagctgaacatcaggggctgcgtgctgccgggagcttctgtcccaggtgtggttaacactaggatgtttctaacaggaagtccactgttagaacagacaccatcgtcct

SEQ ID NO: 195644 - DNA, 258 bp, Homo sapiens
tgctgggattacaggtgtgagccactgtgctcagcccccttttgcaatttaaagagcaaaataatctataaattttaaaatgtattttatatatgtataaactgtatctggaaggatgctcaagaagtggataatttttgggaaagcagcttggggaagtggaagtcaagagatgaagggaagcatgtctacacactatacctgttggtactattcagatttttacctcgtcactatgtctagaaaatggaagaaata

SEQ ID NO: 195645 - DNA, 352 bp, Homo sapiens
tgatccaccagcctcggcctaccaaagtgctgggattacaggcgtgagccaccgcacctggccgcctccttgctaatctttaaatatgttaagcacactcctgcatcaagacatttgcacttactttctggtctctttttaaagacataacccttttcatatgataatcatttggctggtttcacttgtttggggtctctgtttaaatatcacctcctcaggaaaatgttccatgatagccgcatctaatctagcagacctgtttagttgcagtccctttaccttgcttattcttttttacagcttgtatcagtagcttggatgctacatatgtatttatcatttatctatt

SEQ ID NO: 195646 - DNA, 140 bp, Homo sapiens
aagagcaatttagtgttcagttaaataataaacactggtactgataatttaaaaaatactttttagacattcatataccaaccttccttccccaaattagcttcctaaagagaaaaacagagatttctctaccatttcca

SEQ ID NO: 195647 - DNA, 480 bp, Homo sapiens
gctgtgaagaaccacagttgattgggataagggaagggcccaacagtggcaggtactgatgggagaacgtgcatcccagatgtggtctgtgcttctttccaaagcttgacaatgcttggccagtctgtgccaaagataagggggtgagtctctgcttgggcttgggtggtgctggtggccactgtcattcccaaggtgaaaggttataagagatacacagccaaggatgaggctcaactaagttgtagtatcagggtgttcagagcctcctagctgtctggcatctcctgagatggttccaggagattctcctaaaatgaagcataatgtgctgagcttttcaaggtgtcagggacatcaaacaccatgacgatttccacactctcccactcagttaagcaggacagggattggcaaactactgcccataggctgaatttggcctattcctgtttttgtaataaagttttgttggaacac

SEQ ID NO: 195648 - DNA, 605 bp, Homo sapiens
tgctgaggtaacttacaggtaattttttctccagtgattttattatttttgtttggtcttgctagcttttagtgccttcagtgtaaataacacaaaatttatatttatttttacatccagatagtacaacttaatcaagcttcaaagactatggaagatcctctaaggacagtaaactactgccagtattaggaatttatgtcagcatccagaggtgcaagctttgaacggacaaggggtgggggtgttgtctagtgtttgaagctccagtgacttttgtttttggtactcatattcctacatttatgtaactcagaatgatcttccagggctgttggaaaaggaacatagtgattacagcttaattatctgagttccttaaaggagcaaagactaagagttcagcttttttgtttttttttttaaaagacacagggtcttgctctgttacccagtctcaaaaaaaaaggaaaaggaaaaagaaaaaacaaaaaagcaagcaggcaagcaaaaacaaacaaacaaatgaactaagatctgctcccatgttaccccaccttgctcctaaaggttggatgtagtttcttttatcaaggagcaggttt

SEQ ID NO: 195649 - DNA, 197 bp, Homo sapiens
tcaaggggcctgctcttacctgacgtgctacttactactgatttgggcatacactctgtggggttacatgttaacttgtagattttggtccagtagaaaagataaccccaaaggttgtggcttcactaccctataggacattaatggtcttgtattcagctcaacaatctttccttttttttttttttttttttaaa

SEQ ID NO: 195650 - DNA, 520 bp, Homo sapiens
aacgttatggtttctaaactgaatctcaataaagctgtttttaaacagcagtagtaagtaaagttgcatggaggttgggagtgggtgggggacagaaggaaggagaacggtgactgctggagtcagatgacgggcacgcgggttcttcggacaattttgttgactttgtgtttgaaactttccatcataaaaaattatttaaaataaagttgcaagaggctgtggtccactgagtgcaatcttccccaagcacagaaacattcaggcccccatttctgagggagggcagggagctgatgtgacagtttgcttgccactattcttcagccagatttggcaggtcgctagcaagatccccactatcaaatgctttgaccaattttcagtctccatccctatgagctctgctgaccactccctccttcctgaagttgtcccctcccttgatttctgtgatacctcaggcctggcctttgtcttacctctgaaaccacttcttctccatttccttaccacacca

SEQ ID NO: 195651 - DNA, 530 bp, Homo sapiens
cagattattttgacaaaatcattaagtataaggaaaaaagtttaattcaactgaaagataagaacttctcattcataaacagataccgtaaagagaaagaaaagacaaaaccacagagtggtagaaaatatttcaagtcataattactgaagaagacattagtatctggagttaaagaacaactgtgcagtaaaagattatcataggaagcctaagactgctatccttagaaactaagtcctgctagcaatgtttgcccttggctgttgccttgaaacttgggttgcagaaatgtccccatggatgcctaactgctgaggctagtttactgtgcttgtaaacaaccaaagtggtttatgctgaacacttgctttccttcttgagttcttgaatttttgtacatgccaggcagagagtgcctgtgtgacaagtcccaaataaaatccttggattttcaatgagcttctctggccagaaacatcacataacatttgttcttcaagattggaaagaagttaaaaaaaaaagaa

SEQ ID NO: 195652 - DNA, 503 bp, Homo sapiens
tgtgggtgaagggtggtaagagggagaggagcagaaaagataactatgtggtcctgggcttaatacctgggtgataaaataattgtacaacaaacccccatgacatgactttagctatgtaacaaaccttcacatgtacccccaaacctaaaagttaaaaaaaaaatcccagacaggaagtagggcatattttgcctaatttgcagcttcatcctcactccctaacttacgccactcatgtctcctccatcatcagggacagcaagagtggggaggggacgaggcctgccacatctccattctctgatcttatttcctcttgcctcttcaacagcgctttgtctctcctctccagcttgaagcccttactctggtatgtgatttcaaagcgatgaaaaactggtttcgttagtacttcccttggatctgcccttgtctcccatcaagcagtgcaagtaaagaatccaagatatttgttttgttggtccactggagggtagaga

SEQ ID NO: 195653 - DNA, 421 bp, Homo sapiens
cttcaattagataacataccatatgacaaatcctagataatgaaaatctattttgccaaagtattgctgctagtacatgctattttggcgactgctgacttactaggtacctcagtagtggtatgctggtaatctgcctctagaaatggtggaaccaccccaacatttctccaaaatagttttcatttcttttatagttgcttgaattccagctctatttgttatattaggaaaaacttaaaatgctatgggtgggtgcatttttctagcatttcagaaaatgcaccttttaaaaaatatttttttctcaccatttattctttacataccattgttccatttctgcctgctctttttgcacaatttacaggttgatccactctccttaggaaagaaagcattgggtattttgtctacagat

SEQ ID NO: 195654 - DNA, 405 bp, Homo sapiens
ctgagattgcaccactgcactccgcttgggtgacagagtgagactccatctccaaaaaaaaaaaaatgagtcactgtggaaattcagtgaggtagtatatgtgaggcatctagatcagtgtctggcatacacttgacatttagtaaatgttctcttccgttttcttagatcagttttatcagtttgatcaattaattgtttatttgaataggtattgattgcctaacttctctgtgtctcacatctgcaggttcttaattgatggctcacagtaattactattagtaatggctcatagtaattactattacagtaatacagcaaaagccttttagagagtagtagctgtgaggattttgagaatgggatggatctggaaaataatcttaagtggtgaaatggaca

SEQ ID NO: 195655 - DNA, 426 bp, Homo sapiens
gatatcttcctacaagagcaggtttctcactttcgatattaagcagaagagacagaggctggacgtctcaagccaaccaaggactcagctgggttggggctagattgcagttttagtggaatgtagtcttccccttgtttatctatacttgtaagccatgacactccctggattttgactgaaagcctggtatatctttatcttctgggccctgaaaaagttctctttcagaagttttcagctcatttctttatcttagggccctaacagctacaaaatttggtaaatatcttcaaaaagagttcaatggtatgtttgagtttggtgtctccaggctgccaagtccttttgtttgtttatttcctactaaaattctactgccttttggaagctctgcctttggcttcctatgcagcctcaaaacac

SEQ ID NO: 195656 - DNA, 671 bp, Homo sapiens
taagatttagggatctggaaaaagcctcttagacataaattcatttgaatccctggtgttattagtaaccattgatattttacgcttggtgcttttactcagcaaatatttatggagaacttactaaatgtcaggcttgttatcgtcactaaggacccagggatgagtataacagtacgagtccaggcctcacctcctggagctcacattctaattgttcttagccttttatgatggaggttattcatcttcaggtggaggaaaacctccagcggagcagcaggcttctgtaagctctgggaagttgccacctctgcaggggagggaaggcaggtggcccctccaaacaaccctgtgtggtagctcctgtagccagagcctctaaggaaagccccttggagcgggtggcctgagctgagcaaagccctctgccaggttcctgagccctctgactagtgcctttgtggggccactgaagtccaggtgagagggctcagagcttgtcaggccaatgagagtatgttcatttgctccctgctcccggcctaagttccagtgtggcacagcagcttgcagagaggtagggatatgggcacataggtggacaggccttgggcctgcttctgacccctggtctccagctcagagggccacagaactcgtgtggtaaa

SEQ ID NO: 195657 - DNA, 467 bp, Homo sapiens
ctgttttactacattcatcaagaaacccaatgatgctgcctcttctgctttgcaaattatcttttcacacgcgtgactccccttcttaggcagatggtttaccaagtgctacttatttggtttgcgttttgactattttttgaggatgacgtcattaatctattgctggaatctgggagagctgctgttttaaagacttactggagctgccacgtctcgagcagataaatgtggagagccctccgaggaggaacggaaagaaatctatttgcgtgagccgttatggattccgggggagagttggccgtgctcctgggtgggaaccgtgaaggagaagtcgtcgaggggtggtcgcttctcatgggttaacatcagctctaaaaggaacgtgggtttccctgcatctacaaaggccatgtttgcaactccttttattccatggagagtggtactggaaaataattctt

SEQ ID NO: 195658 - DNA, 252 bp, Homo sapiens
cctgtgctcaacccaagcctgaagcatatttggttcatagaggtctacaatgcttgaccacactgacatgacagcaagttgccagatgacactgcccagaagtatgtggctgtgtgtcctaagcatgcttggccacggagtccagaaaataatggggctgggcattgcctgtgcacagggtgcttgtggggaagggcggcttcaacccattttgtcgacgcggccgcgaatttagtagtagtaggcggccgc

SEQ ID NO: 195659 - DNA, 316 bp, Homo sapiens
tggagatattacctgaaatgggtaagatgggaggaagaggagactgcagggaatgacactgagtcgggctttgaatgtgcctcatttaaagctgtaagagttaaggatctatgagctcttagagacacctgaacaggcgaggacatggcatagtgagagaagcacagaggagaagaaccaggcacagaaggtgggtgaggccagacaactttggagtggagatgggtggtgagagaggacactggcatgtctgggggcctatacatctaagatactctctgtcaccagtcaagtagtggcctagtcctccggccta

SEQ ID NO: 195660 - DNA, 147 bp, Homo sapiens
gacagcactggcaaagatgtaggtcccatatgttaaacatcgctgatttcccagtactaaaaatcatgttcacaaataactcagaataattcctttctctgtgtttgagataattgttagcccttttcctttctgacttttttgtgt

SEQ ID NO: 195661 - DNA, 461 bp, Homo sapiens
tagccaagaagggtaagccatttatattttaggtatactattcatagtcttttaacctagttcttctgattgtaaaactaatttctgcaggtagattaaataagattaagaaacttggatttcagaaacagttgcagatattattgattagctagttggcagtgggtacctaggagataatctttgtctgatcttggtggattcaacttctctgcagatggtcataggcattgttttcttgtttacagtttggtggtgatcttttttatattttccttcagttttgttgtatctgactcttttcagaaattaaagtgttgtttttttatttgtaagaaatgtgaaatgactacatctttgtagttatttatttcctttgggagttcccctcccccgctaattaaagttactagtttccttgaagaaaatcttcaccatctccttctaggaaaatgtggtta

SEQ ID NO: 195662 - DNA, 471 bp, Homo sapiens
tcatagttaaacttctgaatactaaacgcaaagaaagtcttgagagacaaaaatgaaaccttacctacaggggaataaaacacataagaacacaatggatttctcatcagaaaccagggaggctagaaaaaagtggcacaatagttttcaagtaaagaaagaaaagaactgtgaacccagaatcctatacccattttctgtcatttgacaatgtcatttccctttcattatgaatgaaaaaaattttttttggctaaaaatctgttgctagcagtatggctaaaggaagttctctaaacagaaagggaatgattataacaaaaataagaaatctaaaaatgtgcgtaaatacgatagacttcccttctctttcaaagagttttctgaaatatgtttggtggttgaaagaaaagttgtaacactgtctaacgtgattctaaatatatgtagaagaaatatttaagaatgata

SEQ ID NO: 195663 - DNA, 554 bp, Homo sapiens
acatatttcattgcagaatattagtttagggtgatcaataaaagactttcaagcctaatgttaagcaaaagagacttttaatatattccacaatgataaaatcctgtggaagaagggcagtgggaatgcagattccaggagcaagtggaacgaagccagctgtccagaagagctttttttgtggggtttgaaaacaggtgccaatggtggctgtcaaatcatgatggcatttaggttctactagctacattggagagaaagaaaaacactatgctttacagagtcaaaatctacaatatgccagactttacaccccttgcatatttaaacttgggcttaaaaatgtagaagctggctggttgcagtggctcatgcctgtaatcccagcactctgggaggctgaagccagagaatcacttgagcctaggagatcaaggctgtgtgagccatgatggcatcgctgccctccagcctgggtgacagagtgatattctgtctctataaataaatagatgaaaaataaaaaataaaaatgtagacgtcaacttcacatt

SEQ ID NO: 195664 - DNA, 427 bp, Homo sapiens
caattaggtgcattcatccagtaagcctcctaggtaactgctctaggtgcagggaataatgcaggcagcgggacaggaatgggcgctgtcagctccccctagagctcagtgtacatacacccttcctttcctgggagggccgttccaggcccccaggagacaggacacgctgagctgggtggggctggggccaacgtgggcaggcctgtgagactctgcacttgggagctggttgcagtggctcatgcctgtaatcccagcactctgggaggctgaagccagagaatcacttgagcctaggagatcaaggctgtgtgagccatgatggcatcgctgccctccagcctgggtgacagagtgatattctgtctctataaataaatagatgaaaaataaaaaataaaaatgtagacgtcaacttcacatt

SEQ ID NO: 195665 - DNA, 452 bp, Homo sapiens
acactttcatgccccagtcaaggccactccatctgtgtgcaccaacctgacaatttcagttccccaaatgtgccatgctctagctttccttcctcatcttcctacttcaggtctcagtttagatgtcacctccttgatcctcacctccaattccgctcagatgaggtgccactgctatgagttcccttgacaccctgtgtttcccccatgactgcactgattcctgctgaaattaaccagtctatgcctttctccggctcttgcaagaaactgtatgtgagccagggcttgtctctcccattctttagagagagatccccagcactcaggacagtgcctccccagggcagctgcatgaatggcctaccgtggattatcctactctctactgcttcacccagcaccgaactcataacaaatgcacaacagacattatcatggacccattctgt

SEQ ID NO: 195666 - DNA, 356 bp, Homo sapiens
aatttgtccacttttttatttatcacacgtctaacacctactaagtggcaggcactgtctcaggtgctagcattatggtgctgaataagacaggcatgatgcctactctctctctctgggaacttgcattctagaggaaaagacagacaataaacaaataaatgagataattatagattgtgttaaagtgctgtgaaggaaacaaacagtgggacaagaaggaggataactggaggtgggggaggggagggggctgctttacccagccagggaagcttccctgaggaaacctgaaggttggccagtgtactccagcctgggcaacaaggtgagaccctgtctcaaaaaagagaaaa

SEQ ID NO: 195667 - DNA, 493 bp, Homo sapiens
aaagaatctgtagcagactatgtgtagccttcaaaatctaaaaaatttattattagccggtcgcggtggctcacgcctgtaatcccagcaatttgggaggccgaggcaggtgggtcacgaggtcaggagttcaaggccagcctggccaagatggtgaaaccctgtctctgctaaaaatagaaaaaattagccaggtgtggtggtgggcatctgtaatcccatctgcttgggaggctgaggcagagaattgcttgaacccgggaggcggaggttacagtgagctgagatggcgccactgcactcctttacacaaagtttgccctactctagaacgtgcaagactatacgatgtgcacatgtattcactcttctctcttgtacagagaggctaccactcatgagcttcaacataaatataagaatagtttctttggcctgtttgttatttaacaactgggctttggttctccagggatattggagctgcttcctt

SEQ ID NO: 195668 - DNA, 917 bp, Homo sapiens
tgataaatatgtatggaaatgaaaaagtaaaactggtattgatgtagtatactgtaatgtaaaacattagatgaaaggctcacacctgtaatcccacactttgggaggccgagacagacggattgcctgaggtcaggagttcgagaccagcctggccaacatgatgaaaccctgtctgtactaaaaatgcaaaaattggctgggtgtggtggcgggcacctgtaaatccagctacttgggaggctggagcaggagaatcacttgaacctgggagagggaggttgcagtgagctgagattgtgccattggactgcagcctgggtgagaagagcgaagctccatctcccaaaaaaaaaaaaaaaaaaatcagaagaattgagaattaaaaacaaaaaaaaaaaaaaaaaaaaaaaaaacaaaaaacaaaagagagggggcgagacgcacaaaagacaataaccatcggaggaggcccaaccagaaacacgatcacacaagattatgagtaaaccaaaaaggcgccccccacaaaggaggagacgccgctatctccacacgccgaccgccggagcgccccgcctcacacacaaacagtccgttcggtcgagaccgagaacacaacttgcccctcttaaccgctgacaggaactaccttgtgagataagcgagccaccacctatacctcgcacgggtgcgggttagcaaccaatagtctggaccaacaaccacttactactgacagaaggatgaatatagcgccagctaccagagcgaggacagactccacaactacctgtcagccagtctaaacagggcgtgacacgacacaacgctactactattccctagtcgccgtaccaagaaaaatttcgtcaacatgagatattgcttatagtaacatctcttcaaacagaggt

SEQ ID NO: 195669 - DNA, 690 bp, Homo sapiens
tgataaatatgtatggaaatgaaaaagtaaaactggtattgatgtagtatactgtaatgtaaaacattagatgaaaggctcacacctgtaatcccacactttgggaggccgagacagacggattgcctgaggtcaggagttcgagaccagcctggccaacatgatgaaaccctgtctgtactaaaaatgcaaaaattggctgggtgtggtggcgggcacctgtaaatccagctacttgggaggctggagcaggagaatcacttgaacctgggagagggaggttgcagtgagctgagattgtgccattggactgcagcctgggtgagaagagcgaagctccatctcccaaaaaaaaaaaaaaaaaaatcagaagaattgagaattaaaaacttatcaggagtagtttgaacagtgcttgtcttcttcatcttgtcatacgatataagatgggcctagcatcttttctatgacttggtgaatttccatactcctttctaagtttggatcagtttcccgtatttcatcctttgtgctttcagtgagtttcattaatgtgaagtttttttgctggcatcacttcctctgggacgtctttattcttttgctaatttatgtgaagctgccttcaccaagctcctgtggctgcacatcattgtctcttagatgtcgttagtgtctcttagatgtcgt

SEQ ID NO: 195670 - DNA, 283 bp, Homo sapiens
ttggcaagaagtcacattgaaaggctcacataattatgttggaagtgtacttgctgcagcttctcaaatgttggagtgttaacagaaaaggagccacatgtttgcatttgcctctttccctgttcctagcataggatactggaagtcatcaactggaaacactctaaggatggacaaaaatagcttattgtgtgactcaaataaaagttaaacagttgtaaaaataatttttcccaaaaagtcaaatatatgattacatcagtttaatagaggaaaggttgat

SEQ ID NO: 195671 - DNA, 807 bp, Homo sapiens
ggctctgagacttggtttccaccctcccggaggccatctaggcccccgcagcggcacttgctgcgcccttgggtctgccggtcccggttccaacaggctgagggcctgccctttgtcttgtcctgggtacctggctactgccttgtgataaatggagatttagtgctcactgaccatatcaattagggcctgtgtgtattttttatgaagacaggcagacctgtgcccaaaagccaggacaggaagacctaagtaccagcagtttgtctcagtctgtcttgtctgtgttctttgggtaatctctgaatgtgacaagcacagactgtgggtgcttttgggctcacagcttgtcaggaacaggtggaaggagacgggctgtgggaagtcttgaatggcattgtgttggatgtggttctgggacctctgccacctgggttaatgggtcttggctctagacagaaacatgcacgtactcctcctcttgttgacgtggggttgcgtcttgctctccagaagccagtaaacctctggcctgttagtgacagaacaacccactatagattgtgccagaagaaagttgtcctttttggcagagtctccatggaaaatgctacacagccacatttagcaggcgaactcacttatctggcaggacgctcttctgctcacggtcctggcgcgtcgtaggaacactgccctacatgaatttacagagtctattacagtgatgtggacattcctctgggcagctgggataagcacgttgtgctcaaaataccggttacgtccgtcttctcctgtgtagac

SEQ ID NO: 195672 - DNA, 238 bp, Homo sapiens
taggatgaatgagtctagagatctaatgtggggcatgtggaataaaattaataaaattgtattgtattagagacttgtgttaaataagtagatatcagctgctcttgttacaaaaaaagtaactatgtgagataatggatgttaatcttcttcactgtagtaaccatcttactatctatatgtatccgataacatcctgttgtaaatctcaaatgtacacaataaaatttatttttta

SEQ ID NO: 195673 - DNA, 518 bp, Homo sapiens
caggggcacattcttgtcacacggccaagcttccattgcaaaatgactacattacaatggatctttatatgagtgtctagcacattgttgcaattatttgatgaactatcattttgaatttgttcagctgcacttgtggaggaggaggggtaggagatgaaaaagaagaagaagatgatcatcgattatgtactcactctgtatcaagcactgttctaagtacttttgcatgcatcactacttcgtccagtttttatgataaccctttgaggtagatattttgttttacagatgaggaaacagaggccccaagaagttaaataacttgcttaagatcacagagctaatgagtggcagaacaattattctagctctgattttaagggatttacttaacttttacttggaattcatggagtcattgggctttatttaataagtatctcatcatattctagttatatcatctcctataagtgttcaaaatttgataaaattcagatcaaaggtgttttggg

SEQ ID NO: 195674 - DNA, 255 bp, Homo sapiens
taaaaaacactgacaaccaaatacaatcaataatgtttaaatggatcccggatgaggggaaaatagttttttcttacagaattaataaatgtagaaagaatgagagaaatagaaaatcaccattaaaacaccacagtaataatttctaaaggaagatccacccatggaagctcacattagttgatgaaaccttaaaaggggaaacagggtatctgaatagcctcaaagtacctccactaaaatatttattaaaaa

SEQ ID NO: 195675 - DNA, 1610 bp, Homo sapiens
ttttttcttttttttaagagatggaagggggtgggtcttactttgtcacccaggctggtctcgaactcctgggctcaggcatgagccaccatgcctggcccaatttttgaattttttcaaaggttctcactgtattgcccagaatggtctcgatctccagatgtgaagtgatctttcccacttggccgcctaaagtgctgggattacaccgcacctggcccatgcttttctttaaggaagatagattaccttatttctctcagtttttatgatagccgtatacctgcaaagttccatcttccatttcagattattttgtttttatttttaattctttcagtgtatgctgtgtctgttaacttgaagtaaggataataatttcataccttgcttatgctctccctttgtggtgaaatcattatactacttttctttcttttgttttttcttcaacttttattttaaattcccgggtacgtgtgcaggtttgttacataggtaaatgtgtgccatggtggtttgctgcacagatcaacccatcacctaggtattaagcccagcatccattagctattcttcctgatactctctctccctctgcccctttgtactacttttcaccattatgatttttaccatatccacctgccagttttacagttgataaatgcaaggctggggaacaaagtgagaccccccatctctacaaaataaaaatttctaaattagccatgtgtggtgttaaacacctgtggtcccggctgcttggggctgaggcaggaggattgcttgagcccagaggtcgaggctacagtgagctgtgactgagccactactccagcctggctgatgaagcaagaccctgtctcagaaaaaaaaaaatgtagctcgggcacagtggcccacatctgtaatcctagcactttgggaagccaaggtgggggaggattgctcaaggccagaagttcgatacctgcctgggcaacatagcaagaccctgtctccacaaaaagtttagaaaattagctgggcatgtggcacatacttgtagtcttagctactcaggaggctgaagccagagaattgcttgagcccaggagtttgaggctggagtgcagtgccacgatcatagctcactgcagcctcaaactcttaggctcaagtaatcctcctaccttagcctcccaagtagctgggactgtagacacatgccaccaggcccagctgatttatttttaaattttttcaggggaggtgggatcttactgtgttgcccagactggtcttgaatttcctgcctcaagcaatgctcctacctcaccctcctgagtagccaggattatagctgtgagctaccacacctggcccattttagtttttaaatgccactatgtaatgaggcatttaaatttttttccgaaaagtcaggaaagaaggacttggagcacatacctgttacgggtttaaagcctactttagtcttggccgggtgcggtggctcacgcctgtagtcccagcactttgggaggccgagacgggcagatcacgaggtcaagagatcgagaccatcctggctaacacggtgaaacctcatctctactaaaaatacc

SEQ ID NO: 195676 - DNA, 449 bp, Homo sapiens
gaaaacagagaggtcctggcaggacttgtgccccacatggctcagctacagagctactgaagtggagacactgacggaggtcttccgggatgaggtcttctgcagtagggctcatggtgggtggggtaaggcggagcacagagggctactcaggaaagaaggcatctaacaagagctttggttaaaaaatataaatatatatttaactatgtatacatactgcagaaaaaaaaagagaaatttttttaaaaataggctgaagttggagtaggagtgatccagagggtcccctgcaaaaacactcctggagaatgtgactgtgatccaggccctgatgccatcagggagaacggtcctggtgagagagacagcaagtgctgtggccgcaacgcaggcaggtttgcatggctggatctatgtgactgagggaagtcacagttcacccagag

SEQ ID NO: 195677 - DNA, 577 bp, Homo sapiens
tcaggacctaattcctgagattatttgaaaagaatggctttcatagaaggcaacaccctcacttgattttacaaagagtcaaaggtttgtcactatctgcaaccccgctgcatctaatcaccaactgacagatgagatcctgagtcatttagacacagatgggaaaaaatgctggttttatattggtcatatgaaaggctatattctattgtcatgctattctacttggcaacaaattttattttatagttttatcctgatttcagagaacttgtcattagtagaggtgcacctgaaaggttttgtcttcctgtggtattttgtgcttctatggattgtgtacgagcatcacactacactgctgttcgccctgtctgctcattacggctctcctagctgtaaatgctgatatctgcactatcagttcaacgctgaccattcagtgctgaagacaggttgaagtcagagaactgcccgttctctaatcggattagccagctgtgtggacatgccagtgtttagcttctttgtgccagccatctcgttctgtatgagtgtgtggcgaaagaagcaggtc

SEQ ID NO: 195678 - DNA, 302 bp, Homo sapiens
ctgggaagggtggtgtcatgctgcctcacttggcttgcccggaccctgaatctgggccatcttgcccctgtctggtgctgtgttctcaaacttcacttttctcttccgcactccatgtctgaccaccccagcctgagctcatgggtttaaatattggctcacaggagctgatagacctagaggcagattgcatcagagttttctttttgccagctctaccaaatcacagagatcactgtataaaagatgaaggcagcccatcagttcttcctgaacagtgaggtccagcacacataccccta

SEQ ID NO: 195679 - DNA, 194 bp, Homo sapiens
aaagggataatggtataatctatgaagtcaaagggtaggcagaggtaaggcagtcattgaggattataatgaaaggaagaaaaatagcattaaaataatgaaatttatgtaaatgcctatatgttgtgactaattccaaatattagaagtatcaaactttgttttcaacttttttttttttttttttttgagac

SEQ ID NO: 195680 - DNA, 498 bp, Homo sapiens
tcattaagggtaaactccatctcaaaacaccactttttgggctcatccataagaagcaaattcccattcattcaacactgatcatgagattgtagcaattcggtcacatcttccacttcttatttctcttgttatttctagcacatctttagttaccacctccactgaagtcttgaacccttcaaagttaaccatgaagtttagaatcaacttcttccaaactcccgttcatattgttattttggtcccctcccataaatcgcaaatgttcttaatggcatctaaaatggtaaatcttttccagaaggttttcaatgtactttctccagatccatcagaggaatcactgtctacagcagctatagcccatgaaatgtatttcttaaatggtaagacttaaaagttgaaattactactccttgatccatggcatgcataaggggtgtagcaggcatgaaaacaacattaacctccttgtatatcttcatcagagctctt

SEQ ID NO: 195681 - DNA, 212 bp, Homo sapiens
tatcttgggaagtgctgacagaaccaaaatcaaataacaaaaatttttttgggaattttatttaattatcatgaatgtgtagatcaactgagagagaagtggcattgtgtctttctatccatgaacttggtatgtctttgtatttatttaaatcttcaatgtctttgaatacaattttataatttactctgtaaagtagcagtccccaacct

SEQ ID NO: 195682 - DNA, 426 bp, Homo sapiens
taaataataaagtgataataatggctgcctgtagaaagagttatatgagagagaatttttatcctatcaccttttgaattttgtgttatatgcatatttaaaaaaaaatttttttagaaagttcctaaacttcacgaggctgagaaactaagatgtattgctgttgcctggtcttaacagcccaaatacaatatagaagacaatgtgtggtgcaaaagcatttggttttgttataaagacaaatagtacagcatctatgtatatccttctggacttgtgggtgttgggattttaagcaggagataataaattatgccccctttgttccccttcagtgtgctgcaacaaatcagatatacccaggatgcagacagaaagggagcaaaatagccatcactaccaatagtgctggatttgacaactggg

SEQ ID NO: 195683 - DNA, 450 bp, Homo sapiens
acgcctggctaatttttagtagaggtggggtttcgccatgttggccaggctggcctcgaactcctgacttcgtgatccacccgcctggacttcccaaagtgctgggattacaggcatgagccaccgtgcccggccaagctctgtactttaaataacatatcaaaataaattctggaagtcttaaagcattaaatataaaaccttaaattaatagttgtccagtctctgggtggagaagactttcgtatgtatagcatcaaatatagacactataaggaaagattggtggatttctctgtcagttaaacagaccaaaactgccacgtctgcctacaagggtgcagtggtagttcgggcggcaagggaatggagaagagctggccatagcgctctgaccaggctcttgtagcctttcttttctttaaagtctgattgcctttaatagggtta

SEQ ID NO: 195684 - DNA, 332 bp, Homo sapiens
agggagacaaagaaagacctatagtaaagtagaactttaatggtggtacaaacaaaaggccagctagctcagaaaggtagaccgcagatcaaaagaggaagcagaggaggcaaaatcaacctaacaccatgggaaaggatgcagagcacatatccccaaggtgtcctcaaaagaaaagatgactgaacaaagatgggtcaataaacaggatggctggaagtagaaatcttttaaaataaaatgccttaccacttaatgctaataagttttattgagaacttgtaaggtgtggctcacggccctctgttttgttttttttttttggtcacctg

SEQ ID NO: 195685 - DNA, 446 bp, Homo sapiens
agattgtaggcttgtgcattttttattctgctgagcacaggacatagggtttaaagcaatttaggattgcaaaccccaagattttgtgtttaaaatattggatgattaaaacgagtgggcttcttatgtatccagtgttatactttggtgtgatcttctatacatagctaaaattatttttagttcttcctattaatatttgattttaaagctatttctaatgacacttaggaccaactaatcttaacaaaccaaagatggcttctacaggttgtttgatgttttttgatgaaaaaaaatccaagctggttaaatgaggctatttccagctgttctaactgggaatcattctcaagctaaagcagtagtgctttaccatcttatgaagctttagcttaaatccctttcaactgcttctatttattaaccacctgctgtgtcttttt

SEQ ID NO: 195686 - DNA, 305 bp, Homo sapiens
ccgtctcatttcctaaagattgtggaaagttgagtttattctaatatgtgtgtgtctatgcaaacacacatgcataaatgcatataaattatatgaaatagaattcctgttaagctagaaaacctcatctccctaacacacagtagaacacattattaactttttggttgtcagcttgacatgatcaaagtggttatctaaaatcccaaaccttaagtttgtgctttcttttcattgaatgcaaccaagaccagggaagttacttcactggtcagtaactcaatttatctatttgtataagaaga

SEQ ID NO: 195687 - DNA, 619 bp, Homo sapiens
ctcaaaggcatagggcatctcttaggcctatgtatccccagcccccaaaccatggccaaacataagcagctctcaatattttatctttgctaatatttgcattgtcaccagttgctctatgaataagaacataagtaaaatcaaagaatttttaaattaacattaggcatacctaaaataacaaatataattttttcctgaaattcacgagcagtttctaagttagtttctctgtagtaaaaaaaaaaaactagactttgaaaacctgtaaggtcaagagctggccaggagtggtggttcatgcctgtaattccagcactttgggaagccaaggcaggcagattgcttaagcccaagagtttaagatcagcctaggcaacatggcaaaactccatctctatcaaaaaataaataaaaaacaaagaaaacaacaacaataaaaaaatttgctgggcatggtggcgcacagctgttatctcagctgcttgggaggctgaagtggaaggattgattgagcccaggagtttgagaccagcttctacaacatggctaaactttgtctctacaaaaaatgcaagaattagctgggcatggtggtgcatgcctgtagaaggaggat

SEQ ID NO: 195688 - DNA, 125 bp, Homo sapiens
gcattgggtggaagttaccaggaaaatcatttcagtttaatgtaagttagatctttttgaaagagccttcagttagaattgaaactgctctgaatttctttctacatctgtcaagtctggaatca

SEQ ID NO: 195689 - DNA, 813 bp, Homo sapiens
tgttgggattacaggtgtgagtcaccgtgcctggccttcttcttattttttaaaaatgttcctgccctttatgatgtaagctccttgagggtagagattgtttcacatcaccagtgtatcctcagctcctaacactgtgtctggtacacattgtttgatggttttgatgtttcagattcgttatatttcacaaacacaaggcttgccagctgaatatcttctcagtgccggaacaaaaacaaccaggtttttcaacagagatcctaatttggggtacccactgtggaggcttaagacacctgaagaacatgaactggagactggaataaaatcaaaagaagctcggaagtacatttttaattgcttagatgacatggctcaggtgaatatgtctacagacctggagggaacagacatgttggcagagaaggcagaccgaagagaatacattgatctgttaaagaaaatgctcacaattgatgcagataagagaattacccctctaaaaactcttaaccatcagtttgtgacaatgactcaccttttggattttccacatagcaatcatgttaagtcttgttttcagaacatggagatctgcaagcggagggttcacatgtatgatacagtgagtcagatcaagagtcccttcactacacatgttgccccaaatacaagcacaaatctaaccatgagcttcagcaatcagctcaatacagtgcacaatcaggccagtgttctagcttccagttctactgcagcaggtgctactctttctctggctaattcagatgtctcactactaaactacca

SEQ ID NO: 195690 - DNA, 1391 bp, Homo sapiens
agctaatttttgtatttttagtagagatggagtttcaccgtgttgaccaggctgttctcgaactcgtgacctcaagcaatccactcaccttggcttcccaaagtgctgggattacaggtgtgagccactgcgctggccaagggcaccatcttttagtagttatgtagccttgggcaagttactttaacctcttagtgccagtttcttcatctgtaaaatggaggtaatacttttattgcatagaatctaacatgccattgattataagatacattatttttgtaccacttaaaaaaggaaaagcgctgccattaaactaaaatataccatcatttgtaagaatcttcttaatttcagaggtgctaacatgtaaaaagatgtgtatcttagaattgatgacatcataataatactttgataggattgttgtaaggattaagtgactcaacatttataaagaacttagaacagtgcatggcacatagtaggcaatatttatgtgtcatttattattattgctattagtgttacctattattttctttttgaacccacttattgcctaattagtcatagtttgacaattgcccttgtattccaccatgtcaaatataaatttacatagatgaagctcctgaaattattcttgggttaccattttgtgaagctattgatatgtggtcactgggctgtgtgatagctgagctgttcctgggatggcctctttatcctggtgcttcagaatatgatcagattcgttatatttcacaaacacaaggcttgccagctgaatatcttctcagtgccggaacaaaaacaaccaggtttttcaacagagatcctaatttggggtacccactgtggaggcttaagacacctgaagaacatgaactggagactggaataaaatcaaaagaagctcggaagtacatttttaattgcttagatgacatggctcaggtgaatatgtctacagacctggagggaacagacatgttggcagagaaggcagaccgaagagaatacattgatctgttaaagaaaatgctcacaattgatgcagataagagaattacccctctaaaaactcttaaccatcagtttgtgacaatgactcaccttttggattttccacatagcaatcatgttaagtcttgttttcagaacatggagatctgcaagcggagggttcacatgtatgatacagtgagtcagatcaagagtcccttcactacacatgttgccccaaatacaagcacaaatctaaccatgagcttcagcaatcagctcaatacagtgcacaatcaggccagtgttctagcttccagttctactgcagcaggtgctactctttctctggctaattcagatgtctcactactaaactacca

SEQ ID NO: 195691 - DNA, 778 bp, Homo sapiens
gttggccaggctgggtctcaaactcctgacctcaggtgatccacctgccttggcttcccaaaatgctgggattacaggcatgagccaccgcgcccagcccccaaatttttaatgacaagaaattgtttagctttcttctaccactcaatttagatgaagattttaattaaacagcataaaaagagcttcctcctctgaaaatgattagattttcataaaaagaatttccccaggtttctcttttgattacatatatacacacacacatagtttggagggaaagcagctatgtagtgtcagtgccaaaggttaagtgaagaagtataattctgaattttctttggaaggtgaatatgtctacagacctggagggaacagacatgttggcagagaaggcagaccgaagagaatacattgatctgttaaagaaaatgctcacaattgatgcagataagagaattacccctctaaaaactcttaaccatcagtttgtgacaatgactcaccttttggattttccacatagcaatcatgttaagtcttgttttcagaacatggagatctgcaagcggagggttcacatgtatgatacagtgagtcagatcaagagtcccttcactacacatgttgccccaaatacaagcacaaatctaaccatgagcttcagcaatcagctcaatacagtgcacaatcaggccagtgttctagcttccagttctactgcagcaggtgctactctttctctggctaattcagatgtctcactactaaactacca

SEQ ID NO: 195692 - DNA, 498 bp, Homo sapiens
gaaatctgttcttcctttttttttcttttttagagacagggtctcactctgtcacaaaaaataaaaaattaataatgagcacaccatatatctagtaagaggtgaacatccaaaattcagtccattgactgaatatatgaaaaactcaggcaactcaatgccaaaagaactgaataatccaatttaacaatgggcgaaggacctaaagagacatgtctcaaaagaggaaattcaaatggctaacaggtgctcaaactcgctaataatcagcaaaatgtaaatcaaaaccacaatgagatatcatcttaggatggctattatcaaaaacaccaagagacaacagtgctcaagagggtgtagggaaaagggaaccctggtacattgctaatggactgtaaagtacagccattatgaaaaacagtatgagagttcctcaaaaaattaaacatagaaccaccatacggtccagcaatctcctttctaggtacatgcccaaag

SEQ ID NO: 195693 - DNA, 282 bp, Homo sapiens
ccactctagagtatccccctatactgaccagcctaagagatgaattaggtaatgcaaggaggtgaatatgttggcttgcaatatgaacaaggcagagagctgggagagtaagatgtaagttgctaaggagggatgtgtacttgagtttggaaaccataaagggaaatcataggtaatgttagagatactgatcttagggagccttgaataacgtgatgactaaggtaatctttatttgaaggacagaagggccaggacaagataggtcaggggtaccgagct

SEQ ID NO: 195694 - DNA, 1394 bp, Homo sapiens
attatcaataatttaaaagacatttttatgtggctttaatttattaatatttaacatactaaagattaaaactgagttgtttttaaaataaaagaaatggaaacatgttttcccctggctgtcagagccatgatatcacataccatataacctctggaaaactccactgtatacttgtgaaagaatgaaagtgaggccgggcatggtggcttatgcctgtaaccccagcactttgggaggctgaggtgggcggatcatgaggtcaggagttcgagaccagcctggctaacatggcctaaccccatctctactaaaaatacaaaaattagctgggcgtggtggcacgcgtctgtaatcccagctactcaggaggctgaggtagaggaattgcttgaacccaggaggcggaggttgcagtgagccgagcacgagcaagagtttgagaccagcctgggcaacagagcgagactctgtctcaaaaaaaaagaaagaatgaaagtgaaaaaaataatgtttctgtattactgtgaatagttttaactttagggaatttctggaccatcctttgggaactgcttctgtacattatcagtttctcacttacagtggttggacttatgatttttcatctttacagtgatgccaaagcaatatgcatttagtagaaattatacttcaagtacccttacaaccattctgttttcacttacagtatagtattcaataaattatatgagatattcaacactttattatctgagcatgtttaaggtaggcccggctaagctgtgatgttcagtattaaatttaaatgcatttttaacttacagtattttcaacttacgatgtgtttatcaggaagtaaccccatcataagcagaggagcatctgtattgcgtaatttgactggcacagtttattaggttctgttcagtgttttccgtcaacaagatgtttattgtgtgagtaaacaagttaagccctgtgacaagctgaataagaatagtctctcctcagcagcttatagtaaacaagggtacgtatctctaacattagtggctagactatcaaacgaaatatataacatgtaagaacactaaagacagaattactgtggcatagagatagttagaattgcttcagcctaagagatgaattaggtaatgcaaggaggtgaatatgttggcttgcaatatgaacaaggcagagagctgggagagtaagatgtaagttgctaaggagggatgtgtacttgagtttggaaaccataaagggaaatcataggtaatgttagagatactgatcttagggagccttgaataacgtgatgactaaggtaatctttatttgaaggacagaagggccaggacaagataggtcaggggtaccgagct

SEQ ID NO: 195695 - DNA, 1448 bp, Homo sapiens
attatcaataatttaaaagacatttttatgtggctttaatttattaatatttaacatactaaagattaaaactgagttgtttttaaaataaaagaaatggaaacatgttttcccctggctgtcagagccatgatatcacataccatataacctctggaaaactccactgtatacttgtgaaagaatgaaagtgaggccgggcatggtggcttatgcctgtaaccccagcactttgggaggctgaggtgggcggatcatgaggtcaggagttcgagaccagcctggctaacatggcctaaccccatctctactaaaaatacaaaaattagctgggcgtggtggcacgcgtctgtaatcccagctactcaggaggctgaggtagaggaattgcttgaacccaggaggcggaggttgcagtgagccgagcacgagcaagagtttgagaccagcctgggcaacagagcgagactctgtctcaaaaaaaaagaaagaatgaaagtgaaaaaaataatgtttctgtattactgtgaatagttttaactttagggaatttctggaccatcctttgggaactgcttctgtacattatcagtttctcacttacagtggttggacttatgatttttcatctttacagtgatgccaaagcaatatgcatttagtagaaattatacttcaagtacccttacaaccattctgttttcacttacagtatagtattcaataaattatatgagatattcaacactttattataaaataggctttgtgttacgtgagtttgcccaactttacgctaatgtaagtgttctgagcatgtttaaggtaggcccggctaagctgtgatgttcagtattaaatttaaatgcatttttaacttacagtattttcaacttacgatgtgtttatcaggaagtaaccccatcataagcagaggagcatctgtattgcgtaatttgactggcacagtttattaggttctgttcagtgttttccgtcaacaagatgtttattgtgtgagtaaacaagttaagccctgtgacaagctgaataagaatagtctctcctcagcagcttatagtaaacaagggtacgtatctctaacattagtggctagactatcaaacgaaatatataacatgtaagaacactaaagacagaattactgtggcatagagatagttagaattgcttcagcctaagagatgaattaggtaatgcaaggaggtgaatatgttggcttgcaatatgaacaaggcagagagctgggagagtaagatgtaagttgctaaggagggatgtgtacttgagtttggaaaccataaagggaaatcataggtaatgttagagatactgatcttagggagccttgaataacgtgatgactaaggtaatctttatttgaaggacagaagggccaggacaagataggtcaggggtaccgagct

SEQ ID NO: 195696 - DNA, 200 bp, Homo sapiens
tgtcgtggattcgcacttattttgcctgggattcttccaacttaacctttttccttgaaccttagacatttcttacctaagagcctaaaggaaatcttgaggcttcagcagccaactcctgtccttccttagcaacaatcttaacaggagtgcacagggtaactggtttagggtgcttgctttgtcttaaggggaaaaac

SEQ ID NO: 195697 - DNA, 143 bp, Homo sapiens
ttctcagcacaaacaatgcaagccagataggaactaatctttaagtttcaaatatacttcaagaatatgttcttcaagaataaaagcaaaacgaatactatttctttttttaattatactttaagttttagggtacatgtgca

SEQ ID NO: 195698 - DNA, 661 bp, Homo sapiens
atgatactatgaagcattaagttgagactaggagattaacagtagggtgttaaatggacaggactgatcacaatcttatatggtgaaggaagaaccaattggacttagtgacacattaaatgtgattagacatgaattggaaactattttgaggtaatgttccccaggatgccctctccaaaacactagttgctgaggatgggaatagatgttaattgaaaaaaggtttctgaaaagcatttgggaaatgctaacttcaccaggtttctttcctgcaggacttctctgattctttaatatgcccatatgcatgatgattctgaaattggggaatgtagtcatagtaggaagcatttctaaagcttatttcttcatggaatcagaattatgttgcacccaagtagcatcttacaggaccagtatttcatggaaaatactctgtgaagtgctgctctatggttttaaaccaagaatgaggtacaatataggggcattgactcaacccagtgaatgtgctgagcactgacctcgcaagatcctgtggagggcggaaatggataagatcccacctctgcaacaaggctggcaataagccattagtggtggcattgtctacatggctaatagcagggatgccttgggggagacaatatcccaccga

SEQ ID NO: 195699 - DNA, 1263 bp, Homo sapiens
tggagcaatgcagagtgagtacatccactccacattcattctgctggcgtccttctgaagcctgctgtccatgtgtgaacccagtcccttcatcatcttccccctggatggttgtatttttccagtcacttctcccccaaatgtctgcctgctgcagcccactgcatcttttgaaagcctgtgccaccccatctctcctgctgctcagttggagagcaggctccaggctcaggcttccctaatttatctgttcagagcctgtgggattcagggtcagtttgtttcattatcacatttgtaggactttgtgttgttcccagcactaggtgagatttgaaagatgaggtgtgctctgttctcaaggattgttgagatggagcctaatgattgcacactcacgtgctgtgaagagttaagggtaaaaagtacaactctgactctggttcctgagatcaccgaaagaagaggcaaatgaagttaggtggggtggggtggggtttattgttttgaactgtttattaaaaacgcaacctcttcaaagactcagcactgccacatcatatgagtggacttgtcctcatcagctaactgataggagaacaatgccctaaagtaatggatttatccacctactcaggccagtttcatgcaggagggaactttccagatggcacattgccccatttccaagaccttccgctgacaaatgcatcatattaattatgatggaaaacaagtaagaaggcatgctctacaaaaattaggtcacttgcccaggtgcggtggctcacacctgtaattccagcactttgggaggctgaggtgggcagatcatgaggtcaggagatcgagaccatcctggctaacacggtgaaaccccgtctctactaaaatacaaaaaattagctgggactgcaggcgcacattaacaatccaagtaatttataaaccttaaactttggtagagatggcatgtcacttggtgccccaggcaggttatgaaatccagggcataagcaaggctccgcaagcccaaaggtctggaatgagggtgagccatgggcggataggactcgacagtgaaggggaccccctgaagcacaatatgaggcgaccatacacgggaggcggaagggacgaaggggcaaagagcaaggcaaacacgaggcggaacacacaaatggcacaaagggcaagacacgaagagacagtaaacacaagcgacgagcagaggacgaaggagagagaacaacccgaccacag

SEQ ID NO: 195700 - DNA, 242 bp, Homo sapiens
cctatttggcctgtcccccatcccgcattgctgcctctaaagcaatggaaccacctatgtggttgcatggaaccggtctaaatatgattacatgcaaagcagctaatactcgcccctcctactgtctgttaatgactagattaagaaaatgttgtgggatctttcaccttctgcctcaactaaatttactttactgatgcagacagacagaaggcacaagcatcaatcataggttccagaag

SEQ ID NO: 195701 - DNA, 409 bp, Homo sapiens
atgggagactggggacatacaagggaatgaggctctggtcctgcctcaccactgtgcaggtgggggcgtggggaccgaagtcgggctggcaggcaggggcttacagcacagagggagggcatggaaggggaagcctggggccagggcagccccaaggagggaactgatggagacctggaggggaggtgggagaagggtggaggaggagcccgtggagctgaggccaaggctgaacacgctccccagggaagaatgctccacacagagggacggtgcgtgcagaggccctgggtccgagacaacctggctgcttggggtaactgcaggtaattccagaatgagtctcagtgggttttggtttttgcatttggtgtgagcagatcagtgaggtgccatgaggtgcccccac

SEQ ID NO: 195702 - DNA, 117 bp, Homo sapiens
tgccgggattacaggtgtgagccattgcgcctggcttgtgtgtactgttgccagtatatatttctgtgtaataatgttcagggttgtaaacagaaaaccacatataatgcactttaa

SEQ ID NO: 195703 - DNA, 434 bp, Homo sapiens
taatattaaagggttctttgtacagaaatcaatgatgatgtgaattcagggagaatcacttgcattttacacatttctctggggtaggttttcagcaacaaggatgccagcgtgaatctagagctaaaaagtaaacactagtcagttccatttaatgctgaaaattatatcatgagccaactttgatagggaattgaatgtaaaaattgggctttagatttggagaagatcctagatcctcgtaggagaagaaagactggaaatgtggtctggctggtcaggagccgggacagcaggtcccacgctataggtgtacacagattctccccgctggcttctctgttctgtggcatcttcctggtttcctggagtcagggcagctccactggcctcagtttccagagaacaaacctgactgaggtggacttgccacc

SEQ ID NO: 195704 - DNA, 650 bp, Homo sapiens
ggactgtcatctctcctgtcccaagcctggactggaaagactgaagagaagccttaagtaggccaggacagctcagtgtgccatggctgcccgtccttcagtggtccctggcatgaggacctgcaacacatctgttagtcttctcaacaggcccttggcccggtcccctttaagagacgagaagggctgggcacggtgactcacacctctaatcccagcactttggaaggctgaggctggagaagggctccagcttaggagttcaggaccagcctgggcaacatggtgagaccctgttttgttttgttttttgtttttttgagatggagtcttgctctgtcgcccaggctggagtgcagtggtgcaatctcagctcactgtaacctccagctcccaggttcaagcgattcccctgcctcagcctcccaagtagctgggactacaggcttgcgccaccacgcccagctaatttttttgtatgttagtagagacaaggtttcaccatgttagccaggatggtctcgatctcctgacctcatgatccgcccgcctcagcctcccaaaatgctgggattacaggtgtgaaccgctgcgcccggcctggtgagacccagtttctacaaaatattaaaacattagaggccagggct

SEQ ID NO: 195705 - DNA, 370 bp, Homo sapiens
ggactgtcatctctcctgtcccaagcctggactggaaagactgaagagaagccttaagtaggccaggacagctcagtgtgccatggctgcccgtccttcagtggtccctggcatgaggacctgcaacacatctgttagtcttctcaacaggcccttggcccggtcccctttaagagacgagaagggctgggcacggtgactcacacctctaatcccagcactttggaaggctgaggctggagaagggctccagcttaggagttcaggaccagcctgggcaacatggtgagaccctgttttgttttgttttttgtttttttgagatggagtcttgactccagcctggggaatagagtgagactctgtctca

SEQ ID NO: 195706 - DNA, 250 bp, Homo sapiens
tcatcctcaggaaagcactgaatgaggaatgatgctgtgacagtaagcaatgtagggaaaataggtggcactcgaatcttcagctctcactaatgtcccttcaagaaccattgccatatatgtggctcttgggtggaatacttgagatgtaaactattacagatttagtcattaggaaaggaatgcagggaagagactattatgaaggtcatgatttaggaaaccctgcagggcattttacattttttac

SEQ ID NO: 195707 - DNA, 386 bp, Homo sapiens
tatttatatgagcatctccttacaattttaattaatcctgtgtacatgtctgggtttttgtatgtacttacacttgcttcacataatgttgccttccctcacttaggcaggtaaggcttctcctgagtgaaccattcctcttcacatgccacctgaaaagggactgtgcttattctgtttcttccctaggaacgtccagccccatcactttatcttcaaattgacttcccttttacccaactcaaatgtcacctcctcctgaattcatccctaaccacccatcttcaaataacctttcatgactttaagcccaatgacacattcatctctaccttttttttttttttttttttgagacagggtctctgtttgttgcccaggctgga

SEQ ID NO: 195708 - DNA, 485 bp, Homo sapiens
gcagaattttcttttctttaagggtcgtagaaggacatccaaagcatgcatgaaaaacagctttactgaaacattgatgataaccatgattccaggtgctattcctgtatgtaactttgactctccatgtccttgagatgacatcaagattacctctcaatagtggtgactgaaaaaattctgcattcagcactgtcactgtctagatttgtaatctgatatttgatcttccattggaaagtctgaaaaagcagagctcacatttaccaaaatctctgcctgttctaattggctaagctaaagagaagacagaggtattttctttgtttgtttgttttctcacatgatcatccagtcatctactcaagagatagtgcctcccatgagccatgcctagagttagatgctgagggcctaagagcaattaaaccaagcaagatctttgccaaccggcaatttctcttttagagaagaggcaacctaaa

SEQ ID NO: 195709 - DNA, 472 bp, Homo sapiens
tcagaatttagcttcttatcatgcatcttctctttttgcttttgctattgatataatattcaggttagtcacttctcaaccccctaacaaggtaaggcagctcacacatgaaaatcttacttacttctaatgccaccaaaaagaatcctatgtcctaaaaaaatgttttaatcaagagagctgtggcagtcaggcatggcggtgcatgcctgtagtctcagctactttagaggctgagccaggaggatcacttgagctcaggagctcgagaccaccctgggcaacatagggagagcctgtctttaaaactctgagagagacagagagacagatacagggagagacagagacagagagagagacagacagagacagactcagctctgtaatatatgccaattacagacaaattactattattgctcaaggatttatcttgagctccttacctgagatacaaaggaaagtataa

SEQ ID NO: 195710 - DNA, 498 bp, Homo sapiens
aagctcatcctttaattaccttgtacgtaacagaagaggttgttagtgtagtgaacacgccagaacaggggtgtggaagccaagtgttctctattccagctatggaaagttcaatggcaggtgtggtccgaagccaaccagaggacgcaggagattggagaagagctctccttccgttcaggctcacggcaaagcacgttgccttctttcttttgcaaaataaccacaggatacttctcagagagatgctacggagatgcttcagccttgaacaccagtgagtcacggtttgtacaactcaagggtgctgccagcccgcctctgctctccctcacggtttttgttttcttggtatgataattagttgttggctccatgaatgtgtctcccaaggaagaaaaatgtgggcacctgttatttctggaatgagtgttctatgcgttctattgaggtgagctattcactcagagtccaagaggcggctggcatatggtcacc

SEQ ID NO: 195711 - DNA, 210 bp, Homo sapiens
gggtgtgggaggggctcagttactcttctcctcacctggcacttagagaaagcaagtctcaagagtctcatggtatgtggttggtggacccaggggcctgtgcccggtctgtgctgtccagctttgggctctgcctggagcaaaaacaagagcttgcctgtgccgtgttgcggtccttacatggtagcgaatctcagagaacacaggagc

SEQ ID NO: 195712 - DNA, 585 bp, Homo sapiens
ggagtcagtgtgtaaaggtgtgcagaagaaggtatcctttagttccagaactgtgaaccatttagtcccctcagatggagtttcactgtgtcaccaggctggagtgcagtggtgaaatctcggttcactgcaacctccacctcccaggttcaagcgattctcctgcctcagcctcctgagtagctgggactacagcttccttgtgtgtccgcaagctcctctgtaagatggctgtcattgaatttacacaacttcctaactggaatagataatcattatcaagggacagtggatgatgggcaacctaacgatccagtgtgttgtgcaacatttcacctcacctgacaatgaaatccaaaaccacttggaatggaaatgacatatatgttaatgaagacagataatgtatgtcagtagacacaaatgaaagaagaaagcctggattataaaagttctccaggttgggcaatagataggcactgctacataggcattgaagaaagcatttggaactatgctccttctggtaaaaatatgctcaatgaaaagcctttttctgaagacctgtaagtaatcctttgcatt

SEQ ID NO: 195713 - DNA, 929 bp, Homo sapiens
  misc_feature (443)..(443): n is a, c, g, or t
  misc_feature (573)..(574): n is a, c, g, or t
  misc_feature (577)..(577): n is a, c, g, or t
  misc_feature (581)..(581): n is a, c, g, or t
  misc_feature (585)..(586): n is a, c, g, or t
  misc_feature (592)..(592): n is a, c, g, or t
  misc_feature (595)..(595): n is a, c, g, or t
  misc_feature (604)..(604): n is a, c, g, or t
  misc_feature (609)..(609): n is a, c, g, or t
  misc_feature (618)..(618): n is a, c, g, or t
  misc_feature (670)..(670): n is a, c, g, or t
  misc_feature (686)..(686): n is a, c, g, or t
  misc_feature (691)..(691): n is a, c, g, or t
  misc_feature (693)..(693): n is a, c, g, or t
  misc_feature (697)..(698): n is a, c, g, or t
  misc_feature (702)..(703): n is a, c, g, or t
  misc_feature (706)..(706): n is a, c, g, or t
  misc_feature (712)..(712): n is a, c, g, or t
  misc_feature (716)..(717): n is a, c, g, or t
  misc_feature (739)..(739): n is a, c, g, or t
  misc_feature (741)..(742): n is a, c, g, or t
  misc_feature (751)..(751): n is a, c, g, or t
  misc_feature (755)..(755): n is a, c, g, or t
  misc_feature (759)..(759): n is a, c, g, or t
  misc_feature (777)..(777): n is a, c, g, or t
  misc_feature (781)..(781): n is a, c, g, or t
  misc_feature (786)..(786): n is a, c, g, or t
  misc_feature (803)..(803): n is a, c, g, or t
  misc_feature (807)..(807): n is a, c, g, or t
  misc_feature (810)..(810): n is a, c, g, or t
  misc_feature (816)..(816): n is a, c, g, or t
  misc_feature (827)..(827): n is a, c, g, or t
  misc_feature (851)..(851): n is a, c, g, or t
  misc_feature (853)..(853): n is a, c, g, or t
  misc_feature (867)..(867): n is a, c, g, or t
  misc_feature (924)..(924): n is a, c, g, or t
gcggcggttagtcctctcccggccgccgtcgcctccgacatattgcccgcaggagctgcggcggcgaagcggagagcaccggggggaggagatgggaggacgaagaggtcccaacaggacatcttactgtcgaaatccgctctgtgagccgggatcctcggggggctctagtggaagccacacttccagtgcatcggtgaccagtgttcgttcccgcaccaggagcagttctggaacaggcctctccagccctcctctggccacccaaactgttgtgcctctacagcactgcaagatccccgagctgccagtccaggccagcattctgtttgagttgcagctcttcttctgccagctcatagcactcttcgtccactacatcaacatctacaagacagtgtggtggtatccaccttcccacccaccctcccacacctccctgnaacttccatctgatcgacttcaacttgctgatggtgaccaccatcgttctgggccgcgcttcattgggtgccatcgtgaaggaggcctctcagagggggaaggtctccctctttcgctccatcctgctgnnccncacncgcnncaccgnacncacggcaanaggcnggagagagngccgaacccacaaccaccgccacaggacccacgccgacccgaacccccagcnccgccgccaaccgacngggangnacannccgnnccngcagcngaanngcgacctccgcaagacaagccncnncaaccacanggcnccanggggccccgggaggcggncagnggccnggcaaagagccgggacnaccnccngacacngcgggagacgnggaagcagcacacaagacagctgnanggcccggacgccangcccacccaaggcccgcagcccgacacacagccccaaccgcagagagggggagcccncaaga

SEQ ID NO: 195714 - DNA, 686 bp, Homo sapiens
  misc_feature (443)..(443): n is a, c, g, or t
  misc_feature (448)..(448): n is a, c, g, or t
  misc_feature (450)..(450): n is a, c, g, or t
  misc_feature (454)..(455): n is a, c, g, or t
  misc_feature (459)..(460): n is a, c, g, or t
  misc_feature (463)..(463): n is a, c, g, or t
  misc_feature (469)..(469): n is a, c, g, or t
  misc_feature (473)..(474): n is a, c, g, or t
  misc_feature (496)..(496): n is a, c, g, or t
  misc_feature (498)..(499): n is a, c, g, or t
  misc_feature (508)..(508): n is a, c, g, or t
  misc_feature (512)..(512): n is a, c, g, or t
  misc_feature (516)..(516): n is a, c, g, or t
  misc_feature (534)..(534): n is a, c, g, or t
  misc_feature (538)..(538): n is a, c, g, or t
  misc_feature (543)..(543): n is a, c, g, or t
  misc_feature (560)..(560): n is a, c, g, or t
  misc_feature (564)..(564): n is a, c, g, or t
  misc_feature (567)..(567): n is a, c, g, or t
  misc_feature (573)..(573): n is a, c, g, or t
  misc_feature (584)..(584): n is a, c, g, or t
  misc_feature (608)..(608): n is a, c, g, or t
  misc_feature (610)..(610): n is a, c, g, or t
  misc_feature (624)..(624): n is a, c, g, or t
  misc_feature (681)..(681): n is a, c, g, or t
gcggcggttagtcctctcccggccgccgtcgcctccgacatattgcccgcaggagctgcggcggcgaagcggagagcaccggggggaggagatgggaggacgaagaggtcccaacaggacatcttactgtcgaaatccgctctgtgagccgggatcctcggggggctctagtggaagccacacttccagtgcatcggtgaccagtgttcgttcccgcaccaggagcagttctggaacaggcctctccagccctcctctggccacccaaactgttgtgcctctacagcactgcaagatccccgagctgccagtccaggccagcattctgtttgagttgcagctcttcttctgccagctcatagcactcttcgtccactacatcaacatctacaagacagtgtggtggtatccaccttcccacccaccctcccacacctccctgngggangnacannccgnnccngcagcngaanngcgacctccgcaagacaagccncnncaaccacanggcnccanggggccccgggaggcggncagnggccnggcaaagagccgggacnaccnccngacacngcgggagacgnggaagcagcacacaagacagctgnanggcccggacgccangcccacccaaggcccgcagcccgacacacagccccaaccgcagagagggggagcccncaaga

SEQ ID NO: 195715 - DNA, 676 bp, Homo sapiens
  misc_feature (443)..(443): n is a, c, g, or t
  misc_feature (573)..(574): n is a, c, g, or t
  misc_feature (577)..(577): n is a, c, g, or t
  misc_feature (581)..(581): n is a, c, g, or t
  misc_feature (585)..(586): n is a, c, g, or t
  misc_feature (592)..(592): n is a, c, g, or t
  misc_feature (595)..(595): n is a, c, g, or t
  misc_feature (604)..(604): n is a, c, g, or t
  misc_feature (609)..(609): n is a, c, g, or t
gcggcggttagtcctctcccggccgccgtcgcctccgacatattgcccgcaggagctgcggcggcgaagcggagagcaccggggggaggagatgggaggacgaagaggtcccaacaggacatcttactgtcgaaatccgctctgtgagccgggatcctcggggggctctagtggaagccacacttccagtgcatcggtgaccagtgttcgttcccgcaccaggagcagttctggaacaggcctctccagccctcctctggccacccaaactgttgtgcctctacagcactgcaagatccccgagctgccagtccaggccagcattctgtttgagttgcagctcttcttctgccagctcatagcactcttcgtccactacatcaacatctacaagacagtgtggtggtatccaccttcccacccaccctcccacacctccctgnaacttccatctgatcgacttcaacttgctgatggtgaccaccatcgttctgggccgcgcttcattgggtgccatcgtgaaggaggcctctcagagggggaaggtctccctctttcgctccatcctgctgnnccncacncgcnncaccgnacncacggcaanaggcnggagtctgtgccagatccctcatgcacctcttcaggacctacgtccttcctgaacctcctgttcctc

SEQ ID NO: 195716 - DNA, 657 bp, Homo sapiens
tgctgtgctttgaggtataccactgaagacaggagtgatctctgccctcatttataatcagcaaggaaggtcagtcattgaacagatattggaagtatgttgaatgttacgaaaaagatgtcaagtatattctggaagcatttggcaagaggatttaagtcaatgaagtcaaggcacttaactgaagaagttaatgcttaagccaaaagctgtgccgtttgcttatgctggagcaatagtatgtgcagaggcataaagagaaagacattaagggaatttaaaaaattccagtatagcaagggtgttgggaatgaggtaaggtgagaactgaaagatagaagccagattatggaaggtcttggaagctattttcaactttattctaaggacagtgagaatccactgaaaggcttaaaatgatggtgacctaatctgattagcattttatgaagaccaggttgactgtaatgtgtgtggactattatcagagaggagcaagaatgaatgtagggaaaccctaatgaattaatggacttatcaattatatatagtggtcatacttacagcatgttaactgaagggaaacaaaatattatatgactcctgatggaagtatccaatactgcctttgaagttgtcttacccaaaaaaaaaaaa

SEQ ID NO: 195717 - DNA, 184 bp, Homo sapiens
actgcaatttctatccttgtatattttgttgaaaccactaagtattacagaaagtaaaatgctttgaaaactcatctggggccaggtggttttaggaaagcagatactaaaacaaaactaatttgaaatctgtcttggttttttttttttggagggggtgggccgatacgggggaccctctaga

SEQ ID NO: 195718 - DNA, 469 bp, Homo sapiens
gctgaagagtgcagaccccagagggagcagaataacagtgggaggagggtgttgcgaggggacctcaggagggtaacttagcagcagagcaaggagttcagggtgacctccggcctgggcggttaggaggccactggtggccctgctgctggcttggaagggcaggccttggccagcctaggttgaggaatatatgggagggaaaagaccaggggcttgggcagggtgactccaggaaggaggcagttgaaggtgaggttcctggggggagaatgatcccgggtcatccagcaggaagagagaggacctagaaggtgtgaaaaagaactatcgggctgggggtgcagtgggaggagtatgcccggggtgctgtgggggtggggagcgcctgtgagggttggcaagaggaaggggaaccggggcctggcagaggggagccccagactgtctcaaggctgggaactgaagg

SEQ ID NO: 195719 - DNA, 305 bp, Homo sapiens
tatgttaaattgaattctttcagtctgcaatcttcatttgtttcttgctttagagggtatcaaaagaagggaaaaaagaaaaacagaaggaatggtctagtgttctataatctcagtattggtacacaaatattcttgtatcttatctcccaggcaatatggggatcccttttgtagggtccagtgtctgcatgattagagataactcggtactgcccaaagtaacccttttctttgttagacatttcttatttaaaagcacttattagaatatcttttcgtaattctgaaaggatatttgaaaa

SEQ ID NO: 195720 - DNA, 351 bp, Homo sapiens
gtctaacatagagctgctccaatctctaagagaactggatgacttggatacataaaaggagagctcttgcagtcctattcctactcttgactcaagtaaatattttgatggaggtgagctaagaatttccttttacctgaaatattttaagtattttggcactaaaaaataaaaaaagtattttggcactaacaaatctgtaagggagcataaaagaaatattaagaattgtacggctgggcgtgctggctcacgcctgtaatcccagcactttgggaggccaaggcgggtggatcacgaggtcaggcgatcgagaccatcctggctaacaaggtgaaaccccgtctctac

SEQ ID NO: 195721 - DNA, 239 bp, Homo sapiens
aatctacctccatcagaatctatatatgaagacattccagcatcctgctgacagaatcatatagtactcttttacctttttttttttttaagagacagagtctcgctctgtcgcccaggctggagtgcagtggtgcaatctcggctcactgcaacctctgcctcccaggttcaagagattctcctgtctcagcctctcaagtagctgggattacaggcatgtgcaactctatgcccagc

SEQ ID NO: 195722 - DNA, 556 bp, Homo sapiens
tggcataagcaacactccatttgtctcggccgtgctaatacacgtgcagggagataatccatcagttgctaataagcacagattcagacgccaacactctacactttctgaacatctatattctatcaagtagggagtatttccaaaagatgtatctgtacagagtttatctaatagactggaatggctcttatttctgttctgccaaataaagagaaatttcttggactgcaaatgtgattgcttgaactcccaaactgcaatttttctaggcatttcttcttcatgcttcctggcaggccaatctaccatcaaattcttcaggtttaccaaagccttaacaacagccccaatttacaaagtacccatgacttggtcagcattcaaggcaaaaagttaaaacatacacaaaaataacagtagattttgaaaacaggcaaggatttgaaaacgaccattatctctagggcaatactaaaatatagcctcaacttataaatgtgtagaaagtagtgatatttggaaggtacattaaaatgagtaagtaagggaacaa

SEQ ID NO: 195723 - DNA, 381 bp, Homo sapiens
tcctcagactctgatttctttactggttgtaactggaaagtgacctgaaagttagcagtgggaaaccaggatctgtgttgattgattcagtagacttaattttacacaaaatgtttagtaaatagtcttggagggtaggagatgttgactctcctcaccagagaagttcagctgggcttttggacagcaggatatttctgctaccctgagatttgtggctatatcctaaagggttgagattattcttaagaaggatcccctgataagcagagttttttttttatattgtagtattctaagtttattacccaaataaatatttccttgagatttcaaattgaaatagttgtatttttttattagtgacccatgttcttttaa

SEQ ID NO: 195724 - DNA, 513 bp, Homo sapiens
tctctattacccaaatgcaatttgatatagagtacagggacttacacggctgaattcaaatgaaaagagggtcactaaaggaagaaaaagggtggcagctcaaagcatggtaaaggaagtcacattttcattacttagactgacatcatactatacattactttatttttaaaggaacagactttgcttgttcttgtagtagacattcccccaaagtctcataattctgagttgtgtgtataggattcagtttaccattctttttcccaacgttgtcctagtgatttttctctttcagttctatcactccatagactttaatttttgtcaggtctggatctcaaaattgcaataaaagctgatttaaaagattgtcagtaggcaaaggataaattcttgagatgatgggtaccctatttatcctggtgtggttattgtgcattgcatgcctgtatgaaaatatctcatataacccacagatgtatacatctagtatgtacccacaaaaataaa

SEQ ID NO: 195725 - DNA, 596 bp, Homo sapiens
gtgcagaccagtgtgttactcacatgtttatgagtaatgcattgatgaatggtgatgctggtgtacacatcactgtcggctctgccagtcctataaaaaactacagataaaacataaactatgtacagtatgtaatgcttgataataataaattgactgtgttactggtttctgtatttaatatactatactttttattgttaggttagagtgtattccttctagcttacgtgaaaagttaactgtaaaggcagcctcaggcaggtccttcaggaggtacctaggagaaggtcttgttatcataggagatgacagttctatgcatgttattgccccaaagaccttccagtaggaagagatgtggagggagaagacagtgatactgatgatcctggccctgtggaggcctatgctaatgtgtgtgtgtcttagcttttaacaaagaagtttaaagagtaagccgggtggtggctcacaccggtaatcgcagtacctgggtgacagagtgagaccttggctcaacaaaaaagcaaaaacctgccttttcttcaaagcacaaggaagagtgcttgaatcttagaatggcttttaatgat

SEQ ID NO: 195726 - DNA, 339 bp, Homo sapiens
tggtttgcagcttacggcatttctgagttaccggcttcttcagcaccaagtctaggatatatgaggcaaaaggaaaatccagggaacttaccactaattcatttttcaaatcaaggcccctaacctttctaccttcttctctccatcttttgcagtcttaagttttaatatatataacatacagggattttagttgtacttagtaggggaataggaaaaaaatttgtttactgcattttcccagaagtgcaagtacaagttttatgcaccttttaaacatgatcagatttatgttaaaaggaccactctggtttctcttatggagaattgaccatgaag

SEQ ID NO: 195727 - DNA, 343 bp, Homo sapiens
ggagataggcagacgatctacaactctatctgagtatgtacctttctatagacactttccgtaaacggaggattaacatcagagcagggttggaaaattatgtcaactctatctggtgaactccttctgggattacctcactctcttctgccaatttttatttcttattacttatgattataccatgaatctaattatttaatttgtcaatttgacacaatttgttcttaaataaaataaataatacataagcgcagctgactttgaaatacttactttctaaaggcaatgcatgaaacagtatcagaactggttttgaaaatgaagttttagaatagttttc

SEQ ID NO: 195728 - DNA, 247 bp, Homo sapiens
tcaaactactcatgttttaccaaaagaaaggtagaaaaggcattgtaaagttttccctatttctatgtgtggtaacatagagactaaatacttctttcagtctccagcagcaaaaatagcaacctattaagatcagcacccacactggttagctctggtgaggagaacttgtactaatgaggccctggtcagggatttaatgcccatgggatccaattagcttcacacaggatgagactctgagccc

SEQ ID NO: 195729 - DNA, 865 bp, Homo sapiens
tcagctcactgcaagctccgcctcctgggttcacgccattctcctgcctcagcctcccgagtagctgggactacaggtgccgaccaccacgcccggctaattttttgtattgttagtagagacggggtgtcaccttgtcagccaggatggtctcgatctcctgacctcatgatccatccacctcggcctcccaaagtcctgggattacaggcgtgagccaccgcgtctggccttgtgtacttttaacttagatacatttactttttatccactcagctgaaaaaagaggagaaaaataaaagtaggtcaggtcaatctgtttcctttcccatttaatgaattcatgcccaggagtgagtgagaaatgggaggactgaatctgctgttctccaagactagcttaggagtttctgacatcatgggcatcccagcaagccaacggtcacattagtcaccacgtatttttcatatcacgtgatccctctatcagtgtatcagcctttgctgtataatgaacaatcctaaacatcaatggcttaaaacaaaatcacttattagcacataatttggtaggttcatattttgggctggccgcaggtaggttttgcagatttcacctggtcttgtcattttgctgcagtcggctggcattttgaccagggctggaggactatccatgtgtgacaggaagctggttggctggggtgcctagtttcttcttggttctcttccatgtgggcttgggcttggtcaaatggtcttgggtttctctatgcaggaagagaggacagccccaattaacaagtagttttaacgttttggcttttgtcatgtcctgtagaggctaggacgggatcctctagat

SEQ ID NO: 195730 - DNA, 637 bp, Homo sapiens
aattttagggagacataaacattcagtccattgcagtttctaacttcaagcagggttcaatgtgtttaaattgagttgatttaaacttgatcctatctgaggaggtgacatttaagcaaagatacctatgaaacagtcagttatatgaacacattgcagaagacagtgacaagcagaaggaacagcaagtacaaagaacctgaagtcagaaattgctttattgtatgtgaggaacagccaggagatcaaatgactggagctaagtggacaagaagaagactggtaggaggtatatttgaagaggaagccaggggtcagatcgtgtagtgccactgctacgcactttaaataatcctcaagaacacataaccaacagctcataatgcttcacaagacaaaggacgcgtgattaaactgttagaaattaaaattatttattgaatgactatcgcatgccaggcactggatagaaccttaagcatatcatctcatctaatcctcacgctaattctacaagacatatattatcctaattttaccttgagagaaatggaaaaacagaaatattaagtaacatgcttcacacaataggtggcagagacaagatatgacccaggtttctgatttcaaagtctag

SEQ ID NO: 195731 - DNA, 409 bp, Homo sapiens
gagtacttggaatattttaaacactgtgccattagcaatttggaattctgtgttatgcagttcataaggttctagcttgacttttttctctctccattaaccctgtctctcacagatgcaaaccactcttaatggctttactttcacatcaatgtgagtgattcctaaatatgatttatttcccttctcaattccatacccacagatgcttattatttatttatgtgtacctttcttatccccatactctccctgtttgcgatacaactagctcaaaacctcagtcatttttaccttgtctctctctctccagtccaactcacccaactagtttttctcatttgttacttcatttttgtcctggttcttctaccagatttattagcaactgcctggactattaataaag

SEQ ID NO: 195732 - DNA, 496 bp, Homo sapiens
gctgagtgacaagaaaaggatgtgtgtacatgagacagagggcgctgtttatgcccatctgtacagaatgtcattcgttttaaatatgattttcctctttttcctcacagaaagagaaaatggtatatttctccttctatgcaacagagaactgattttttttaaaattcttattactgtttttttttgaagtataatagaaacaaagcagtgtttttctttgttaaggtcagttcatgttttagtaatgtgtcttgagctttctgtattttctgagctaaccatttaaaaaattttgacttctacaccaattattttatgtgtgattgtttaaattctatgggtcttgttgatgaccttcctatatttattgtcattgaaaacattcaatatgtaaatataataaacgattatatctttaagaaaataaaagttttctaaaattaaatgtgaattatcattaaagcataaaatgctgtgactataaggtaacatt

SEQ ID NO: 195733 - DNA, 407 bp, Homo sapiens
taggccccatttgagtcatccccacaaaccttagagggacacttccttgaccagggacagatgagaccagtgagcaaagcgggagggggtgttctgtataaaccaaggccagaggagaggcaatggaaggggaagaaggttctgggaggcagccccatggttccccccaggtaaccccccgtttcagtctaatggagacagaaccccacacagacgatgatcaggctggaagcccaccccagcctggggtcagggaaggcttccctcggaaaatgacaactgagctgtgactgaaggatgaatgggagtccttagaaatggaatggatgcagggatattccagacagcatcaacaaagatcctgggttcagggaaagcttcctagaggtggcgacacatttgggcaa

SEQ ID NO: 195734 - DNA, 526 bp, Homo sapiens
aacatgtttgagaactattaatacagcagagtgcttcctgactataatagataattaaggatgggtaaatttaaacaagttttaaatttactgaggacctttcaatttgttaggttagaacagaagccttttttctaatccgagtgcccatattttttttccatctaagaccgtatttgaggaattagatgatgcatttagttttggacatgttttttacacactgacttcaaggggcactgatgtagacttgtcttatagtttagtgactggatttggagctcagaagctgaacctagagatggagataatttttttttcttctcagctttatgaagagaagggaaactgtctaggattcagctgaaccaccaggaacctggcaacatcacgatttaagctaaggttgggaggctaacgagtctacctccctctttgtaaatcaaagaattgtttaaaatgggattgtcaatcctttaaataaagatgacttggtttcaagccaaatgtgatcgtggggttgtaa

SEQ ID NO: 195735 - DNA, 564 bp, Homo sapiens
ggtccgtgtttttctccggatcgttgggcatgcggaggcagaaggagagcctggcagagtgaatgacaaacgcaagggaggctgcagaggggagggagtgagggcggcccagggcccagcccggcgggagccgaggaagagaaggaccagccagccaagggcgggcggctccagaggaggcccgggactccccagtttcccagcctcttccaccccacgcggatccctgccccgacgctgattcagggggtcaaagcctcgggcggggcggaccgcggcggtgactggaggcgccccagtttctctgggtgtggcctgcggaccccctcgggagcaggtcgtcccgcaccagtgtctgcccccggcccccagggacacctgcacccgccccactcacgacggcgcgtcaggtccccaaccaggcgtggggcggggtgggaaggtctcggttcggccgccccgcctgtgctgtccccaccgccccccggcctcgggcagcgcgctcccgggtcacccacctcccgcgggcacgcgcagggcggcccctccgggcgctgcggccgc

SEQ ID NO: 195736 - DNA, 467 bp, Homo sapiens
aagagggagtgatgaacagtacgaggcacttagcacgcatgggctgtgtctaggcggtggcccccttgaggactcatgacccatggaaaatggctgtgcatctactgtgtgccagcacagtgctgtgcctacatgttcttacctaattgtcattgcaacggagatatgtgttgggctcattttgctgatgaggctcagaggggtgatatgacttgcctaaggccacacagctattgaatagcagagttaggattcaaacccacataggcctacagccaaaatcccaccttcccacctcaccaggccacctgccaatctaatggaggaagcagagtcatttacatacattatttacatatggaaagtgccataacagaggcagtcatttatctgtctagtcaacagatgtttattgagtgcctacgacgtgcaaggcgcagtgctgggagttatgggaacacagagca

SEQ ID NO: 195737 - DNA, 234 bp, Homo sapiens
gtgcatggctgtggctgtgagtataaaatctttttaagatctcagaaaggcctgatgtggcaccccagagagctgttcagacagtaaggcttctaagaagcacagcgtattgtcccttggcagtctgagcagaagctcacagtggagaacttacctcagagatttgtgggtgtggcttttgtgagtgaactgcaataagactcaggtgacgcattcaaaataatgttcccagta

SEQ ID NO: 195738 - DNA, 167 bp, Homo sapiens
ttcataatatgtagattgtgataggaggggtagatcccactcagcagagggctgagaaaaatgagtcttaacagttttagaagttgagggcgtgattatagaaaataaaagaagaataacaagtaatgaaaggacaagtgattttttaaaaaattaccttctgaaat

SEQ ID NO: 195739 - DNA, 573 bp, Homo sapiens
ctgtgggttcatgctgtgggacacctgaaggctgatttgaagcagaatatagaactgcggcacgggagaccagggctgggaatgggaccgacattcccatgctaagtcgaggagcgcccatcacctgcagcgagcttgtaacatgcaagtgtcctgcacaagaccagtccagtcagctgtgggccctcaaaagctcagagtctggcggcgggacatgctgcagagctgctgctagctcaggcaggtgggaaaattcaaagcaagacagacagaagcccgggaaagacgtccagtggcgtccagtgcctaggcaggccctgggtggtggagttggtacagggaaactgggcgtgcaggtctggagttagggcaaggacagagggtacaatagagacagaacaagaggtggtggcttggggagagtgatggaagctttgatttatgtgggagcagataacattcaggacagattgaggaactggaaggcatctggcagtttgggttttattaggcagtgaggaaccattttgaacagaggacaagaatatttagggggtgaccaagcttcctaaa

SEQ ID NO: 195740 - DNA, 217 bp, Homo sapiens
gccatcttggctcctcaagaaaattttaataatcttttcatcctgtcctctctccagcctctcctctactaccaaggtaccttttattaacatcttcttatgcatcttttcacacatttccccatactcatatgtacttatacaaacataaatatttttagtttttagtttttttatttttataattttggaatcaaataatatatatattttccat

SEQ ID NO: 195741 - DNA, 235 bp, Homo sapiens
ctctcttcgacatgagcacctggcttcagtcctcagtcatgtttcttctagtcccacttctactctaagcagcatatgctatggcatatactaagtactgtggtgagggtttgctcattcagccatgctaggatacctccagggactgacacaaggaaggaattcagagcctcagacttgggaaggaatttcacaggaaatggccttgctgtgcccagaattctctgacaactgt

SEQ ID NO: 195742 - DNA, 499 bp, Homo sapiens
gaggacctagtgtggaagtagcaagttcccagaatattgaaagaattcataaagaaacagtcatacacacttacaaagggctttctgcttgtgtggaagattatactgaatgagatgtacgatccccttaaatgctaaaaaaaacttattgaatacatatcaagatgtaccatatgcctggcacttaatgaatattttccttcagtgacaataaacatggttcaaaacaatattcattccagtcggccgcagcactggccctgcctggtgtttgcaaatcaagctgtgtctttggttagctgcatcacccaataaatatttgggaatcaagcttgagctggcaattttcttgataatgcataaggcaaaatagggcacaccctgcatttccacagctgtactggcattgccgcatttaatagttaaaataaaaaaataaaaacaagcaaaaaacaaaacttttgttcctcatgtaggccgttgagatctgggcagcatg

SEQ ID NO: 195743 - DNA, 603 bp, Homo sapiens
gactgtgtctcaaaaaatagaatttttggactagtggaactacacagcctgctttccatatcagaccattcaatccaatgggattcactgccataatctccatgttatgattttaagccaggcctctcttcacctttcctattccttacatttaaagactccaaagcttgtttactgagcacagatcttggaaaacaggatcttcagacttgggaaagcatgacagtagatgatggaaaggtaaagactcagactagcatctagtagtctcgctacacatggatagtaatgctacgtgcatgaatgtgcaatcatgcaaaaactcaaatcagccttctgcacacacacaatggtagactaagaccttctgttaaaggtccaagcactccaaggaagccagcgccttgaggtaccctcagtatgtgcaagtagttcgatgttactcttagttttcccagcaactctgctctagcatgccctaagtttagccagcagcagatcttactgaattataagatgttgccagaggttcagaaccttggtttttttgagatacgcatttgcattgacccaaaatggagaattaaatgactgtatttttca

SEQ ID NO: 195744 - DNA, 307 bp, Homo sapiens
tagaagcacatatgtatagaagtgaaggaagtaaaatcaaattggaaaggcatgttgattcatggttctgaattctaaagataatagggagtcactgaatctttacctgacaagagttgtgctttggtagaacatatgtaagatgagaaaatagaattgattgaagttgggaaacaccatcaacacagtgagtcattcagcaaaggctttgcttacagtaagagaaaaattatttttgtttttgcttgaacatagtcaatgggagagtaacatgtgacacatcactgatcttccagtgtggagagag

SEQ ID NO: 195745 - DNA, 569 bp, Homo sapiens
acctcagcctcccaaagtcctagaattacaggcatgaaccactgcacccggccacatttctacttttgtggagagtatattcaagtctcttgttatttttctatctttttttaaaaatcaatttgtaggaggccagtatatattcaaaatatatgctctttgttagttgtatatgttgtaaataccttttcattttcttaaagctttttaaaagaaattacaattcttaattctagtgaaatccagtatatttttttgtttatgttttaagaaatatattttatatcctgtttaagaaatctttctctgtcccaaggttatgaagatattcttctgcattatcttttagaaccttttctttggtttaaccttgtatattcagatctgcaacctctctgacatttaaaacaacattgtttaatttgacactaattaaaatattagacctaccaaaaaaaaagttgcaagaatagtacaaagatgtccaggtttttttcacccagagtctgcaactgtttatttaatgtattttacaagcttctacatagagcactgatccaaacattaat

SEQ ID NO: 195746 - DNA, 424 bp, Homo sapiens
ctgtatggagggctctacagataccgtctcatttcatgtatttaatttcattaagtgggattcagagcatgccagggcatcgccagacacctgggcttttttcctcaggagttgatcttggtcccagaagaaattacattcatttgattgatagtatttaaacaagcagcagctggccatggtggctcacacctgtaatcccagcactcctgaggtcaggagttcaagaccagccaggccaacatggtgaaaccccatctctacaaaaattagctgggcatggtggtaggtgcctgtaatcccacctactggagagaggctgaggcaggagaatcgtttgaacctgggaggcagaggttgcagtgagccgaggttgcgccactgcacttcagcctgggtgacagagcaagactccatctcccca

SEQ ID NO: 195747 - DNA, 321 bp, Homo sapiens
accctttgaaatcatgatgaaatcatgaaataaccagatgcttatttcatctggtcctaaggcctactccaatctttagtatggccctgactattctgtagtacacaaatggtggttaaatgttatcccctattcctgtgttacaattaaaataaagagaaaaaaatttgaagagaattattttaacaatagagggaagacttccagctttggttccacttgtaagaagcttggaagtggccactccaacctaacaacaagtaaaaagctaagcaaactgcaaaaccaacaatacttcttagattcttaagagaagtgagg

SEQ ID NO: 195748 - DNA, 509 bp, Homo sapiens
gtggttaacgtaatttcttcttctgggacttaaaagaaatgttcaaattaaccactatttaggtttgatcatgcctttggaaggaattggtattatcctttgaaaatgaaaaggcataatttgttgaaggtacatagaattgtacaaaaagaaatcagtaattttcccatttttactattaagttatatcataagcagctattttgaatgacagtatgaaaaagtatgtttgtgttttaaggaggctgtttttgaattaggaaagataaatacgctggtatgaagatcagctcattcaggagcaggcattttcctgcatactaaggagctttaaaggttagacagtaaaaagaaggtgatcattatgtagtctgctccacctcatgcctaccagaaaatttatttcccagcctccctaacttttctacttcaatatacagctaactgttaatgagccctaactctgacctgggtatgtgccaaatatttcacatacatcctgtcattta

SEQ ID NO: 195749 - DNA, 234 bp, Homo sapiens
ccttcacttcttcattagagttattgatagtggagagagaaggttaaaattaaatcatcctgctgcttggtaataatttgatagagtagagacccagacttatcatcaataataagatttgggcatattttctgaagtttaattatctgacccttatgcgcctgggtaaatgaaatttagctgttctgtgaaagggggcccaaagctcattcacatttattttatgcctactag

SEQ ID NO: 195750 - DNA, 479 bp, Homo sapiens
gatacctagccagaagaattactcttaacgctgttaacatttgtagggatatggttctcttgcaaataattgcaattattattatgctattaataacttccattaattgaaagtgtgcttctttcttggccatttgcctgattattttatgtaatgctcatgatactcccattgagggtaggtattaccctatcccattttataggtagggaaacagactctgaaagcttaagtcactttgattacattgcctataagtgagtcaagcatttctctttcacatacaagccagaaggattggaaaaccaagaaaggcttaatgtatcactgcaggaccattgattactctgttttcagctttgttttctttccctctctacagaactcttgggaggaaagtggcacaccactgagtgatggcattagtgccaagttttactgccctttctgatgaagcaaacaatcatcactaaatttct

SEQ ID NO: 195751 - DNA, 443 bp, Homo sapiens
agtgaatcgtgtattaccatcatcgtcaggtattcgtaatctcaatgataataagtaacacccatgccaccactgtgtgccagccactattctaagtgctttacttgtgtccattgggtcatttaagccctcatgatgcccttgtgtagtgggaacacctagaagagcgcagtgattcctgcacatgcgggaggcaggcttggggagcaggggtgccctcgccacccagccttccgcatgtgaggccctccgcactgtacacggttcagaacccacccagtcgcatgatgtcatatatcacatgggtattatgtttacatttgttacacacattcttatattgtataattatatattttacatttattatgcatttcttagtttcttatatacaatgtttctacatgtgtgtaaattacttaggtttataattatctgttact

SEQ ID NO: 195752 - DNA, 276 bp, Homo sapiens
gtgcctgctagaggggtgggcccaggaagaaatggaaaagtcacttcatgtttgctattagtgggattacagccctgctataaagggggtggcttttgaggccatcatgactaatcgtttccaactatgtttgtctatggaggaaggcaatgttaattatggtgttttaatgcttcattctactatgggttattttatatctgatttcttgactcttagtaaaaataataagcaaggaagaaatcaactttttctgatgtaagctctgacaatact

SEQ ID NO: 195753 - DNA, 725 bp, Homo sapiens
ctcttcataaccatgtggcacttgattctgtttccttcttccttgagagtgttgaatacagattctaggaaatctgaaactctgaagcctattttcaaagtctactctttgtttttcctttttcttgatttttttttttttcttttgagacagggtctcactctgtctcccaggctgggagtgcagtgacatgatctcagctcattacagcctcgacctcccaggctcaagtgatcctcccacctcagcctcccacatagctgggaccacaggcacacacaaccacgccgtggctaatttttggtattttttggtagagatagggtttcgacatgttgcccaggttggtctcaaactcccgagctcaggcaatcctcccgcctcccaaagtgctgggattacaggcatgagccactgctcctggcctaaagcctactcttaaaacagttttggacctggtctttttacattctggatgtcagcctcaggcccccacagaaaccatgttttctatcagtgaacggtaaaggtcatcagtgcttttcaccagttttttactaaggcaagtctggtcttgcagcatcctagatcctagattttacaaatccttaggccactggtaatgtgctctggaaatttctgcccccctctgcctctttaacttcatcctggttgatctctcctgcctttctcctgcattgtcatcacttcctacagaaacaaga

SEQ ID NO: 195754 - DNA, 879 bp, Homo sapiens
atccactgaagttactctcatgccctggtgaagtatctctgtgcctattatttgagaatgctagagagacttcttttctccaaacatttgataaaattaataatacaggttattaatgaagaatcagaaactacaaaaaggtggcaacaaatagacggccatgccatggcctcatatccaaaatgcaacggtgctaaacagaaaacacatgtctttccagccttgctttattgtgtagcagtttatgattttgtttttttgtgcctgtaaaaaattgtagccagactgcatatacaattttacattctttttttctctcattacatggcttaaaaaatcacttccctgtctttttacacagttttcagttaatgtcatataatcaagctgttgtaccacaacttatttgagcaatcctctaccattggtcatttacattgttttcaactgagcacgcttcttttttaaaaaaaaatttttaaatttttgtacaaatggggggtctcactatgttgcccaggctggtctcgaactcctggcctcaagcaatcctcccacctcggcctcccaaaatgctgggattataggcatgagacactgtgcctgtggctttcactgctctgaacatctctgagcatagaactattccttcatgtagtattgcttgcattagctaaatttctagagttgggattttttttttgatggggtgctgtattagtccattttcacactactataaagatactacctgagactgggtaattcataaacaaaagaggcttaattgactcacagttccacatggctgggaggcctcaggaaatttacaatcatggcagaaagtgaaggggaagcaggcaccttcttcacaaggtg

SEQ ID NO: 195755 - DNA, 474 bp, Homo sapiens
aactcaacttgtgctcaggtgtctcttccaccctcagatgattcatcgaaagctgactgaattcccagtgacaggagtagactgcccttcatcttagccagatatcacaaggctattcctgagtgactaaggaaagacttatgtcccatgatgtggtaaggccctatggacataaaacataaaatacctctccagagaaaaatatagaatcagaaattatgattttatagaaaattcatatttttaatcagtagattccttggataactaaattcattggactaagtattatttcccaaatcaaatgtcattatgttgtacattctgtttgttaaacatctgacacctaagcatatgacatcctttctttgtgctataaattttatttttgcctattgtgagtatatattactctttatactgaatttttaaaaaaattaataaaacaatttataaatatggcaaaaaaaaaaa

SEQ ID NO: 195756 - DNA, 262 bp, Homo sapiens
acattcgttttgaaggacatgggggcatcagcagcttggggagaggactgtactgcttagaatgaatcccacagcagcacaaggaaccagactgagacaagtgtaagaataagaattaattctcccctaagccacgagggggccagtggtagaaaggccctcagagctggttggttcagaggtgaatcaaattcctaggttacttccagccctctgctcggctgtcgacgcggccgcgaatttagtagtagtaggcggccgc

SEQ ID NO: 195757 - DNA, 500 bp, Homo sapiens
atggtatcattagtcttaagtattgtggtacttcagttctgtaagagttgtaagattaccaattcatcagtgttttttgttgcttagtttggtggcatgtaaatgacagcaacaaaaaagccagtcatgaaggagatttgatttgatttctacaacttttcacggtttctctttagttttatctgaaatacatttgtaagcttagggtgcaatttggattaaaacagttttctttagtgtcaataatggcctttactagagtgaatggatatttttccattctggattatcgtttaatcgaaactttgtttcctgtggaaatttttctggtttaagttatttgatttgggagataaatcatgtaacttaataaactttggcatcctggttaactgaaattgcttcattcaatatttgaagactgaaatctgtattgttgcctgtacctaaattatgggagaaggaaaggaccgtgtacagggtaggtctccaaagatatg

SEQ ID NO: 195758 - DNA, 649 bp, Homo sapiens
agggctccccttgcctcctctccccctacccctctccagcgaagggctcaggagtccagctccacctgcagcctctccctgctccggcacagcatcctctgaccttgggcgaggccctgagcctcagatgtttttgagttcccacatctggagcaggaggataatgattcctgctgcctcccagggttgctgggaggatgaagtgagtctgctgtgtgatgctcagaacagggccactgtcattatgccattctggttactagtactcttattaccattacacttattagagaggcaggatccgtgcttggatttagtagttaggattcacagggtgagtgatccataattctttgccattacgatgaggtcacatttcctttggtaaaatgttgaacacctttgtattatggaaatgttcacacatacccagaagaatagtctcgcgccctcctggggtccctgtcagcagctcagcaggtagcagctgtggccaggccttgtcgcctgtgcctgctcctcacctccctgcttatttcagagcaaatcccaaacgtcgtacagccagaaatattccacacttttccagaacaagcctgcctcagtctcctcatgcttccccagttgtcttataatccttttttttttt

SEQ ID NO: 195759 - DNA, 178 bp, Homo sapiens
ttgtattcgcaggaaccatggcactggcaagtggggctctgccagactggtgtgaacaattaaccagcaaatgtcttagtgctataaggcattcatgcatgcatgcattcattcattcgttcatttttttttttgagacagagtctcactctgttgcccaggctggtgtgcagtggta

SEQ ID NO: 195760 - DNA, 841 bp, Homo sapiens
cgtaaagctggttcacctggttctatctgtatatgatgaagtagcttgtattttatagaataactataaaatctagtaaaaattaagcaacataagcaatcaccacaactgtttaagggcaatgggcagtaaccaagcctgtcaggatttgtggggccataggataaacacaaagaaaaccacatttaagaacatgagagtaaaatggctgaaaaccaactacaaagagaaaatcctaaaagccaccagtgaaaagttatacattattttctaaggagcaaaaaaatactgatggctgggtgtggtggcttatgtctataagcactttgggaggacattgggggaggatcgtttgaggccaggaatttgagaccagcctgggcaacatggcaagaccctgtccctacaaaaaatttaaaaataagccaggtgtgatggcacatgactgtagtcccagctactcaggaagacaggaggatcacttgagcccaggagttcaaggccacagtgagctgtgatcacgctgctgcactccagccagtgtgacagagtgagatcccatctctaaataataatgatgataataataataaatatttgtagctttctttacaaaagatgtttacaaaattatcattggaggagcctagcttagttcatgagtcaatagtttattggttattactgttcaggagttacagtgctggtgaaatgcactgtctttcagaatgctgtggtccatctctgatgaatgccagagataatggaataacattgaatactaaacttttttaaaaggctgtgaacattgtattctatattaaagtatgttttaaaaatg

SEQ ID NO: 195761 - DNA, 397 bp, Homo sapiens
catccaacaagctgactccgtttggcaggcttcttcatctatctgtcagcaagatttgctaagcaagaaaacagaatatgaccacgatttcactcatggaggtatgtatggtacagggtttcactgatttgtgtactgatcaactactaaaggcagggataccatcttaactgggaataccccagaaaaatcagccacatgtctatgatttttacagagactgggagaatattcaggctaggggtggtggtgatcctggcactcagccatattcttggagacccctctctccttccaacaggatgggatctgactaccagccttgggcaagcctctcacatactctagggaagggacagatgagcttcctttctagacccaaggaatgactgaccaa

SEQ ID NO: 195762 - DNA, 683 bp, Homo sapiens
gatctgtcgatctcagcctcccaaagtgctgggatgacaggcatggttgcattactgaaattttatatgaaaaaaagaatgtttcttaattgctcttaggggaatttattttgttggcaaaaatgtgaaatttggggtaggggttgtttttgcctccatgaggttttctttatttgttcttaacctgcttgttttgattcttggagagtataatatagaggctttgaaagaaattgggctctggaattagattagctttaaattgggggctctaccatatttagctgttattcaaactccctgatctttggtttcttcatctctaataaatataatagctcctgtctctcacggttgttttgatgaatgggtattatgcatgtgggatctcaacaactattagctatcattattgttgttagaattactattattaatattattatttgtataaaatcttacaggctttagtatctggcaagacacatattcagaaaacattttagatttgttaggcactttatttctgtgctttatagagatagaaaagcagggtagatcaagagtacaaaaacagaatccaagacttgcccaggttaagttttatctggatagttggcagagccgggtacggtgactcatgcttatagtcttagagctttgggagcttgaagtgggaggat

SEQ ID NO: 195763 - DNA, 468 bp, Homo sapiens
agttcgacggagactctcccaatcctattcagatgttagttaacatctttaggattgggagggtctggaagaaaaagatctagctatgttaatagagattctttacggaattgcagtggaaaaagactaatttacgcagagctggttgtgcttgagaccggagttttattactcaaatcagtctccctgagcatttggggatcagagtttttaaagacaatttggctggtaggggcttgggaagtggatactactgattggtcaggttggagatggaatcacaggggattgaagtgagtttttcttgctgtcttctcttcctgggtgggatggcaaaactggttgagccagataacgagtctgggtggtgtcagctgagtgcagggtctgcaaaatatctcaagtactgatcttaggttttaaatagtgatgttatccacgagagtctccgtcaactggaccgagttc

SEQ ID NO: 195764 - DNA, 565 bp, Homo sapiens
tccccgtacgcccaaaagtgagatcttttattatcttctctgtgtttttgttttgttttgttttttgttgttttttaatgagtaaagaaacaggattacaggcgtgagcaactgcgcccagactcaagtttttcttataagtgtaaccgcccaatgggttaactttgcctgctgcccagacaaagccgattcatcaagatgggggaattgcagtggaaaaagactaatttacgcagagctggttgtgcttgagaccggagttttattactcaaatcagtctccctgagcatttggggatcagagtttttaaagacaatttggctggtaggggcttgggaagtggatactactgattggtcaggttggagatggaatcacaggggattgaagtgagtttttcttgctgtcttctcttcctgggtgggatggcaaaactggttgagccagataacgagtctgggtggtgtcagctgagtgcagggtctgcaaaatatctcaagtactgatcttaggttttaaatagtgatgttatccacgagagtctccgtcaactggaccgagttc

SEQ ID NO: 195765 - DNA, 484 bp, Homo sapiens
  misc_feature (438)..(438): n is a, c, g, or t
  misc_feature (458)..(458): n is a, c, g, or t
cagttcctcagccgtaatagccacatttcaagtgctcaatagcctgatgtagtcagcagctaccatactgcatggtgcaggatgtagaacattcctatccttgtagaagagtctatgatagccctatctaaagaaatggtcacataaaaattggtatctgcatcccatgaagtgacataacaatttaaattctcaatattagtatatgagttccaacatcctctccttgtcaacatcagatcaatattctgatctgatagatgagacataatgttttagttagtatttttttttttttagagacagagtctggctctgtcacccaggcgggagtgcagaggcctgatctcagctcactataacctccatctcccaggttcaagcgattctccggccgcagcctcccaagtagcgggggttacaggcactggccacggngcccagcggatttggggatnttttagtggaaagggtcgccaatcgg

SEQ ID NO: 195766 - DNA, 485 bp, Homo sapiens
  misc_feature (485)..(485): n is a, c, g, or t
attactgaaagcattttctgtttgtttccctcctgaaaacattaggatgggtgagctcttggagggatcctggctctgaaggcacctaggtgagaatggacgtgggatagtgtgagggcatggatttgaggctggtggacgggtgaagggatgacttaaaaggtgatttgctactgataaggatcccaaagaggagaaaattagaatccagatgagtacagccttcttcctagctttgccggcttttccttgggaaagaacataatatttacattgaaaaaaaaaaaaaaaaaaattggggggatcaagtttgggggggggaaaaaggggtaaggaatgggcacagtgggtcattaggcgggtttccgggacccatgttttcttggtacaagggggtaaattcgggcgcgggtctcccatatagggaggtcgtattaaattccagttaacgccaggtaaccggggattaagaatccgggaaatgn

SEQ ID NO: 195767 - DNA, 395 bp, Homo sapiens
ctagagttgcccgtgacatctccgccttacaacaatcacgcttacattgaattcatctaatatgacaggaccagaaagttgtcatgttaaagcgaaagaaaagcagtctgtagaccaggagtacaaaatgatcccatttgtgtagccaaaaaacaaaattataccaaaacaaatgtgtttataaaaggcaataaaatacctgcaagaatattgtcaaactgaaaactgtggttactatgaaaagcggatccaggaaaaacaggaacagaggactgctgtctgtgaaattttaaaacacatgtcaacagggttttaaattaaaggaggccaggcacggtggctctcaactgtaatcccagcactttgggaggattgcttgaccccgtaaggcggag

SEQ ID NO: 195768 - DNA, 483 bp, Homo sapiens
ctgctcccgtttcctcaactaaatgcttgaaaacccatctcagattctcttttctcacaaaccatctcttgatgacttcagtcttctttcaagtcccaccatgatcaatcaatcaatgtttaatgagtacctgctacgtggggtgttataggagttaggaagtttaagaagattttgcctttagttggatggaggtgatgctggagtggatgaagaactctcctgtaatcccagcacgttgggaggccgaggcgggtggatcacgaggtcaggagatcgagaccatcctggctaacacagtgaaaccccgtctctactaaaaaatacaaaaaaatagccaggcgtagtggcgggcgcctgtagtcccagctacacgggaggctgaggcaggagaatggtgtgaacccgagaggtggagcttgcagtgagctgggattgtgccactgcactccagcctcggtgacagagcgagactccgtctcc

SEQ ID NO: 195769 - DNA, 397 bp, Homo sapiens
cattattccagttatatcaacagtaactttaaatatcagtagtctaaagataccaattaaaagagactgttagagtggatttaaaaaaaataaataaatgaaacaagactaggccaggcacggtggctcacgcctgtaatcccaacaatttgggaggccaaggcaggtggatcatgaggtcaggaattcaagaccagcctggccaacatagtgaaaccctgtctctactaaaaatacaaaaattagccaggcatggtggtgcacacctgcagtcccagctactggggaggctaaggcaggagaatcatttgaacttgggaggcagaggttgtggttagccaagatcacgccactgcactccagcctgggcaacagagtgagactccatctcaaaaaa

SEQ ID NO: 195770 - DNA, 689 bp, Homo sapiens
gacattgcacccacacctagttactttcagtcgtaaataaaatacttgcaaatgttaattctgttattaataggtcattgagctttctctgaattctagaatttagggtgtttaactcttctcatatagtgttttttgtttttttacttcatgaaatcagagtcaaagcattttttagagtaactttcatctttcaaactcctgttctttctactagactcagttcacaagtgtaattattttgcataaataccctatcttccctcttatttattcactttctcttctgtgtccgcctgcccagtgggtctgtcaagacttttggttgtgggtgacaagaacttagcttaggcagaaacgataatgtgtgtgtttatatattggaaaaggctggcatagggaagtgctgttcttcgggcacagctggattgaggaccttaaacaatatcaataggaattgttccctttgcttccttcatgtgatggcaggtctcaactctccttttcagcgtcacgtcatccctgttcgggggacatgtccaactctactggtcattatcttacatagatgaaatattcttaactagtcaaactgagtcatgtgtactctgctctgctggaaaagtgactttctgtcttccatcaatcgtggcagaggcgtttccaagaggaggctgggcaggcaaaaa

SEQ ID NO: 195771 - DNA, 129 bp, Homo sapiens
ttttaatttttatttacatatttaaaacatatcatggtataaatatgatgtggatataaattcgagataaaggaagtattgtttaagaaattagttcatcaattcttaaacaatacttcctttatctcg

SEQ ID NO: 195772 - DNA, 248 bp, Homo sapiens
atttgacaggaaaaaaagggggtttttcattcaggatcatctaattcagctcaggacaattcagatttctataaagttaagttacgaaaacagttacaaaatctttaaatgagagggctttccccatggctgtgaaacataacgagaggtttcactgatgtcttctggggtattcacatagtttgaaaaatgaggggcatccttattctcatcttcaaaaacttttctcagattgggaaagcctgaga

SEQ ID NO: 195773 - DNA, 373 bp, Homo sapiens
tatttgatgctttgtggctaacggcagggccatccatcagttttcttctttgttacacagctttattttgtggctttattcttgatcagttgctttactgacaaggaaatcaaatgtgtccttttcctagcgtctcccatggtatacacgaaatacacagctgcagtaattctagcttatcagtgacattttctcctaaagcatatagttagggtgaatgaattcacttattttaaaatgagaaatgtaaaactatatgagtttcaactctaataaaaagtatgcatgtagaacggaagtgaaaggtttctcatctatgcaacacaaaatgcttacctgattctctcctttttctctcttttctgttattcga

SEQ ID NO: 195774 - DNA, 355 bp, Homo sapiens
gaaaacaatgtgattgggggtcatctttattacttaagtatctctatgtcctcacaacaaaaagcatttcatacatataagaataagaacatcattgtacaattacccaaggctctccctttcccttcccttctggagctgttctgactaataacacattgtgttcttagagcaattttgttttacaaagtgctttcacatatcttatctcatttagttctaaatgccctgagagaggacacaggaagaaaatagaaacttaaataaaactcaactgacatctttactacttgttacaaatgcctgtattgttttttaaaagccaacaaaccaaccaacccgctggcctaacgtg

SEQ ID NO: 195775 - DNA, 659 bp, Homo sapiens
  misc_feature (11)..(11): n is a, c, g, or t
ctgaagtatantactgtagtattgttaataattttgtagctgcctcctgttgctattgtggtgagttcaagtcttgcgagtatctgcttaaaataccttaaaataccatatgatgccagtcatctccaagtgaacagtttatctctccagtaagttggatacggtagttaaaaattctcactcttgattatttttcatcatgtttagttgaataacactatgggactcatacacagtgccactagcgatgctggaagtgttcctgagaaacagacaaaagtcatgccattacaagaaaaagtttaattgcttgatatgtagtgtagattgaagtctgcagctttagttgccaaccatttcagacagagattcatttataaacagatgacataaactttcagtattgataaatacagtacaatactataaatgtattttctctcccttatgattttaaaacgttttcttttctgtagcttactttattgtaagaatactatatatatatatatatatatatatatatatatatatatatatatatataatgtgcaaaatatgtgttgtttattggtaaggcttctggtcagcagtaggctctcagtagctaagttgttgaagagttaaaagttatgtgcagatttttgacggctctaggg

SEQ ID NO: 195776 - DNA, 543 bp, Homo sapiens
cactttcccacaggtaatcactatcccacatttgctttaattattcccatcatgttttatgctatgactacaaatgtgtgaatctatattccactgtatgttaataccaacattttttcatttattttaccgctgatgggcaatttaggttatttccagatttttactattacagatgcttctgtgaacatccttactcatttctccttgtgcacatgtgcaaaatttctctggagtacatacctgggagtggaattactagaatgtggtgcatgtacatgttgttgtatttatcagtagttcactcttatttattgctgtgtattccattacatagatataccataatttgtttatctaatcacttatttatagacatttgggttctttctgtttttttgactattagaaataaagcagctataaacatttgtatataagtttttgtataggcatatgctttggtttctcttaggctcaggggctgggaaccccctaggaatggaggaatagctgggtcatatggtaggtttatgtttaact

SEQ ID NO: 195777 - DNA, 434 bp, Homo sapiens
tgcctacctctaggacccttacacttgctagttctacttcttgaaatttgaaaacttagttgtttcattcattctgtcatttattgtgtgcccagaaacttggatgcacctagatgggtcagtgctggaggaaagcagacatggtccttgccttcatgaaatttgcagtccactagggaagacatgaatcaaataatcacatcagtgaatgtcaaaaggcagctgtgacaattgctacagatgtgacgcccatgcattgggttagagaactctcagagatggtgccaggtagaactatgtgaaattgcagatttttcagtcatttttgacctataaaagtaaagacagttcagattacattttatgtttgaccctgaagtcacagaaggttcttgagcagagaagcacatgatgggaatggtatgtaggaacag

SEQ ID NO: 195778 - DNA, 453 bp, Homo sapiens
acaccggcaaaagtcaagttgaccacgatacctagacctatgctgcgaaggagggacccactgtggtatctgcgaaacatttccttctgtctaaggagagtttacaatcttatcagagttctgggttggtctgagcaggaaggggaagcaaattcagaaatgacactttttattttgtttccgtctcatttttctattttctcttaggaaaaaaaaaagataccaaatttagtcaaagtataggaagtagaaactcttgtggaacttcttcagttcccatttctttaatgggacagactatgctgaaaagacagatgctgtgaatctcacaaaattttaaatgagctgaatgtatgtgttggagctatactgtcttcctgtaaaatagtaagctaagcagaattgccagccaacttttggtaacaggaaaactgaaaataaaacctatcatgt

SEQ ID NO: 195779 - DNA, 379 bp, Homo sapiens
aaaatgacagggaacataaaggtcagatgagatgaattctgggactaactcagatacgcttttggaggccttatatagaattcagaaatctcaagtctctggccaaatgtcaaagattcaacaaagggtaataaaaaagataacctgaaagctgtaagtcaccaccaagagcaccttttaggcatgaccttcaccagcaggaaaaggaacaatgcatgtgctgtagatccacatggatagaagtggggaaaaggaggttgtattgcatatatttgtgtctgcagtttgagaatgggacggagttttagtacttcatcttggttgcacaagttgtttgattggatgtaattgttatctaccagtgtggttaatggtttgg

SEQ ID NO: 195780 - DNA, 306 bp, Homo sapiens
ccatggtttcttaatgacagtgctgatctattttacatctaaataactatctccactctcacccagaaaacggtaccattcacttcagagcttgttgccctcgatgccctcatgttccgctcggcactcagcaggaccctgggcaaactgggcagccatcaatctcctgaggcagttacttcattatttgggttaggtcattctctagatggctcactggccttgcctaggcacaggcgcatggagcccatctgttcatcatcgcctgttcatgagaccccaaagattacttgggctcaaaagtac

SEQ ID NO: 195781 - DNA, 146 bp, Homo sapiens
ccggaactatagatgtagtaccatgaggaagttccatatggaggagatcacatcctcacacaacttccatttcatctcctccatatccagcttctgcgcaaagccctggatctgaaacattgtggctctgactcaccagccttcag

SEQ ID NO: 195782 - DNA, 299 bp, Homo sapiens
tcttatcactcaagtgtttcttattttttccaaagctgtaagattgccttaatttatttaaatgtaatcattcagaaaactcctgaaacatgaactcattgctttctcatgacaggcaatactataatgacaagttatttgatctatgacatcaaaaattctttataaatatgtttgaatgcaacaaattattgttaccacttgacattttcctttttgtttgacattgttgtggcaaaatttggtgaatattatataggctacaaattttattaaagattgttattattttaaatgtc

SEQ ID NO: 195783 - DNA, 566 bp, Homo sapiens
  misc_feature (552)..(552): n is a, c, g, or t
ccccgcattggcagcaacactcaaatttttaaagcatgagagaagaaaagaggaaatagatggcataatactttcttcccacatcccaaagattgttggtatgtgcacctcactttggagatttaggtcatttaggtcaaaagaaacttgctattgaggaaagagaatctgtagaagtagggtttaagatttgcggggatggggaagggtttgggacactcactttggacatctaggttaatcagagttactgcataatggctccccttctattttgcttccctttatgtatgggtttgtttagacaaggagcagcatgactcttgtatgttgccatagcacatcaaataggaaaaaaaaatagcttgaagaagttggtgaggaaggagctatttaagtcagaactctcagagtgacaaactcaactaaaattaaatttcacaaaagtcaatttattagctttcataaacgataattgtaatctcctagggtgacagtggcctcccggcatagctggatccagaagctcgagtgtgctgcctatgcgggtcnagctcgattctatt

SEQ ID NO: 195784 - DNA, 859 bp, Homo sapiens
tgacatttttagttcgtgcaacattccaaattacttacgttgtactgttgttgtctaaacgatgtattttaaatagcctctgtcccagatagcgtgaaactgtaacaaaattcttttgacttactcgcctttatgtagaaagaggccagtatttggcaggaagcaatttagaggtaaccagtttggatgttgtttggggccagtgttcattccagctctttcttcaatggcctgctgtctgaaagtcttcctttctgtcatcactggcatcattctggccttcagtgacatgtctgccttactgattagattatgtctctctgttggtctcactgccccaattcattgaacatttaatgaggtgccttccatgtttgaggccgtttctactcccttttaggtgcactttccatgtgtctataaattgaatgccctgcaaaccataaacctttcctgattaggcattttactgactccttattgccatgtgcatgtgagtgtgtgtctacctatgtgcatacatacctacatgtatacatacatatgtactccaaaacacatacacgtgtatacgtggacataacttgtatgtttctttccttgccttcattttttcgctagctttctttttatctcactagcctgctttcctacacaaaaagcctcggctttgctcttatccttctcttctctcaactctatcaatggatcttgagatttaggagataactgtggtatttatgtacctttgaatgacaaacagacgttctgttcctttgagatcatccttttcaattaagtgcgtagatttgggcagcatccatgggcagatatgagggaagaaaaagataacctgttt

SEQ ID NO: 195785 - DNA, 396 bp, Homo sapiens
atttctcagactattttgcatttagggttctagatataaaatagttgtgacaattataatatatatgtgggagatttgaagggagtttatgttttcttcgtttttgtggtctgggtcatgaagaagtgagattttgccaacagtagcagaaatgcagcatagcattatttattctccagcatcttgagttatcaagaggcttttgtggttaaggcagcagctagactgttttattgtgtacatcccctagctgggtatttagaggcagttgtgacagtggcaacttcctgattcaagctttccaatccttggatcacagttatctgccatgtgttcttggatttagtggtcccattggtagcttcttatgatttcagttctgtagtgttctggtag

SEQ ID NO: 195786 - DNA, 333 bp, Homo sapiens
ggagtgcagtggcacaatctcaactcactgcaccctctgcctcccaggttcaagcaattctcctgcctcagcctcccaagtagctgggattacaggcacctgccaccacacccagcttttttgtatttatagtacagacaaggtttcactgtgttggccaggttggtcttgaactcctgacctcgtgatctgcccacctcagcctcccaaagtgctgggaatacaagcgtgagccactgcacccggcctagagggtgtatttctaagaacccctagaaacaaaaatttggaaattgtgatgcaaagagatagccaccaagtctatggatctta

SEQ ID NO: 195787 - DNA, 475 bp, Homo sapiens
accatttttgggtgttcaaatctttgattacaaaaggaggatcttgaggtatacaaaaaaccggaatcctgtgttcttattagcctaaatatgtgaaggacttcttttggccctaataacgccaagttagctaacatttaccacagtcattttttaatcatttggttcaaaataggaatgacagaggccaaaaagcctaccagttataaagacattgttcttgatggatacaggaatattgtggggaaaaggatggaaagggggaattatttcactgaaagagactaccctttcatataattagcacataaaaaagattgttaaaaaataacagtcttaggaaccaagtattaaagatcaatatatttaataattttcaggtttaatgcaattataaaattctaattttctaataataatattcattatccaagtgattaatattaaccataaacacccacagtttcttctgtct

SEQ ID NO: 195788 - DNA, 889 bp, Homo sapiens
ctacttgggagggtaaggaaggagagtcacttgagcccgggaggtggaggttgcagtgggccaagattgtgccactgtactctagcctgggtggcagagcgagacggcatctaaaaaaaaaaaaaaagaacatattcccacagagaagagaagactactctgtacccaaaataattgaaaacagagtctagaagggatatttgcacacccatgttcatagcagcagtatacacaaaatccaagaggtggaagcattccaaatgtccattgatgaatgaatggagaaacaaaatgtggtatatatctgcagtggaatattattcagcctgaaaaggaaggaaatcttgtcacatgctatgacatggattaatcttgaggacataatgctaaatgaaatgaatttatcacaaaaagacaaatactgtatgatttcacttatatgaaatcaagatcacagaaacagaaaataggatggcagttactaggggcagagacttgtttaatggatatagagtttcagttttacaaaatcagaaagttctggagatctgtttcaaaacaatgtgaatatactaatactattaactgcatacttaaaaatggttaagggctgggcatggtggctcacacctgtaatctcagcactttgggaggccgaggagggcggatcacttgagatcaggagtttgagaccagcctgggcaacgtggcggaatcccgtctctactaaaaatacaaaaattagctgggcatgatggcatgagcctgtaatcccagctacttcggaggctgaggaaggaaaattgcttgaacccaggaaagggaggttgcagtgagccagtcatgccactgcactccaacctgggtgacagagtgagactccatctca

SEQ ID NO: 195789 - DNA, 367 bp, Homo sapiens
caaagatgacaagtgacactgacattttattatgaagaagatacattagctttatgtttaagacaagaaatcatttttgtgccatgctgacaagacatttaaagtgttggtgacaaaaataaatgagaagaagcagaaatgcatacggaaaggttaagagaaacgaatggtaaagaacaaaatagtttgctaaataatattaaaagttatttgtacagagctatagtttaatttaaatgcgaatttaggatacagaaggatccttagtaagcttttatatctgttaaatattttaattattatgactgtcaacatcagacacaatctctaaacatgaactgagtcctattgaagtggaactgcttct

SEQ ID NO: 195790 - DNA, 391 bp, Homo sapiens
tctaccacgtgggctcaagtgatcctcccaactcagcctcctaagtagctgggactacagacatgcgccaccatacccagcttatttttctatttttttgtagagacatggtctgtcactgtgttgcctaggctggtcctgggctcaagcgatcctctcaccttggcctctcacagtgctgggattacaggcatgaatcaccatgcctagcccctaatgccagtttttgttgttgttttttcctgagacagagtttcactcagtcgcccaggctggagcaagactccatttcaaaaaacaaacaaaacaacagaaagtactcaataaatattagctattattataagctattactcactgcaaacaacagaatataagctattggtactac

SEQ ID NO: 195791 - DNA, 433 bp, Homo sapiens
ggcaccttcccgccgctccctccgccccaactcgccacgagacagaaaacgccgggagctgggacttctgctgggggccgatggggaaggggagactccggagttgcccggcgacccacacccgcccggcacggcaacccagtccactctcacttgctggagcgggaaagcaagaggagcagagggcttaagacagggaaactgagtttccgaaagctccaaagtcacgcagcaagtcacagaggcagaggagggtggaagcttcggatttaggcagacctaacgtctgcgagcctccgcagtcacctcactccaggcgccctgctaaaccgggatttactcatctgtgaaatgagaaattcggagaacaacgcctaagtcacagcattgctctgaggaattaaagcactaggcacataggaacgggtcgtca

SEQ ID NO: 195792 - DNA, 420 bp, Homo sapiens
ggaaatccagttcagcaaagcagagaagccaacagtcttggcatcagacagtaggtggaggtcaggatcaaaagacataacgcagcaggtcagagggcatggccaaggtaggcatgacaagcatggggtgttagatgtcacaatttctctgattctcactgcaggaagggaggtttctattgtctctattttatcactagggcagaggaagtctattgtttacccctcactgtatctatcataccatcacctaaagaatgctgtggtagtttccagggccccctcagcaggacatcggggcctttacacatgctctttccttaactatgccctctctagtctcttcccccatctttctcccctgtctgggggactcatggctaaagactgaactcaaacatctcttttcttgcaagaccc

SEQ ID NO: 195793 - DNA, 142 bp, Homo sapiens
ggtttcaatttatgaattttggggagacacaacattcaggccatagcatacctcatagatcacatatggatatgccagccaatttgactaatgtcagtggtgaacatagtcttcttgatctatatccaaggcatccttctta

SEQ ID NO: 195794 - DNA, 381 bp, Homo sapiens
gaaggagggaatggggaggacagccaagatttcaatacaaaggagagaaaaaggaaatagggactctgaaactaacttccaggacatatttctcagacttaaaatagacttgaccttaggattgtcatgagaaaagccagaacaaatgaagtcatcatatataaacttcactctcaggaacacgactagggggaaacacagaactaggttaagggacactgattagccaataactgctcccctccttcagctgagttttcctacaggtcatactttaaggctattaaagtcactattatctcaaaaatgttccatgcaacctcacaggggctccaacctcctactaaccctaattaaaagttgaaatgggtgacagaaaaa

SEQ ID NO: 195795 - DNA, 269 bp, Homo sapiens
tgctttagagcatggaccctggagtcaggctgtctgggtctggattttattttgccactaattaattatgtaggtaatttctggacacctcctaagccacatttgtgaggtgggaatgaccggagagttatatttacctcattaggttgtatggggattaaacaaggtgatttggagccagtactcattacttcatacgcagttattattgttactttacagttggtggctgtgaaaaaataaaatcgttctggtattaaatacaagtt

SEQ ID NO: 195796 - DNA, 485 bp, Homo sapiens
aactggtcggagcaaagcccgtgttccctccactgccatccacaggtgcccaaagtctcagtcccgtgaggcttctacactttatttaccacagagaagtagaaccatgacttacaaaaagaaaagctctgaggtatatcacagttgaaacaaaatgtaagtgatcttttgtcctacttagagaaaacaaaaaagtaggcccggcgcagtgactcactcctataatcccagcaacttagggaagctgaggtgggaggatcacttgagcccaggagtttaaggccagcctgggcaacatagtgagacccagtgtctaccaaaaatttttaaaaattagctgggtgtggtggtgtacacttgtagtcccagctactcaggaagctgaggtgggaggatcacttgggcccagcaggttgaggctgcagtgagctatgattgtgtcactgtacttcagtctgggcaacagagtgagagagcctatctca

SEQ ID NO: 195797 - DNA, 412 bp, Homo sapiens
accagattaatgcaaagtagtacaagacattgaagcccaagctgcatgggctaaaatggtaaccggtgcacagtgaatctctttcacaccatttatttaattcagcatagaattaataagtattggccgggcgcggtggctcacgcctgtaatcccagcactttgggaggccgaggcgggcgaatcacgaggtcaggagatcgagaccatcctgactaacacggtgaaatgccatctctattaaaaatataaaaaattagccgggcgtggtgccgggcgcctgtagtcccagctacctgggaggctgaggcaggagaatggcgtgaacccgggaggcagagcttgcagtgagcagagatcacgccactgcactccagcctgggtgacagagcaagactctgtctcaaaaaaa

SEQ ID NO: 195798 - DNA, 472 bp, Homo sapiens
gagaatttattgaaccgggggaggtggaggttgcagtgagctgagatcatgccactgcactccagcctgggcgatggagcgagtcttggcctcaaaataaataaataaaataaaatggtaaattttggctgggcgcagtggctcacacctgtaatcccagcactttggaagaccatggcgggtggatcacctgaggtcaggagttcaagaccagcctgaccaacatggcaaaacccccgtctctactaaaaatacaaaaattagccgggcatggtggtgcgcgcctgtaatcccagctactcgggaggctgagacaggagaatcgcttgaacctgcgaggtggaggttgcattgagccaaaatcatgccactgtactccagcctgggcgacagagtgagactccatctcaaaaataaataaataaataaaaagtttgttttacgaaaattttatctcaacttttttaaattg

SEQ ID NO: 195799 - DNA, 407 bp, Homo sapiens
ttatccacacctttttcctaggctgggcatggtggctcatgcctgtaatcccagcatgctgggaggctgaggtgggcggatcacttgaggtcaggagttcagaaccagcctggccaatgtggtgaaaccctgtctctactaaaaatacaaaaaattagctaggcagggtcgcacacatctgtagtcccagctactcaggaggctgaggcaggaaaattgcttgagaggcggaggttgcagtaagctgagatcccaccactgcactccagcttgggcgacagaggaagactctgtctccaaaacaaaacaaaagaaaaaaactgtttcctaatctgtaacagtggaaagtaatataaactgatttctacatttccttcttttttaatcagtatactttcctattagtt

SEQ ID NO: 195800 - DNA, 383 bp, Homo sapiens
gggtgtgttgcccttggcacattgccacacagtgcttaatgatgatatatgttctttatcaaattccccccaccaaataatggcattatttacgtgtgagaaagttgcacatttcaccacctcatggtttattagagtgcaattccgtgagaacaactgcctgtgatcctctgtatccccagtggccaactcaggagctcagtatgccctacccagtagatgctcagaacatcattgctgagtgaggaagtcagccatcattttctccctggatagtctctcctgtagataacaggggccgttatcagccaggtttttcatcatttgtggctttgaatttcagggacatgacaagtttgctttttgtttcgttttgttttttt

SEQ ID NO: 195801 - DNA, 195 bp, Homo sapiens
ggactgacggaccctctccaacactggatactccagctgcctccattgtcttaattgtttttctctgtttaccaagataataaaagctcattgttttgaacccaatgatacggaatgctatcaagaaagaaaggaaggctgagcgcagtggctcatgcctataatcccagccctttgggaggccagggtgggagg

SEQ ID NO: 195802 - DNA, 310 bp, Homo sapiens
tgtgggcgaatgttttgggagcatctatgcacttgctgctctctcctactcaactacaatctccttgagagctctcatgggtcaggcccacattaagggctcaaaaatatgctagaaacagcaccttcaggttcttccagctgctccatcaggtatcagctcccttcagtagacataccgaaggtggcatgctgggcagtgttcattggtacctgatcttgtcactgacctttaatgtcccatgccttgtgtgtccacagccactttcaacaactcttagcccttatcggtatcttgcttgacagaattc

SEQ ID NO: 195803 - DNA, 644 bp, Homo sapiens
tgcccgcctcagcctcccaaaggcttatgcccacagggttgagccacggcgcccggccctattttacaaaattgtaatgaagctgagaaaagataattcatctaagatcacttgataaatgacagactccaaagcccatggctacttgaccaaatcactttgctctgtatacatccgtatagagaactaggtttggagccaagagggactcctgatttatccctctcatgggcagtaggtttgttatagtgagcccttggccttagcttggttttctttatcagtaaaggagagcatgaccagatcatgccataccaacttgatggcctaggcctagggcttggcttgtgaggtgtgactaaatcacatagcctcagataaggaatgagggaagatttaaagcaggattgataaagcagattatgttttatacttaacaaaatcttaaactggatgtttcagctggggtatcaagatctaatagatatgaaactccaaagggagacagcagatgtaaatgcagtattttaaaggaacttaccaagaaccagttgcacaactcttgaaccccctcacccatttcaagagtatgaaaagtgaagatagaaggccagatgcagtggcttactcttgtaatcctagca

SEQ ID NO: 195804 - DNA, 585 bp, Homo sapiens
tggtactttattgaaatcaatcactacagatgccaagtacacagagcccacgaccttgaagaagtcataggatgggtttccatagcacaggtgttggaaggtgccgtattgtggtgctgggaagcagagacgttctcttctttgaagattttcaaagaaaaaatatagcctgttgtagcagagcagctagcactgcttagatgcagaatcatgagaaagtgaggcgatagcagaggctggtaaactccacctcacaagccaaatcccatgagcaacatgcttttgtaaataaggtttcgttgggacacagccgtgtctattcatttacatattgtccacagctgctttcaagctacaagagcagaattaagtaggaggatgtatggcttgcaaagctgaaaatatttactacctggctcttcacagaacagttgctgacacttgctctacgacaaaggagttactaaaaataagaggccaggaagaggatcccttaaaaaaatgatcgtaatggacaaccatgaataggtctgggaggtggggctgcctagttgtctgcatcactagtaagaataatggtaatta

SEQ ID NO: 195805 - DNA, 158 bp, Homo sapiens
agtggacaagtaaaaccatctatgctacactgcatattttttcctcccccagactggaccagggaatctctcaactttctagagtatcctgtctccattgacaaagctgaacagtattaaagatcctgctgcctttgttaggcagatttggaagggag

SEQ ID NO: 195806 - DNA, 957 bp, Homo sapiens
gcaatcttaatctcatgactatgttcttctcccaaacaaggattgataggtaaatgcattgaacaagtatatataaaaagagattaaaaagcaatattcgtacattatgtgatttatgtttttgatgtcaaaagtttgtgctttgggtgaaatatttgtataactgctgttttcttcactactcctgtacacatttcaccatgtggtcagaaaagttgtagtctgaagacaagtgctttaatatgttctcacccatattggaacttgatttaaaagtcagtgagccaaaaggaagctatccagcgttgattgctagctaagagtaaggagcccctttggttttctgtgatatatatatatatcacacgctctccctcctttaccacaggtgtcattctacctttaatcatcactgtatcatagccccaaagagatcctgaaatggctgtgcatggatttcctcctttgcccttgtgatgttgttgtcttgtggatttggttgggctagtagtttgccaggagtgtaatccagtggatagtgatccaaactgtagccgcagaatcctgtgactgacatttttctttgtggtggtggttggccctgagatttgttgcctacagattttgctaatttacccccctaacgcttcacatagtggggaaaatacacaagaagaacttgagtatgaacgataagcacctttgaaaactccatacagttttggattagggctcatcctaatataaatcactgccagtatcacatgacatcagtatgtgatttctgggtatgtggtagtgagattaaggagcagcttttttttttttttttttttgagacggagtttcactcttgttgcccaggctggagtgcaatggcgcaatctcggctcactgcgacctctgtctcccaggttcaagcagttctcctgcctcagcctcccaagtagctgggat

SEQ ID NO: 195807 - DNA, 426 bp, Homo sapiens
caatgtgtttgtttactcatgtgacttcaactctgcataggcctctcaaatctgcaatcctggattttttactggctttcatatatcataagttggatattttattgggacttgaaatgcacgtctaaagtgaaaaccatttattaatacctaacctttccatatcaacctcttctctttaacttttctgttagtaggaccagcgtactcttcgattacctagattcaaaactgagtaacctctgtgtgcattcaatcagttgccacatcttacaaactcttaccacctgggttattagttttcctctactatcagtctcacatactgtcatggcactgatgtttctagactgtaactcattataatagacaaccattgaagtttttgagcaaggcaaagattataatgagtgggtaccgagctcg

SEQ ID NO: 195808 - DNA, 971 bp, Homo sapiens
gatttttaaatcatttattaaaactaaaaatgagtgtgcgtacgcgtggagagggggaacaaggcttctctaatcagcaaaggggctgtcggcaggcgatgtacaaatgaaagcgcgctttctaaatttccaaagcactaaagggagagaaatgcgcaattactgtgggattcgcccagaggagcagcctcaggagttgaaggggatcctgtccctcccagaggaaagctcacgattggattggaacttctagcgactgcctgaggtgagcttcaggtggggaccggccccgccaagtccgaggcagttatccacaagaaaacacgcgcgtgcccccgctgctcctgcgtggtggtcgtccggagacaggcgccctgcagggcatctagagggccccaaatggctcagccgggcccgcggcgcaacaggctgcacaataaattaaaacaatagtgagaataagcaaatggtctggagggcgggcggaaccgaagctcgctcttcggagctggagtgccgcggggaggggggtgtcagcgtcccagggatgagaccttcccctcccccttccgctccccggcacccccccgaccagacgtctcttccgtaggcgcgtcctccgggtcatggggaaacagaggcagagacttgggaaggagaaatggagaaaccagggcaacgtggtcagtgctgcagcgccatccctttttcactaagaccaccctgggcccctgggcgggaagcccttcgcacactccagccggggagagtccaggctgggttccgcagcgcctgtggctgtgtggccgggaggctccttgctctcgcccgcgtggtcctgagatcggtcgctcgttcccacaggccccgggattggctgcaccacgcagctgttgtccagttccggagctgccgcgttcaatccgagtccctccgatgctttcactgatattaaaatttcacttttcgaa

SEQ ID NO: 195809 - DNA, 626 bp, Homo sapiens
gatttttaaatcatttattaaaactaaaaatgagtgtgcgtacgcgtggagagggggaacaaggcttctctaatcagcaaaggggctgtcggcaggcgatgtacaaatgaaagcgcgctttctaaatttccaaagcactaaagggagagaaatgcgcaattactgtgggattcgcccagaggagcagcctcaggagttgaaggggatcctgtccctcccagaggaaagctcacgattggattggaacttctagcgactgcctgaggcgcgtcctccgggtcatggggaaacagaggcagagacttgggaaggagaaatggagaaaccagggcaacgtggtcagtgctgcagcgccatccctttttcactaagaccaccctgggcccctgggcgggaagcccttcgcacactccagccggggagagtccaggctgggttccgcagcgcctgtggctgtgtggccgggaggctccttgctctcgcccgcgtggtcctgagatcggtcgctcgttcccacaggccccgggattggctgcaccacgcagctgttgtccagttccggagctgccgcgttcaatccgagtccctccgatgctttcactgatattaaaatttcacttttcgaa

SEQ ID NO: 195810 - DNA, 875 bp, Homo sapiens
gatttttaaatcatttattaaaactaaaaatgagtgtgcgtacgcgtggagagggggaacaaggcttctctaatcagcaaaggggctgtcggcaggcgatgtacaaatgaaagcgcgctttctaaatttccaaagcagattggattggaacttctagcgactgcctgaggtgagcttcaggtggggaccggccccgccaagtccgaggcagttatccacaagaaaacacgcgcgtgcccccgctgctcctgcgtggtggtcgtccggagacaggcgccctgcagggcatctagagggccccaaatggctcagccgggcccgcggcgcaacaggctgcacaataaattaaaacaatagtgagaataagcaaatggtctggagggcgggcggaaccgaagctcgctcttcggagctggagtgccgcggggaggggggtgtcagcgtcccagggatgagaccttcccctcccccttccgctccccggcacccccccgaccagacgtctcttccgtaggcgcgtcctccgggtcatggggaaacagaggcagagacttgggaaggagaaatggagaaaccagggcaacgtggtcagtgctgcagcgccatccctttttcactaagaccaccctgggcccctgggcgggaagcccttcgcacactccagccggggagagtccaggctgggttccgcagcgcctgtggctgtgtggccgggaggctccttgctctcgcccgcgtggtcctgagatcggtcgctcgttcccacaggccccgggattggctgcaccacgcagctgttgtccagttccggagctgccgcgttcaatccgagtccctccgatgctttcactgatattaaaatttcacttttcgaa

SEQ ID NO: 195811 - DNA, 430 bp, Homo sapiens
cacagagtcgggcaaatggattgctggcccatgagccagatgggagcattgagcctatcctttcaccataaactacttccctgatattcttcccaatgcacacaactctttgtttataagttgagagaagaaaaggagcatttatttgcagtttccattgcctggcaaaactgcagcagtgatgaaagctaccacattgtcagtgctttccaggcaatggagataactcttcctctcctagatgtgatcgggagcctcaaaaggtaatttccacattttagagtaagtagaaaggaatgactgagtttttcagagtcttgcaattaaattacaactttgaaagaataatctcaaagttcttggaaaacatcagtggggattaattacatctttggaaaagagatcgatatcatttaaggaataatgcacc

SEQ ID NO: 195812 - DNA, 541 bp, Homo sapiens
cagatccaaaaatcttggtaaatattgggttcagtactatccgcagtttcaggcgttccaagactgggggtcttggaatgtatccgagtggatatgaggggactgctgtagatgtgtgtgtttaagccataagtttcaatggttgttttaattatataaatcagactataagaaacgtgtgtagttttaccgttattgaggagtgcccattacaagtgtatagctcgatgaattttcacaagcagaacactcccaagaaaatgtgattaaattcccatacatttggctgggcgcggtggctcacgcctgtaatcccagcactttggaaggccgaggcgggaggatcacttgaggtcaggagtttgagaccagcctggacaacatggcaaaacccgatctctactaaaaacagaaaaattagctgggcgtggtgacgggcacctgtaatccctgctactcgagaagctgagacaggagaattgcttgaacccaggaggcggaggctgcagtgagccgagatcgcaccattgcattgcagcct

SEQ ID NO: 195813 - DNA, 386 bp, Homo sapiens
ggtttgagctttgagctgccagcaatccccagtagctgggagaaatgagtgcctccatccagaaggaagggtgtaagcggcattccacagcatcctctgcactcgcagctccatatgtctataaaacaactgattttagaaggcacattcagtttctggtactaagtagttcctaataattgaaatatttgctatttagatttctctgttatcagaatctgcccattttctttgaaaaaaaatatatacatctttagaaaatgagagaaaatgaaatcgtctaggctgagcatggtggcctgtaatcccagcactttgggaggctggagctggcagacctcttgagcccaggagtttgagatccaccaggggaacatggcaaaacc

SEQ ID NO: 195814 - DNA, 344 bp, Homo sapiens
aattgttaaactaagcaaactattgctttggtgcacttaaactttcaactctctttactaagaaagaatttctttctctctcttagtggtagataaaataatttttttaaaaagaaaaaaaagagccaggcatcgtggctcacgcctgtaatcccagcactttgggaggctgagactggtagatcacctgaggtcagaagttttgaccagcctggccaacatgatgaaaccccgtctctactaaaaatacaaaaattagccggacttggtagcaggtgcctgtaatcccagctaatcaggtggctaaggcaggagaattgctagaacccagaaggcggaggttg

SEQ ID NO: 195815 - DNA, 584 bp, Homo sapiens
gtgggctgtctagaggatccctatgttatcccaacacgaagagctggaccagcttaagtacatgtcacagcaacatgcaggaaggcctcttccctgatggccgcgtcttcatggaagtaggagagaagactagaggtaaagacatagtgacaaatggctacagactgctggaaaggtagcaggtgatgccaagggatactgctcatctgtggagcagaggtacagacaacccttcccatctggcgggacccagaggtgctgagatgggggtctgggaaacactgcccagccctgaccagccctgtgggtggaggtacctgtaaaaagcgaaaggcagcagcctggtgtgctgatccggggccacacggaggaggagccgccccagcctgaggtctgcaacaccaagaagtggctcaggcaactctggacatctctgcctattatcagtgctggggacacccctgggggtcgggacgtgtaccctgggaggcctggctgtggggatagtgttgggcgataacatcacttatcgcccaacacacagaagagaaataattcaagaaaagacaccaaatagctaaaaa

SEQ ID NO: 195816 - DNA, 616 bp, Homo sapiens
gtacagcctctgtggctgctttccctggctggtgttgagtgcctgcagcttttccagatggcatggtgcaagctgtcggatctaccattctgaggtctggaggacggtggcccttttctcacagctccactaggcagtgccccagtgggtactctgtgtggggtgagggctccaacctcacatttcccctctgcactgccctagcagaggttctccatgaagggcctgcccctgcagcagacttctgcctggacaccctggcttttccatacatcctctgaaatctaggtggaggctgccaaacctcagctcttgccttctgcctacccacatacccaacaccatgtggaagcttccagggcttggggcttgcaccctctgaagcatcgacccttttagccctgtaccttggccccttttagccatggctgggacacagagcaccatggcacatgtcccagtgcttcacagagtagtggggcccttttccctcctagacccccaggcctgtgatggcagtgtctgggcaaaggtctttgaaatgtccctgaggtattaacatttggctcctctttacttacgcaaatgtctgcagccttcttgaattcctccccag

SEQ ID NO: 195817 - DNA, 365 bp, Homo sapiens
ttctcacttccagtagcagacagtctttgaagtgttcttttctccaaattatcaccctcctcccacattcactccttccttactcatcccagacacaatgctgtgccatctgccagcgccacgcgttctatggcagcgaggcacagtggctgaggaacagacacaggcctggggtcagtgccagctctgccactcccagctgcatgaccccatgcctgtcacctcacctgtacacattcctccttcctagaagatgagaccagtagtgcctcccctggcagggttatttgaggaacggaatgagatcatggacataaagtatttagttaagtgctggccacagtaaatgctcagtaagcagcagg

SEQ ID NO: 195818 - DNA, 447 bp, Homo sapiens
accaaaggcagttttccagaagtaccattgataatgtatttgattatgagatctttactgaattaacatgatagttttttggtaatcagtaaataatctcatttagcatttgatctttcactggatggccttaaactaggttagctcccttatactttagccaatgatataaataatttacttaattggtcttaggttgaggttgaggcttgaatttcccaggtttggcctgaggcttaaatttcttagagtataccctgatgtactttcctgtgtgtacatagaacaaatgcatattcctatacattatgatatttagataaaataatgtttttcatgattgatttaaaccatggataactacagtcaaatcataatggaatataatcatataattgtgaagtgaaaaaaagtgatcctaatctattatttactaaatgtagatga

SEQ ID NO: 195819 - DNA, 399 bp, Homo sapiens
ctttaaatttgaggcctgggtggaactgacaggtggagtttgaaggcacatctgctagctcacataggaaacagaatctcccagggaaaagacataggacctctgactctaactgaggttctggattattatgagagattttcagaaatggtctaatggtgttggcttgctccataccatagattttaagagacagtagagcttctgcgatgagattcccccataaaataattatggatctgcactggcaagctggtcttggctccaaagaccaagagttggtttgtggtgctgattctgaacccttgcgatgcaactgtctggtagtaaaatggctttgtatggtaagaaagctttaatcctcgaggcctagacaactttactgcagggcattctcta

SEQ ID NO: 195820 - DNA, 548 bp, Homo sapiens
aggcgtgagccaccatgcccggccaataaagatactttttaaactccatattttgagtcaggagaaatttaggagttaacttgctgaagtattttgagtgcttactgattggcagaaagaaatcactcatacacctaaactataagttgcatgtatgtttatgcaatagaaatgaagtggctttacaacccttttccttgatccctgggctatgtaaggggctctcagccatcaaataaggcctgccatggctgagaaaatagccaaattcttatgacctctttattctttttatcaacaggatttacatcattattgcagaaaacttacactaacatttccatgtaagggaatgtttaaaaacatagagctctcccagttgttgaacaaaatgcagtattggcaaggccgtgtcctcaaggagggaaaagcaaagttgggttttcagtgtgctggaatgcctaactcactaggactgaatttgattaatcctgccctctaactggatgtttaaattttcattttcttgtcaaagtagtacatataca

SEQ ID NO: 195821 - DNA, 203 bp, Homo sapiens
agtcccagcgacttgggaccatgcggtgtgtggatagctagagccaggaggtcaaggctgcagtgaaccgtgatcgtgccatcgcactccaggctagcgatctgcctcaaaaaataataaagaatagtattctgcccatttcagtattgagttggtgtttccccatcaccatcagtttttgaaacttgctttgatcaactcag

SEQ ID NO: 195822 - DNA, 484 bp, Homo sapiens
tgctttttccttttgatgtacaaaggatgtacattgtctatgtagggcaattatgggaacgtcccaactttggcatgctttccagagtaagcaactttacaggaagatggatgaagacaacaactcatcttcacgtcaactgtaaatttctctctatttgtgttgcaaatgttgaaactaaatttaaacattgcttggtgtgagggccttccagaggccacattctcatggaatactttgtatcccacttactttcttctgtcagaccctatgaatgattcccagttctgtatctatctttacagacactcctagttagtaaaatccaggctttgaccagaaagagtcaggacttccacccactactgaaaattatagcttaatcaataacacaattagacctccccaacaaactggatcctacgtgcctatatactacttaaggttcatttctggtttaataaagctctgttctcaacatcag

SEQ ID NO: 195823 - DNA, 428 bp, Homo sapiens
gtcatcccattagcatatgaaagacacacattactcctgtgattcttcaagttttaggtttgtgtgtcaggaactagggacaaagaccaaatatatttgttcttaccacatactaggtggcttaaatttatttctcatagtctggaggctgggaagtctaagatcaaggtcccagtgatttggttcctggtgagggctctcttcctgccttgcatatggctgccttctctccgtgtcctcacatggcctcatctgtgtgcatgcttgaagacagagagagatctgtctcttccatttcttataaggacacttataggaagaaatcaaatttgggccccaatccttatgacttcatttagcctttatccactcctcacaggcctgataacacttgcagactcacaggagtaatgtgtgtctttcatatg

SEQ ID NO: 195824 - DNA, 473 bp, Homo sapiens
gtcatcccattagcatatgaaagacacacattactcctgtgattcttcaagttttaggtttgtgtgtcaggaactagggacaaagaccaaatatatttgttcttaccacatactaggtggcttaaatttatttctcatagtctggaggctgggaagtctaagatcaaggtcccagtgatttggttcctggtgagggctctcttcctgccttgcatatggctgccttctctccgtgtcctcacatggcctcatctgtgtgcatgcttgaagacagagagagatctgtctcttccatttcttataaggacacttataggaagaaatcaaatttgggccccaatccttatgacttcatttagcctttatccactcctcacaggcctgataacacttgaacatatgaactttgaggagacatagactttcagtccgtaacaggtggcatgcagccaaattcaggccaatattgctgg

SEQ ID NO: 195825 - DNA, 424 bp, Homo sapiens
cgcttcaatgatctttgaatgccttcctctgcatgaaaccaagagaggttcaacatctccaattcactcatggtggaccattttgatgtatgtttcagcaaactaaccatactgctagagacctttctaactccatgagcagcaacaataaaaaataattcctgtttagtgggccaatatatcaataatttggcctgttcaatctttatgttccttccaccattatcctatacccttaataggcattcccacacatattcgcccgatttctgcttgtatatattccaaagattttttttggtgggggagtggaatacacttcctcacaggtaacactttgtatctcacctataaggtccttctgggattcttgtctacttataggtctggaaacaaaggggctggtggggggagaatcaacatt

SEQ ID NO: 195826 - DNA, 1236 bp, Homo sapiens
tctattaagtcgtgtcacagccaaactctcacccctaatgaggcacagctgggcccttggccctgaagaaatacgcgttggaaatgaactggaaaacacttggcctccctcaaacttcccaggagacagcttagcccctcgtgccccctgggagttggcttcttttccagcggccatcttcacaatcaagcaggaaaatgccattgttccaaagtacacaataggttctggtggttttcaaacatcctccatataccagtgcaaatggaggggcatctgaggcgaattccacaggatgttttaggagcccacaggccttgactttcttttctcggcagaagttttaagttccagtccccaggcttcattctttatattcttggtttggaagacagaggcagcagtaagaaaatagattatgtataaggaagacaaatagggcccaatgaattacccaaaccaaacaaacaaagtctgctttggaaataaggttttggagggaggtgagacctgtatgcatgagtgtataaaatcagagagaaatgtgtcaaaaacaaattacaaaccttccaaatacgggattacacatgaatggatggtaataatcacacatcactccaaggcaatctgtgtattacatcttgcatttcatcaaacaaggcttagctcttgggtcattaattagcaacctcggttccagataccaaaatatgaggaaggctatagtactcgggtcctgcttcaatattgtgatttgtttttcttatctacttctctttttcttcccttattttgctcacaatgccttctgaggaaagacaagacctttcttataaaaggaaaaatatccatgtctctacccacagagtccaccattaatggaaataggagattgctttcttcaaagtacacaattaaagtaacgtactaactcctttacacataacacaagaaagctagaggaagttttatgtatttatattacactttttccttcttcctcttttctcaatataggaatctttctgttttatgaaagctaagccactccatacaacgaacagtttactccaatacaaatagaaattatagaaaatataaaaatcctactaaaccttttaatctctaactttccaagcaggtgaattaatacagaggacattagagatttattttctttaagctccaacagtaaagagtgtttcaaagtcattctcaaagctgtagagattttta

SEQ ID NO: 195827 - DNA, 214 bp, Homo sapiens
cttccccctggtgagatggcagagggctgagtaaccaaggtcccagctgctctgatgggacccaaatacgacagaggcttaagcaggacaggagtttattcctccttcctgtgatagtgtgagcataggtaatcgtaaaaccactgatgacctggagccaggttccacttacctggattctgccctcttcaacttcaagctttcactcctaggt

SEQ ID NO: 195828 - DNA, 688 bp, Homo sapiens
gctccatgctcgacaaaagcagtgagatgaccaatggaacagttgggaatggataacaaaaaatacggagctctatccacagatgacctgttactttgatcctatttccctacatagtccaaggatctaaaatgagacctatcttgtctgccaaatcttccttacgtgtcatgagttgttccaaggtgactgttgtggaagataatgacaacccacacccctgagtacagtggaggtttaggaggtttggatctccacgtttaagtactgccaagtgtgtcctcctgtgtttcattgctacgtatctcactgtgttagaaatgggatcgaagatactttttcacacttgcttgtgaaagagaggcctttctccttgagctggtaagaagggtatgtatctaatttcaggttattaatgtaactttttggtgatgggtatccattctcccttctgacattttcctgagttcctctgacttgagggagcctagccaatgtcatgctacttcctctcatagaagctttgccagcttctgtggggtctgagccgcatcacatggggtagtgctggatacaaccttgatcagtttgactcttacctgtcagacattcctgtttgtgtccctattgtgttcattttcatgccagagtttgggatgatccaggtgaggtttcttgctctacctat

SEQ ID NO: 195829 - DNA, 326 bp, Homo sapiens
attacaaagtgaaaccagaaattaaccacatcccagcatccatgagggatttttgcaaatgcagtgtggacaggactacacagaacacatcactgattgctaggaaatgcttcacatccagagacaaataatgcctggaaaggaagcttggctgtgccacacaatagcccactagcaccctctcattcaaaagcatgggctcacaggcacggtggtgcacacctataatcctcagctactcgggaagctgagatgggaggactgtttaagcccaggagatcaagaccagcctgggcaacatagcaagacccctgtctctcttaaaa

SEQ ID NO: 195830 - DNA, 839 bp, Homo sapiens
gctcaggccacagcacctgcacccgttttctgctgctgcacacaagggctctgtgcattccgcatccaggtgtgcccctcctcttctggaggattctttttcaggctgtcccagagactttgcagcacagcatccttgctctatttcttcctgcaacatctctgctgaagctctattgcttttggcaactcttccgtctatttgtggtttaggtgtctcctacttttactaaaaatggaatttgtgtttttatcgctcaagtcctttttgcttttggattacttccagaaaatgaagggagggttactaactttatgccatcttcaaaccagaagatcttagattagtaagatcatgttggccatggcatggagaatgggctggaggtggagagactggaggttggaagtccagttaggagattgctcctgcgctggggagttggtgttaggacagaagatccaagacgcgtttcagagagcccctcttcttgggcctgcgattcctcacctggaagggagaagagtggacttcctgcctagagaacaccttggtaaactctttgtggttcctgtcatgagaaggtgtgcagcttagggaaaaagcctgtgagctctggaatcagatggaactggatatgaatttccatttagtgcttgttggattaaatgtgatgctacttctcccagccgaaagaataaacactggtacgaggacggcgaatgcgcctcagtaaggaggctccattctggagggttccaggccagagaagggagaagtattggacaccaagtatggggatgcaggctcacttaccgggatttgatctcaaagagctg

SEQ ID NO: 195831 - DNA, 497 bp, Homo sapiens
ggaaacacatcataagggcctccttataggacagtagtaagactaggtaataaaaccagtctcaatcacggcccttggaaaaggcataaactgcaagtcaagctagctgagttctggctttaggattacttagttgggtactgttgagcaagtcacttcacttctctgggcctcagttttcccacccgtgaaatggacaggagaacatatataaaaaaggctaatgcaatggtgctaatgcacacaatgtattcctccatcctttttcttggagatagtctaaattttcctgtatatttttgtgtcctgtagagatcagcaaatgtcagtcatttttgaaatgacatatttttaggccattttattggctattgtttcttgggaagagataaggaaaagcaaacaaaggcttatagatagagagagagcactgcttttgataagcacatggcccatagttgtttgtttttaacacagttaatacatagccaagaaaa

SEQ ID NO: 195832 - DNA, 119 bp, Homo sapiens
cttggcaccaaggtcacttaggttggcagaaagatatagcacagtaaacaactggcatgtagaggaggcatcctctttaggtaagcctcatgtgtgatagggagcgctatcttgtaaaa

SEQ ID NO: 195833 - DNA, 937 bp, Homo sapiens
agaggtggggctgcggtgggaagctgcatgaaggaaattttaggagatgccaaagactttgtgtttggaaacaagcagtctcagagaggtggctctgcatgtagatggcactgaaacacacgccatgtgcatgaagcgaggagaggcagtgtgggatgtgggctccagggagagaggaaaggaaatagaggtgcaaacccaggaaccccaggggagcatgcaccccgacctcaagaattgtctggtagctggggatactgggagcccaagcgcagccccttctgtgccctaaggggtaaagggctcttttgttttctcaactacctttaaggcacatggggactaactccggcatgtggctatgtattcagaacatacttaagaggtttaacttcagtaaactcagcctaagttagcccaaattagggatttcacagcactgactctataataatgaagaaaaatccatcttctgtgtagctgccagtaaaggccaaccccttctcatctcctatggagacagcatggactcactccattcaaagacagaaggggagacacacaaaaaaaatcctaccagaatcttacgaaaagttggaatgtctgtaatcacgcccacccagaaggtacccgggtcccctgggtttttagctcagcaagcactcagactgtcaaacagcagataatcagcagactccacagcaaaggtgtgacttacaaggccaacagctgatgtgagcgcacagagctcctaacccatttcaggacttaagaaacttgaaagaaaagttagccaaatatcaaggaaactttcctaatgcctgaagggcaattactgaaaaaaaccagctaagctacttatacagtttgtaacagggcctcggaagacggaaagttctggggcacgcacactccactccccaccaggcctggcagc

SEQ ID NO: 195834 - DNA, 121 bp, Homo sapiens
aggatccccccggtaacagctagatgaaaaagtgtaaggttgatcttcgcctttcctgggcattactcactgctgtcatgacctttatgcaatttgcagtaaacatcataaaggtctctct

SEQ ID NO: 195835 - DNA, 358 bp, Homo sapiens
tgtaaagggcgctttgctcctcgccattgctgggatatgtgcaggtggcttacaccagtgcgcttctgcacacacctttttctaacactgttctctctcttaaatgaagatgctttattcaaccttttggaaaatacctgtttgaccttgacccatgttaccatttttgtaaaatttttctgagtgtgacttggcagagtggattggcctttctgtgggtcccttaacattacatgtacttctgataatgcacttaccagagtgtattggaaatagtttcatttgttccttaagccgacacttccaaagtttcaggtgctatataaagagatcactggtttaagagacaaatggagca

SEQ ID NO: 195836 - DNA, 452 bp, Homo sapiens
taggaagacactccctccctccttccctggtgatttaattggtcatctactatgtgcccagcaaacagaacagcagagctcaccgtccagggtagtttagagatgaaatgaggtaaagcgtgcctagtatgcaggagtacccctggtacataataagcatttgacaggctgggcacagtggctcacgcctgtaatcccagcactttgggaggccgaggtgggcggatcacaaggtcaggagatcgagaccatcctggctaacacggtgaaaccccgtctctactgaaaatacaaaaacaaaattagccgggcgtggtggcgggtgcctgtagtctcagctacttgggaggctgaggcgggagaatgaagtgaacccgggaggcggagcttgcagtgagccaagatcgcgccactgcactccagcctgggccacagggcaagactccgtttca

SEQ ID NO: 195837 - DNA, 1110 bp, Homo sapiens
cttgatgccagtggagtcacacggtcaccaggtctacctccctttcctcctgtggaagagctcggtttgctcaggaacatgatggacattgctggcctgggcagagggcgtggccttgatggagaccacctctcctctccgtcatcctgagggggtgcaggagggagtccgcatcgccctccacacccgagaccacctctcatatccatctagtcatcctgagggggtgcaggggggagtctgcatcgccctccacacccctccttgggtgtcgtcatgtgggcagggagtgcacagcacccttgaatgtggggagcggcgcctgcctggaccttcctgcagcatggcggaatctgagctggtccttgagagaactcatctgtgggtggtgcacagactacagaccacatagcctgggcaccagagagaagctgctggcgtcagcggccccttctgtggctctggcctccatgcaccgagcagctggacacctgtctgtgcagggaatgacttgatttaaatgacataaaacgacaccaaatggtagaatggacactggcggtgcttgtctgtcatctctttcttattctttatttgtttctgttctgtgagaattgcctagtggtgtcatgctgaacctgcctctctgtgtaggtggcctttcttcagtgagtatttgcgaaagtgttgggaggtagtgagagtcgttgcatctttttctggcacttccttggtgggaccagccacttacatgcaccctgaaagtcaagacgctcgtcccgtcttccccctcggcggttttcagtaagcgagcgcgcagttgaacgtttctcacctgaacaagtccccttcgtcatgagacggggcagctataacattgccaaacacatttttctcaactaggagagctcaagcaagggacggagccctagggttgtctcgtggtgtccgcagggcttggttcttgggcgtctcgtggcgcctgcagggttctgttcttgggtgtgttgagtgccgtggggtgaatggaggcttggccttttgagaggctgctgtactgagcactcaggagccggcctgggggtcgtctggggctgacatcagcaggga

SEQ ID NO: 195838 - DNA, 613 bp, Homo sapiens
caagttgtcaatggaatactgcatgagaccaatcagttaactggaaacatttgtaaagcctatctgtttgaatgtagaaatcgatgtgaatactacctatttctatgttttattttttgtgtttttttcaaattaagagtttccaacaatgaagtctttctaataggctgacaacctactttaccttgcttagttgaaacagatgttgaaaaataccttttagggaggaatgcatttgggaaacagtggtgtgctagagctggctgtactggctcctgagagccacttattaaattattggaaatcttggtagaggatcgtcgctcatgcctgtaatctcagcatttggggaggctgaggcaataagtttgcttgaccccagtagttgagaacagtttgagcaacaagggagacttcctctctagttttaaaaaataaaaaaataaaaaatagcagtgagtcagtgcttttctcaagatcacagatgagcaactatgcagttataagaaaaatatatatttttgtaacactgtagtaaacaatggctttcttgtaaacaaactatagcacatcttcacagttttgtacaattaaatatgctacttctgtttaa

SEQ ID NO: 195839 - DNA, 430 bp, Homo sapiens
tgcaatttgtcacatacttaattccttgaggtttcttaaagctaacataaaaatacctcaggaggaaaagaggaccttaaagtaaaatcaaaattaagtactactgtcccagttgtacttctggggtgttgcttctccagatgcttctccagatgcagggcgcgacagtgtgagaaggtgcgaggagactcacttgcctcccctcccctcatccctgtctccaggtgaggaatgcgatgccagtgccagggtggagcacgcagctgctgtgtgcagtgtgtggacgctcgtttttccaacttcagcacaccaggctcctcagcctacttctgtttggaaaaacagcgggtctaaaattctcctcttactcccattgcctgtgcaggagagcacagcccccttgcacccctgcagcctggcagctggggct

SEQ ID NO: 195840 - DNA, 139 bp, Homo sapiens
acagtgcaccggcaggcatcactcgtgacaggtggaacaacagtggaaatgcagagtggctcaaggagcctggtcacgcgccaatggctcagcccccctcttccactgcggaggacctgcctatctcatctcttctcag

SEQ ID NO: 195841 - DNA, 357 bp, Homo sapiens
cggcgaggggatgtgattatatttctatgtgaatcgtgagaatcttgaaccatggttgtcctgctggcctgttttactacataccaatgagtaaaatgtgatcatacagaaatcacaaagttgaaatctataaaatgaaaagatctctgtattataaggtgagagtgccaaggattgaacattcatctttgtcagactttgatgtagaatctcccaaaataatgatgagctaaagcgtctgggagacagcatcagcctgtccaggtgctctcaggtgcaggcatttccaccccattcattcgttattgacacgttcatgcattttcagtctttttcctacccatgtatattttacat

SEQ ID NO: 195842 - DNA, 369 bp, Homo sapiens
tcaaaataatgtatacacaacaacaatacacatatcaataacaacatgcatacgacaataataacaaatgcatgcaacaatagtaacaactatatgcatacaacaacaaaaatatgcatacaatatgcataaaacaacaacaaaactatgcataccacaatagcaaccatatacatacaataatactgacagtagctatattactgagcgcttactgtgtattttacatagaggttgctttgcactcatgagtaactattatccctaatttagaaaccaagacagcaagcaaattgctggagatcacacagctacaaagcagaagagccaggtttcagattgtgctcttaattataaccctactatgcc

SEQ ID NO: 195843 - DNA, 713 bp, Homo sapiens
atccccttcccaaacacctaaaaagtcatctagtccaactccctgtttaacagataagaaaactgaggtcacacccttgtctactcagaagacaagagtcaccaaaaacaatgatctctaccagagtgtaggaagtaaatattagaactatgtttatttttaaaactaaaaggaaacaaaattagctttacaaatatttaatgtgtatattttcagtagaatcctaacttggtccttatgacaagatcccatgacacaaacagttcaagggatatcacaagagaggagtagacgttctacaaagaagagcctggacagtgactgtcattccttttttcacttccagcatttgtgatgttctacagtttgtacatgcctggttgagtggattaacagattatataacccagttgataccaaagctacactcactaaataagcaagtagctttaaaaatatgtcttcaaagcaattggagactgtaaaaaatacaaatcatataagcataagaaaacagtagaacacacacctctaatcttagtaggagtctttaccagctacatcagaaaacaaaagaggagcagtgtgatcacatgttgggcgagtattatccccaacaccaaagaaaataattttctcattgcaacagaaatatctaagacaactcgtgtggggtacatcatacgccacaccatttcatggaattatgtggg

SEQ ID NO: 195844 - DNA, 443 bp, Homo sapiens
ttcaataacattatacattgcaaagcaccttgcattgttttaccttttataaaagcccattgatataaatggatattaatataaaatcccatataaaatgatgatataagaaaacctatgacccttgcaacgtcatatcacatattactaataaatgggagtttagaaatcagaactctagattctatcatcttatttcattatgtaatctcttaaagtgtcaaaataaactggaagagtagggatatacatattgttaaaagaaattttgttcaaccagagtgttacagagagaaaaaaggagagcttaataataaaactgtgtcttcatggaatttttcatgtggatgcattgatggaaaggcattctaggaaaaggcaacaacatgagtgaaggcccagaaacctgaaagctctgggaaatgttgcttagtccatgtcta

SEQ ID NO: 195845 - DNA, 471 bp, Homo sapiens
atttcatcatcttcacagattctgtgagtctgtgagggattccgggggaatttggacagaacacagagagggtggcttgtctctgccctgcaatgtctgggcctcagctgggaagactcaaatggttgggggctgaaccgtctggaggcatttttgcttacctggcacgtggctggaagactgggctaggctgagccagtaccagagcaccaacatgtggcctctccaacatggtggcctcaaaggagttgggtttcttttatagtggctcagggctcaagagtgtgtgttcccagagaacaaggtgaagctacataaccttctatatcctaagcctcagaagtcacatttcttcccatggtactctatgatagaagactgcccaggttcaagtggaggtgttgtagaccccccacctcttgatgggaagagagtggaagaatttgtggccatatttataaaccactacag

SEQ ID NO: 195846 - DNA, 1119 bp, Homo sapiens
cctcccactccccacacaggcttcttctggtcatgctgccgtcctagccatcactagcaggagatactcggctttgaacttactgcttccttctactctttctttcttagctgcctgaccacctttgctcattcttcaaagcacaggccaaggttcaccctcagccctcctccccatcccagagatggacaaagtatctcctcaccatgcattgcccacacacacctcaaccaggattcttcttgtaatgatgctcacgttcaggtttttagccacttgtggtagactggaggtggtatcatttattctattttataaacaatgtttatagtttgtatgacagttatggtataaactatgtttataaattaagagtttagtgttgggcatggtggttcacacctgtaattccagcactttgggaggctgaggtgggaggatcgcttgaggccaggggttcgagaccagcctgggcaacatagcaagatcctggcactacaaaaaatttttagaagttagtcgaatgtggtggtgcgtgcctatagtcccagctacaggggaggccaacgcaggaagatcacttgagcccaggagtttgaggctgcagtgagttatgattgtgccactgcactccagcctgggtaacagagtgagaccctgtctctaaaaataataataataataataataatttttgaaaagcatttagactatgggccagacaactgaggtagggcaagttattttaacttatgtgccttagtttgtataaaataggagtgacaatggccacgccacagagctgctctagggattaaatacattagtaggaaacagtcccttgcacagagcaaatgctaaataatctgctatgatcacttttatcatctccattctttcctggaacacaggctgtcttttctgtgcagcgtttgccttctcgtagaccacatggatgcctactaggagatgtttgggagttccatgaggaagttagaagggcaaatggcattaatgggagcttcaacaaggacagggtgtccaaaattgtatagatgttgtataaaataaggacaaaaatgcttgctggatttggtaactggcaggtcaccgacatct

SEQ ID NO: 195847 - DNA, 352 bp, Homo sapiens
  misc_feature (39)..(39): n is a, c, g, or t
  misc_feature (55)..(55): n is a, c, g, or t
  misc_feature (71)..(72): n is a, c, g, or t
tgacttagaggatcgcgtatccgtacattgtaaagtggnctctgttgtgtctgtnggctggctccggtccnngaaggctgttgactggcgtctcttctggtagagcagtcagcggaaacctaagtgaagaaaggaaagaagtctgtacccttgagccctgtcacacgttagaaaatggagacgggtttgagctgagcactccttgtcagaccccttcaggtgttactcacacaatgcaggggttcagttgcttggtgggtatcaacccaatgaccacaaccaaggaggatttaacaatgagatttaagtaaggagaacaccagggatggttcccaaagtagtgcctctgagc

SEQ ID NO: 195848 - DNA, 321 bp, Homo sapiens
taagcagaaactgctttacgctgttactagaactgtcgaagcagtgtgagagctcctaattctgagcctcctctcattttgctgttgtctcaattaagttacttttctatgatttgtggctcattagcgtcagtgactcctaactgcctattctcatccttgagtctttccagccatatgtgaatgatacatgctcagagtcccttctaattatgataatttcctcttgtcctcctgaatgctggtgacagcgctaatagcaagatggaagtgaagctttggatagaaattctatgtcttgaaactccttgggacctcttc

SEQ ID NO: 195849 - DNA, 503 bp, Homo sapiens
aaacaaacaaccctaaaaattcaaatggaaccaaaaaacagcctgaatagccaaaacaatcctaaacaaaaggaacaaagctggaggcatcacattatctgacttcaaattatattgcaaggctatagtaaacaaaagagcatgatactggtatacaaatagatatatagatcaacagaacagaatagagaagtcagaaataaagccacatgcctgcaagcaactgatctttggcaaagttgacaaaaacatacactggagaaaggacatcctattcaataaacagtgctgggaaaactggcaagctgtatgtagaagaataaaactggaacccctatctctcaccatatacaaaaattaactcaagatgaattaaagacttaaatgtaagacataaagctataaaaatcctaaaaggaagcctagcaaaattagacttgaaatactaagagctgattttgaaatactgagagatacgttttatgttataaaatacaaagaag

SEQ ID NO: 195850 - DNA, 623 bp, Homo sapiens
agaaaataaaacagtaaactaggcaggaatatgactgggattgacagacgattttaggtaggctggaaggagcatctttttgagatagtgattaagttttagccatgaagtacgagaaagaagccagccttatgaagatgtagtatagaggaaacggcaaatacagtgtctccaaggcaaaattaagcctggacctgttctaggaacagaaggaagccagtgtggctagaacaaggactatagtaacagaaaatgaagttggagaagtaggcaggggccacatgtagggccttttgggccacagtaaggactttggatttattttgaggctaacgggaaaccatcggaagttttaagctgagtctgtcaggatatgatttacattttaaaagatcattctggatgctgtatggaggatgtaaggaactcaaagtacggccaggcacggtggctcatgcccgtaatcccagcaactttgggaggccgaggcaggtggatcgcttgagctcgggagttcaagaccagcctggccaacatgacgaaaccccgtctccactaaaaatacaaaaattagctgggtatgggggtaggcacctgtaatcccagctacttggaggctgagg

SEQ ID NO: 195851 - DNA, 677 bp, Homo sapiens
cccttagtaaaaacaccagaaatttatcaaagagatgaaagcatcttgctaaaaaggaggaatgaagcagaactcatttttcatgaagctgtaagccaaattttcatttttcatatgtttattatttttaaaactgttactaccatgactttaattactgaataagtactacatgtattgtgcactgagcatctattacataactaaacaccttcaatgacatatcaagctataaagtactttctcatgaggaaaaatgggctcagaaatttctagctgataaagcttagaacttcagccctggtccatgtattcccaaatcccaagttcattattcaattcctttaattattctcatgctgaaatataggccattgtcactaaatacaattttatatttttgtattaaattactgctgatcatctatgggctatgtagtaactttacctgcaatattaatatgatttgaattataatctcaaaatttcataaaattgaaaagttgtaatttaccccttgtattagtctgttctgtatttcgataaaggaattcctgagacaaggtaatttataaagaaaagaggtttatttggcttatagttctgcaggctgtacaagaagtatgactctagcatctgcttctggtgagggcttcaaaaagcttttactcacagca

SEQ ID NO: 195852 - DNA, 670 bp, Homo sapiens
aacactcttcagaaaatcttaaaagaattgtctgctacagaaacataaaggaaacaaagaagcaataaaacatggttttggtcccacagtgaggaccagggaagaaaggagtcttggtcaaattgcagaagaaaggaatttaaccaaactgattcctggactacttagaagaaaaagaaagatggtgattggaaagctggctgcaactgtcaaatattcctaagagttacctcagcagcatgccccagtactcagtaaattctcacccatagtcctttgtttcccatcgtctacaccacaggccacagaatcttcagtactgcttggagccggggaactccctttatccagtacatagcagataggaagcaactctggatatgttccacacagctatatgcggcagttcagttcaagagtaccaccagggctttaataatactttgcataaatgctggattaaatatgcttttaaaacctaacttctaccaacctagacatacactaggtaaaaaggccaaagaagtatccccaatacccatgtctgctgcgtgataactgtccaatcaatagtgtcgcgcgacactcttggttgtaggagtgaaggcgttgcgctgctgagggttgatagctggtcacagaaggagcttgtcatgctgtcattttgtca

SEQ ID NO: 195853 - DNA, 481 bp, Homo sapiens
ccgcctcagcctcccaaagtgctgggattagcggccttagccaccgtgcccagcctgtcttcatggaagctttttcttaagattgtgaaatgggctcctgaaggaaaacgccgatgttaaaatttgtgttttgaaaagggagttggtgtacatttacagttagggtgtacagtactggacttatgggtaaatagtgtagaaatggtaacctatggttttcttttggggagcattggttcattgtattttcatgttgctatctatctgataacattagtctcaaatagtattaggtgattaagcagttgctggtgagattattaattaagaaaatatgaagattatttttcatgattagcaaatggacgtattagttttgtggaaagtttcagtgaactgcatactgaataaggtctttggagcaagcattgttattgataaggtttttgcataagttattttctaatctgaagtgatagtc

SEQ ID NO: 195854 - DNA, 179 bp, Homo sapiens
ccccgccgcgtcctgctgcccatcctgcccgggttgtcgcgggccgggggcacgacaagaggccggggtctgcccggacgcagcggcctgcagggcgcagctgtccctccaccagccggggtcccctcgctcagcccatgagacaaataaatgaatacataaataaataaataaataaa

SEQ ID NO: 195855 - DNA, 237 bp, Homo sapiens
agccaggtgtggtggtgcatgcctgtggtcccagctactctggaggctgaggtgggaggattgcttgagcccaggaggttgaggctacagtgagccatgatcgctcaaatacactccagcctggtgacagtgagatcttatctcaaaagaacaacaaaaaaagaggaatcctttagccccctgagactcagctctgctagcagtcttggtactttgtaaatgacacatctctttgct

SEQ ID NO: 195856 - DNA, 409 bp, Homo sapiens
  misc_feature (18)..(18): n is a, c, g, or t
tctatatgatcccccccnatatgaatccatggagatattatctaaggttgaagtttcaaaaatgatttaagattatatataaatgtcacaagaggggaattaagaataaaagggggtaaagggagtaggtggtgataggaatttagatggtagctaatgatatcctgtaatgatggtttggcatattagaaaccctaaggaggtaactgtgagaataaatatgttgtcacagggatgaaggggatccttgcgttttacccttctgttatttaacattgtacatggaatacctcagaaaaatttactgacgtagtttactaagtgtcagaactaatcgtatcaaatatatttttttcatttttttattcattggttatctaaagtgggatatacatttaaaaagttatgg

SEQ ID NO: 195857 - DNA, 360 bp, Homo sapiens
  misc_feature (18)..(18): n is a, c, g, or t
tctatatgatcccccccnatatgaatccatggagatattatctaaggttgaagtttcaaaaatgatttaagattatatataaatgtcacaagaggggaattaagaataaaagggggtaaagggagtaggtggtgataggaatttagatggtagctaatgatatcctgtaatgatggtttggcatattagaaaccctaaggaggtaactgtgagaataaatatgttgtcacagggatgaaggcgaccgggtgcgtcccagtcttgacgtagttaaacgatcgacctggacacgtcagcaagactgcaggacgatctttagaggaatctgctccacgatctagatcgctagctacatatacg

SEQ ID NO: 195858 - DNA, 307 bp, Homo sapiens
aaataaataaataaatccaaagatttcagattataaaatatctgaatccacaaataatttataaaatgctcccatgtacataggaaaaaaaatagttactacgtagaagagaaaggaaacggctcaacagtaaataatcaattcctctttgaccagtttgatagcttcaaagttattttaagtggtctacacttatgtttaagtcatatacaactcccagataataattccagggtagtgttccccaagcttgccttgactgacatgcttaaaaatgaagatccccactccgactcagacctccaaa

SEQ ID NO: 195859 - DNA, 430 bp, Homo sapiens
tgggactgttttcatccctcagaggacctgcctgtgggccatgaggatgatggtggtttccccaaggccacacagcatggccctgtctgattcctattcccccagggacatggtgtaggaacatttgggattggggaagactgggcctggtgatccccaacctgtgcttcctccaggtttcctttgaacatggccatctctggctttgtcacctgtgcaggttacttccccttccctgggcctcagattctgtgtccctaaaacaaggtccttgccagctccaagtcactcaatggaaaacccaagctagaggccgggcacaatggctcacgcctgtaatcccagcattttgggaagccgaggcgggtggatcacttgaggtcagaagtttgagaccagcctgggcaacataatgagaccccatctctac

SEQ ID NO: 195860 - DNA, 731 bp, Homo sapiens
ttcaagatgatgttagagagatgacagagtctaggttagggagggcctgagtccttgtagactctgagtacggtgctgagcagggaagagacaggctctggcttagggtttagaaggaacacaggctactgcgatgaggattgtctgaaggggaacaaaggccaagatgttgtttgaagccgtgagactgagtgagatcatggaggaagtgaatgtaaatagaaaagggaagaagtctgaagacggagccctgagacactccattgtaaactggaagatgaggaagagccagcaaaggagactgagaaggggcagccagtgaagatggagccagggctagagtaagagccccttctgggatgctgtgacccccaagtttgaagactgctgataaccccaatctacgaagactagctatggaacttcctacactgagacaactccagtggaactctgataattatcctaaaataaggaggcttcttcagtagccctcgaaatatgttcaaatacatgattacatttatgtccttaatattgctattagtttctgatgttaatgtaaaagttggggaaaaagtggaaaagttaaagcagtgcaggttaattcaatgccagagtaacttctcagagggtgtatattcagtgtgaacaattttcaacagagaaatgtcaacttctggccacaacggcaaccagtaaaatgactatttttactgtcttatctatta

SEQ ID NO: 195861 - DNA, 767 bp, Homo sapiens
tgagctgaaatatgagttgtccaactcttgtaagtgcatgctccatcacatcatcctgagtcagtaatgaggatgccattgtacccttcaagcagccctggagagtttatctctgcatgctggagctaataataatagaatctcaagagccttcaaacatccatattatgctgatgtcttttaaggtgattcaactcagcatatgttgtttgaagccgtgagactgagtgagatcatggaggaagtgaatgtaaatagaaaagggaagaagtctgaagacggagccctgagacactccattgtaaactggaagatgaggaagagccagcaaaggagactgagaaggggcagccagtgaagatggagccagggctagagtaagagccccttctgggatgctgtgacccccaagtttgaagactgctgataaccccaatctacgaagactagctatggaacttcctacactgagacaactccagtggaactctgataattatcctaaaataaggaggcttcttcagtagccctcgaaatatgttcaaatacatgattacatttatgtccttaatattgctattagtttctgatgttaatgtaaaagttggggaaaaagtggaaaagttaaagcagtgcaggttaattcaatgccagagtaacttctcagagggtgtatattcagtgtgaacaattttcaacagagaaatgtcaacttctggccacaacggcaaccagtaaaatgactatttttactgtcttatctatta

SEQ ID NO: 195862 - DNA, 427 bp, Homo sapiens
tgagctgaaatatgagttgtccaactcttgtaagtgcatgctccatcacatcatcctgagtcagtaatgaggatgccattgtacccttcaagcagccctggagagtttatctctgcatgctggagctaataataatagaatctcaagagccttcaaacatccatattatgctgatgtcttttaaggtgattcaactcagcatatgttgtttgaagccgtgagactgagtgagatcatggaggaagtgaatgtaaatagaaaagggaagaagtctgaagacggagccctgagacactccattgtaaactggaagatgaggaagagccagcaaaggagactgagaaggggcagccagtgaagatggaggtaaccaggagagtgtggtgtctgaaagccaagcagcaaagggtttccatgaggaaggaga

SEQ ID NO: 195863 - DNA, 423 bp, Homo sapiens
cttaaaatccctagtgtttagcttagaatacattgctctgtaaagagttctccattggttcttccttctttatttaatagagctaatctgtcatcacttccaaacagttcttacctaagacatgcctcatccttggtaatcacactttcacgatcctatttcttttttctgtttgtttgtttgttttgttttttaaacggagtctcactctgttgcccaggctggggtacagtggcacaatctcggctcactgcaacctctgcctcctaggttcaagtgattctcctgcttcagcctaccaagtacctgggattacaggcatgtcctgccacacccggctgacttttgtatttttagtagagacggggtttcaccatgttgcccaggctggcgttgaactcctgacctcaggtgatccacctc

SEQ ID NO: 195864 - DNA, 158 bp, Homo sapiens
gtgaggtgtggactgtgagttgtgactgtgaggtgtgactgtgaggcgtggactgtgaggcgtgactgaggcgtgactgtgaggcgtgactgtgaggcgtggactgtgaggcgtggactgtgaggtgtgactgtgaggtgtgcctgtgaggcgtggac

SEQ ID NO: 195865 - DNA, 1146 bp, Homo sapiens
  misc_feature (24)..(24): n is a, c, g, or t
ctgcagaggcttcaggagcagctnactaaggatacagagtcaatgactgggtctcccctgcagcacctccttcaggcgaagcagagccaagtactggtagtggtcaagcctgaaggaggtgctgcagaggcttcaggagcagctgactaaggatacagagtcaatgactgggtctcccctgcagaatcagacagcttgcattggagttctctttcccagtgctgaagtggctctgcttatgcatcctgcacccggtgctgtcgatgctgactctgcaggctcagatagcactagcctcgtagattcagagctatctccttcagaggatcgggaactgaagtctgatgcctcatcagaccagggcccagcaagccctgagaaggtcttggaggaaagtagcattgaaaatcaggatgtatcccaggagaggccacatagcaatggagaactgcaggactcaggtccacttgcccagcagctggcagggaagggccatgaggcagtagagtccctacaggccaagaaactgagcagaacccaagcctccagctcaccagctgcattgaagcccccagctggcagggagactgctgtgaatggacagggtgagctcatccccttgaagaacattgagggagaattgtcaagtgctattcacatgaccaaggatgccaccaaggaggctctacatgccaccatggacctcaccaaggaagctgtgtccctgactaaggatgccttcagtttgggcagagatcgaatgacctccaccatgcacaagatgttgtccctgcccccagccaaggagcccatggccaagacagatgagggggtggcagccccagtgagtggaggtgctgcacgactccgatttttctccatgaagaggacggtatctcaacagtcatttgatggtgtctcattggatagcagtggccctgaagaccggatttcagtggacagtgatggcagtgatagctttgtgatgctcttggagtctgagtctggtccagaatctgttccaccaggatctctttcaaatgtctcagataatgctggtgttcaagggagccctcttgtgaataattatggccaggggtcaccagcagccaacagttcagtttcacccagtggagaagacctcat

SEQ ID NO: 195866 - DNA, 369 bp, Homo sapiens
tataagactggaggagatgcaaaacacacatacgcaactttaacagcacacctaaatatacgtgtagaaggtactgggagaacacagcacacaggatctaaataggggtgaggaagaaactagaaaggtttcaccaagcagattgaatgagattcaccaagatggtatggatggaatggaggaaagacatttaaggagaggaaagagcatggcaggtggggtcgtaaaagaagacagtgaagggagaggggcaaggatagggaaaggggcaaggatatggagagaggcaaggatagggagaagggtgtggctggagcaaaaggtgtttaggtacatgctgggaagcggagaagatgaggccagttatat

SEQ ID NO: 195867 - DNA, 434 bp, Homo sapiens
aagaactcctccttccaccatttttatcatagtctgtatcaagtatcctatttactctgttaatttcttgtgcacatatgagtctatcataccatgctattcaacatatatgattatcttccccaataggctgtgaatgtcttgaagctacccacagggtcctattaatctttgtgttaccaatttccatccaaaaatgggcaaatagtagttagtattcaaacattgaatggtatgcaggttttagatgttcataatgatgttattccaacatggtgctgcatcacattattaatgattattttaaaaagaaattgattattcaatacctaaatgagttccataagtagaaaattgtatagtagttgaaaacttggtttaaaaatttcaaggaaagggtgatatttgaactttatggtacaagatttgactaa

SEQ ID NO: 195868 - DNA, 290 bp, Homo sapiens
aatgaaaagattcactgaagaaggattcaatcatgctgtactacttcctggagttggcagagaaatcatccatttcttggtagttgaaagaaggctgatccaagaacacagtgaagagatgttcccatttctcaaggtgtttcatcttcctggccatgatgatttagcacctgcaaaattcccaaacctacgcaatgtggttaatgcggggaagcagacattggactaccaacttccaaagagtcactatctcgactagcagatcatgaggtagatgaggcagtttcaag

SEQ ID NO: 195869 - DNA, 601 bp, Homo sapiens
gcgcccggccgacaggtaaattcttatatcaaaaaactgagttagacttggccctggagctgttttccatccctaaaaagatgatgtcaagctatcatgtataataaataacaactcaattgaccacatattttcctttaagcctaatgatgaaataatattataatgaaatacttagaagttttaagggaaaaaatcctttaagtcattaaattaaaattgaaaccaaaacaataacttcactgttttaggataaaattggcatatgaaaggtttgatagtgaacgacagtaagattaacctactacagcatttgcctttagcttttactgagtaatacttggagctatatatttatagcatttgctataaatgtgcaaacgaagacattatttattgtattactgctgagattaatattgtctttttcagatttctaaaacattacagcaaatgcgcacatgagggcgctctaatcagctagatgtggagagggtaggcatttgttgactgttaagtcaaaactagttctatacttttacagatggaaaaatcaaggtccaccaaagaggttatgattctacacgagttattctctaga

SEQ ID NO: 195870 - DNA, 255 bp, Homo sapiens
agcagagagacatgtgtgttcaaattcctcactcaaaacaattagagcagtccaacgttgggactgtgggtttgccacccgtatctgggattgcaggttcctccgagacagtttacttaccaatatggtaagatgcaatgctaagagatgaatagttatgaggcagttaccaagtagctttgtttcatacttagagaatgtcagaaaaagtattatgaggaataggattgtatttttgttgttattgtttattgg

SEQ ID NO: 195871 - DNA, 486 bp, Homo sapiens
taattgggcatggattgggtatacatttattagaaaaagactggaaggttggaataaccggagtacagagtgtgtagtggtgtggaggctggaggtatggaagcatagtgaaggagttgggaccctgctggaagtgttaggggcattgtgaaatggttggaactttgttggagatggaggggggtgaaagtggaggaggagttgcatggtaggtagaataatggctcataaagctgtccacatcctaatctcaggactatgttatgttacatggcaggggagttaaggcagcagatggaatgaggttgctaatcagctgattttaaaatagggagattatcctggattatctgggtgggctctgagtaatcacaagggttcttaaaagtagaagagagaggcagaatagtcagtgtcagagtgatgtgaggtgagaaagactctagctgccattgctggctttgaagatggaagggtgcactagtc

SEQ ID NO: 195872 - DNA, 434 bp, Homo sapiens
atttattgtagtacctttttaaattactatagctttttagtacctattttttggtaggctgtcttatttttttcactcctttttatagtttttctgagttatctcacatgcctctttttcccatatgagctttagaaacagcttgtcttgttactaaaaaaagaagaagatccagctataatttttgttgttgtatttactgctagcaagagatttttgaaggaaaaaaatactgtctccagagatgccaaaggctttagataacattagacattattattatcttagtagattttctagtattgttctagtcttatgatgaagaaccgtctccagttggtcatggtggattattcttttaatgtgatggattttatttgctaacatttaagatggtttcatctattcataaaattacttgcattcgtgtgtat

SEQ ID NO: 195873 - DNA, 183 bp, Homo sapiens
ttctgtctcttcacaatgtgataaataattatctgtaagatacggtaacaatgactgaaatctgccaaaaaatacaggatctaaattctttctgattttatactgaacaaaatattttagactagaaatacttgtacccatcttgcaatccaaaaatataaagcttatccacttgcatcacag

SEQ ID NO: 195874 - DNA, 155 bp, Homo sapiens
atgtactacccataagtatccacaactttcctcaggaaaaactgagtatttctccagaaagtatttgtcctgcataattgttttttaagtacaaagcaaaacaagccttttgcttccttgaataaggaattattgcctacatactgctagccaag

SEQ ID NO: 195875 - DNA, 607 bp, Homo sapiens
tatacacacccatgatggagaaaaactatagcacaatgaaaaattagaaatcaagaagtttttatattttctacggagaaaatctgtgaaaccaatgaatcaatttgtagggagttataacagtaaaagggttacaaactatgcacatttaagaaccacattttaaaggagcaaaagattaagtctggatattttttaaaatcatggttttaaacctttgtcaagttttaatttttatattcctactttctagttcttgacactaactcaacattgctaatatagttatcaagtggttaacttattcttccttttattcaattcagagaaaagtataaaaagtaaggctttaaaaattttaaaggaaacagataagctttataatatttttgtgtgttttataatctcagattaacaaaattcaagcaacagcatactaattcctttagcacaaaaacattttttattttttagagacaaggtcttgctctgtagcccaggctggagtgcagtctgaaactctacaatgaatgatgaaaaaattatactattttcccttccttcaccttgaagtgcatagctcactgcaaaccgaatccctggtttc

SEQ ID NO: 195876 - DNA, 415 bp, Homo sapiens
cttcagaaagatccagggtcagggactaagaagacaggcgctcgtccactgctagagaagcctcaaagtgcattctggggttcccactgtccttcaggtttggatcctcctggaagttttatttgacccaagtcacgtgtaggttagaggcacaggggcaggctgctaccaaaggagacagtgtagcaggttctcagaggcaagggcagccccccccgtttgcttctcctcctttttccttcctccatccttcctcttcctttctgtccctccacccctctcccttcctttgtcctccaacttgagatgtatgaaggcttttggtctccctgggagtgggtggaggcagccagggcttacctgtacactgacttgagaccagttgaataaaagtgcacaccatcaccaccaggaa

SEQ ID NO: 195877 - DNA, 289 bp, Homo sapiens
gtgtttaagggcatttcacagatgggaaataaggtgcagagggctagagagatgggctcaaggctgtggtgccagtgacactggcttcccctgtgttgtcctttgctcttgaacatcacgccacgcagcagcagaacaaagataaagaaccaattccaaaaccaggcgtggtggcttatgcctataatcccagcactttgggtggccaaggtgggaggatcacttgagtccagaagtttgagaccagcctgggcaacacagtgagaccccatctcaaaaaaaaaaaaaa

SEQ ID NO: 195878 - DNA, 542 bp, Homo sapiens
ctccaagggcaggagaagatggatgacccagctcaaggagagagagtaaattcactctcctctgcctctgtgttctatctgggccctcagtggattgtgtgatgcccacccacatgggcaagggcagatgttctttactcagtttacttacttaaatgccgctctctctggaagcatccttgcagacacacccccataatgtctaccagctatctaggtgtcttttatccctctcaagttgacacatacaattaaccagcacactcagtgagttgctaactctaaaaacctctatttctaattctaacctttctcctaccttatccttctcctataatcaggcttccatccttccattttacaaatatttgtcaagagccttttgtgtgccaatattttttctagattgcattcaaagacaaatcaagcagaatcctccatgaaaactcatacatccatttgcggttggatatctccaattgaatgacatacactcgacttacattgaactcattctataactcttctcccacacagatcag

SEQ ID NO: 195879 - DNA, 313 bp, Homo sapiens
gaaatgcccatacaatcatataaacagtttcttgtaacacagaacaacctaataagaacatgcatctaatgaaacaaaagcccaaagatgaaaagacaaaacaggtaaattgaaaagaaaggcttcagcgttaaggaaaccaattaagaagaacaatgaatttgaaagaaaaaaaaaaaaaagcaaggaaaagaagcaaagacttaaacaaatggcaaggagaaaaatcttaaggtaacaagagtatatcgaggaggctaaggtgggttgatcacttgagaccaggggggggaggtttgaacattcggggggt

SEQ ID NO: 195880 - DNA, 188 bp, Homo sapiens
gaaaaattaagtcagccgagcaaggtgatagaacaaattagtctaaaaggagattttttgactattctagattattgataatttcatgaataacatttgtttacattttgttagaatcattttgtaactacttcttaaagtaggtagatccggagtttgacaaaatagggatcaagtaagtagttagt

SEQ ID NO: 195881 - DNA, 567 bp, Homo sapiens
tagagacggggtttcatcatgttgcccaggctggtctggaactcctgaactcaagctatttgcaggcctcagcctcccaaaatgctgggattacaggttgagccactgcgcccagctgttcatattctgaaacaacttcttaagcctgtttttctcaattaaatttttgatttcttattgagtacaaaatgcagttcttcaagcagccttcttgggcccaaaacatagcctcaaaaaaatttgggaatgttaagaaaatcaataaatgtcctggggcaaaagtttgcttctgccagattttagaaggaaatgcagatgactttgactttatctgtgataatataacctttttttcaattctccagtggttcagttaagagagctgcttatttaaagcttaaacattcataagagaggaaagtgcaggaacaacccttgtagaaaaataaatctatctaaacactgttgtctcagagtaatagattaactttttaacaccttctaactacctcaaaataattctcagattaagcttttaacaccttctaactacctcagaaataattc

SEQ ID NO: 195882 - DNA, 484 bp, Homo sapiens
ttacgccattctcctgcctcagcctccccagcagctgggactacaggcgcacgctgccacgcccggttgatttttttgtatttttagtagagacggggtttcaccgtgttagccaggatggtctcgatctcctgacctcatgatccacccgcctcggcctcccaaagtgctgggattacaggcgtgagccaccgtgcctggcttgtttttgtttttaaatagagacagggttttgccatgttgcccaggctggtcttgaattcctcgactcaagcagtccttctgcctgcacctcccaaagttctgggaatacaagtatgagccacccctctgagccctggttctaattattctctccacatttatatgtgtttagaattcctcatcacacaaagcaagtcatgaaggaaagatctaggtgcatataatagggaggttatacctgacaaggctttgggaaagacttcctgatgggatagacact

SEQ ID NO: 195883 - DNA, 335 bp, Homo sapiens
cagcctccaccttacttgctaaaagacttcccccttgaagccatcagctgctatataagaagtctaattcccctaaggctatcattaatccttgcaaagagctatatggagagatccttatgacacgacaaagagtaacatcagtccccttgctgttccattgcctctctgcccaccggcctctttcatctgatcacaaacacatgaaagactccaagccaaaactgcccagtggattctttctcaaattcttgatcctgacagaaataattgaaagaaataataaaataactgttgctgtttttagcttctaagtttgagatgatttgttatgc

SEQ ID NO: 195884 - DNA, 303 bp, Homo sapiens
gtgcgaccggaaggtagctgttactgtggacaaatcactttccccctcacctgcactggatgagaccgggaatctccactctgggttctttaagagtcctggggctccacagagtacacccagtagcagcagtgggatggggggacagggtcaggggagctccatgcctccctcaactttaatcagagcatctccactttaaccccttcctgggcccagtgttcagagagaacgggaaggaagctcagcctggccatgggctactctagcctgtcagtaacagctacctttccggtcgagccc

SEQ ID NO: 195885 - DNA, 526 bp, Homo sapiens
tgctttgcctttatttcatcatcagtgaggttgaacatctgtttatagatttgcagcccattatttttctttgtaaattgtctattcatatcctttgccaactttcttctacaagtattttccttattttcttgttgattttacatgagcccttcatgtatgaaggatattaactctttgcagtactttgttgtgtattgtattacaggttgaatatcccttatccaaaatgcttggggccaggcacggtggctcacgcctgtaatcctagcacattgggaggccgaggcaggtggattgcctgagctcaggagtttgagaccagcctgggccatatggtgaaaccccatctctactaaaatacaaaaagtagccaggtgtggtggtgggtgcctgtagtcccagctactctggaggccaaggcaggagaatcacttgaatcgggaaggtggaggttgcagtgagctgagatagtaccattgcactccagcctgggcaacagagtgagactctgtctccaaaaaaa

SEQ ID NO: 195886 - DNA, 441 bp, Homo sapiens
gtgaagccacagagatacacaagcagaaggccacgtgaagctggaggcagagactggagtgatgcatctacaagccaaggaacaccaagcattgcctatgttcaccagaagccaggacacagacatgaaacagattctcccccagagcccccgaaaggcacccgccctgctgacatcttcctttcagacttgtagcctccaaaacacaacatgtatctcaaccgtaagccatctgaacttgatcctggttaaatttaatttaattcagtaagtatttattatttgcctaatatgtacaacacatcacagatgttctaaaaaattcagcaaaaagttctttccttgtctcacttctcacagcttataacatatcaaactgcaccaggtagatagttgatagaaatggtgagatgaatggacagatgtaggcaagatacacat

SEQ ID NO: 195887 - DNA, 595 bp, Homo sapiens
tcgcataatttttttttagataccatatttgctttcttgtgagaaaatgcatttattttgtagatagctgggcttccatcaagttatgctgcaagaagatttgaggttttagtttaagttattataatccattccaaacctgtctactaatcaagtttggcattttatgtatattgatctaaaatttttgttgtcctaatctcaataatctattcaatctgcaagaaacaaccacacgttttagtcaagctctatgaaggaggatattataacatattttaagttgctttattaaagttcttggagaaaaagccaaggtcctatttaaaatgttttcataagtataccattgtaagttgaactatgttgccactttaatatttaataagtagggctagataaaagaaaatcagcatcctttagcacaagtatcatatatggcaagtgtttttttgttaacacatgttcaataaaatgtggttgcaggagggtgcccttcaaagtcagtaagagagggtgaaatgaaaggatgctttaggccaggcatggtggctcacgcctgtaatcccagcactttgggaggctgaagcaggag

SEQ ID NO: 195888 - DNA, 481 bp, Homo sapiens
ctcactctgtataccctcatccataccttcaagatctggtgaaaacactatctcttgcaagaacattctttgatgctgttcagaattaatccagacccttttctgtattctcttaataccttatctgatcctctcttaagttacttctcactatctaccttagtaacacaattttatttacatacaagttctctctccctcactagacaaaaacttcttgagggcaagcactgtgtctcctttcaaccattattatcttctctcatgttttttgaacagatttatctatagcccaaacataccttttcaaaaaactaaaaattactttacatatttgatctaaggctttgtttttctccattaagagcatgctgtggatatctttgcaagtgagtgcataaggatttttcttaaccttggagatggctgtctaggatttcagaatatcaactcatatttgtagctccatggcaactcacct

SEQ ID NO: 195889 - DNA, 1075 bp, Homo sapiens
gcacttctctctcactggaaagagaactgttctcctttctctttcttctgcctattaagcctctgctcctaaactcctcatgtgtgtctgtgtcctaaattttcctggcatggcaggacaaaccccgggtatttaccacagacaacaaaaccgcttcactatgatgtatgcatgctgcaaaggaagagacagaatcttgctctatcacccagctggagtgcagtggcaccattgcagcttactgcagcctcaaactcctggctcaagggatccttcagcttcagcctcctggttaactaggactataggtttacaagaactggtcagtaaagctggtttttcaattggtgctggatgccaatcacgatctcccatggcctgtggcttgcagtgctcctcaatctagctgaagacacaggctgacagctcctagaagttggtcacagagatgaagacattgaaggactggaacagggagttcatgatacctcgaaacacactgaccttgacttggtcagaggcctggtcctcccctcatgggggttgtcctggtgtgccttcacaatctgcttatagttccctttcatgatctttagggctgtgaggtccttgcatagtgtggacacctcctcctcctgcattttcttctccttgtgcaaaaactgagtgtagtcaatggtcttttgtagaacgatggctttgctgagctttcaggagccaatgcaggagtcctgctgctggcatgtggggatgatggtctgaaggtcatcacagcctctcttgatgacatccttcctcttctgctcagactcagtgtgtgctcaccactactggtccttgtaggaactcttggtggtaatcactgtcctcctcaatctgtgttggggattggaagaaggccctggtgggaaccgatgctattagctctagacactactgtcccattgtgggtgctttctataaaatacgtgaggtctgagcttttgtagctgtagatgtactccacctttacccaggggtctttgggagaggcacctggctccatcgtcttggacctactggaccagaaacaagc

SEQ ID NO: 195890 - DNA, 459 bp, Homo sapiens
aaaagccaggaaattcaagataaaagaaacattaagcagaagtattttaatgaccacttgatgaaaaaagtcattcagcacttcgttattcttattaaaatgagaatgactttttcattttattttattttttagagacagaatcttgctctatcacccagctggagtgcagtggcaccattgcagcttactgcagcctcaaactcctggctcaagggatccttcagcttcagcctcctggttaactaggactataggtgagcaccatcatgccctgctaatttcttaattttttgtagagatggagttttggtatgttgcccaggctaagaataactttaatccatcatgagctatactactggtttacaatttttgattatttatgccaatgttttccagtagggcttcgtagaaaattaactggaagtctgatgaaattcagagagtaaaaaaaag

SEQ ID NO: 195891 - DNA, 1229 bp, Homo sapiens
  misc_feature (152)..(152): n is a, c, g, or t
  misc_feature (179)..(179): n is a, c, g, or t
  misc_feature (235)..(235): n is a, c, g, or t
  misc_feature (247)..(247): n is a, c, g, or t
  misc_feature (318)..(318): n is a, c, g, or t
  misc_feature (323)..(323): n is a, c, g, or t
  misc_feature (345)..(345): n is a, c, g, or t
  misc_feature (388)..(388): n is a, c, g, or t
cacagcgggtcccgggactgaggcagcagcgggggcggcggcgggcggaagctgaggtgacgaaggcagcggcggcggcggccgtttccctcacggtggcggagaccaaggcggcggcggcggacggggagcggcccggccccggccccctnctcgttggctgtggcagggccgccgtngggccggcccggctcccgccccccgcggctccccctccggctcctcctccgggganacgccgggggcntggcccggcccgcactcagactgctgctgcagccgccgccgggggagtcggaggcggttggcggcgccatnggcgncctggcctctgggggggatgtngagccgggactgcccgttcgaggttcgcggctccaacggggcnttctacaagggctttgtgaaggatgtccatgaaaactctgtcaccatcttctttgaaaacaactggcagagtgagagacaaattccttttggggatgtccggctaccacctccagctgactataataaggagatcacagaaggggatgaagtggaggtttattctcgagccaatgaacaggaaccttgtggctggtggctggcccgggtgcggatgatgaagggagatttctatgtcattgaatatgctgcctgtgatgccacctacaattcttcatctattagctcagtgctgaaggatccagacagtaatccctacagcctattggacacgtctgaaccagagcccccggttgattcagaacctggggaaccccccccagcaagtgccaggcgccgccgtcccgccgacgcgcactgatgaagacaggaccgtcatggatggaggcctggaatcagatgggcccaacatgacagagaatggcctggaagatgaatcaagacctcaacgtcgtaatcgcagccgccgccgcgtaaccgtggtaatcggactgatggctctatcagtggagaccgcagccagtgactgtggctgactatatctcacgagcagagtctcagagccgccagaggccacccctggaacgcactaaaccctcagaagactctctttcaggacagaaagggtgactctgtcagcaagcttcctaagggcccctcggaggaatggcggagctctccgccccctggagtggggtaagtatggggacctggggtttcataaaaacctccagctgaaccctccttcttcatcatggcttgctgaccaaaccatggcctca

SEQ ID NO: 195892 - DNA, 758 bp, Homo sapiens
  misc_feature (152)..(152): n is a, c, g, or t
  misc_feature (179)..(179): n is a, c, g, or t
  misc_feature (235)..(235): n is a, c, g, or t
  misc_feature (247)..(247): n is a, c, g, or t
  misc_feature (318)..(318): n is a, c, g, or t
  misc_feature (323)..(323): n is a, c, g, or t
  misc_feature (345)..(345): n is a, c, g, or t
  misc_feature (388)..(388): n is a, c, g, or t
cacagcgggtcccgggactgaggcagcagcgggggcggcggcgggcggaagctgaggtgacgaaggcagcggcggcggcggccgtttccctcacggtggcggagaccaaggcggcggcggcggacggggagcggcccggccccggccccctnctcgttggctgtggcagggccgccgtngggccggcccggctcccgccccccgcggctccccctccggctcctcctccgggganacgccgggggcntggcccggcccgcactcagactgctgctgcagccgccgccgggggagtcggaggcggttggcggcgccatnggcgncctggcctctgggggggatgtngagccgggactgcccgttcgaggttcgcggctccaacggggcnttctacaagggctttgtgaaggatgtccatgaaaactctgtcaccatcttctttgaaaacaactggcagagtgagagacaaattccttttggggatgtccggctaccacctccagctgactataataaggagatcacagaaggggatgaagtggaggtttattctcgagccaatgaacaggaaccttgtggctggtggctggcccgggtgcggatgatgaagggagatttctatgtcattgaatatgctgcctgtgatgccacctacaatgaaattgttaccctggagcgacttcggccagttaatcccaatccccttgcaaccaaaggcagcttcttcaaggttaccatggctgtgcccgaggatctga

SEQ ID NO: 195893 - DNA, 581 bp, Homo sapiens
cgttgctgataatacacgtacatgtgtcagacttgatggatgcaccatccgtcctctcgtggattgattctgagtattgtaggaaaaccatgcaccatggaactgcagaggcattcctaacatccatatgtgccatgaggaacaataatgctacacgtggtacttgccaactagacacctcctcaggaccaggtggctctggcactggactggttgcctggtggcagctcagctctgtgcatgattcaacctcagcaagcctcagtttcttcctctgtaaaatgggaataacaacagcacctacctcttaggctgctacaaggatttaatcaaatcattcacattaagcattctgcacagcagctgacccacagtaagcacttacgttgcatcgcaagaaggggcaaatgaagaggatggggagtctgctcagggaaacagatcttgtggcaaacatctatttggcacaaacaaagtgttggacatttagcaaagagaaggggcaatacagttgtaattatgtaaactggcaggataagcacagaaatgaactttttctgaacaatgccgagcttcctcct

SEQ ID NO: 195894 - DNA, 818 bp, Homo sapiens
tcagccccctgagtagctgggattacaggcatgcgccaccacgccggctaattttgtatttttagtagagatggggtttctccatgttggtcaggctgctctcgaactccagacctcaggtgatctgcctgcctcggcctcccaaagtcctgggattacaggcatgagccaccgtgcccagccaggcccagaatcttaaaagaaggctctgccagagaagagtagttattagatgagaactcttcttcttctgtagcctgatgctttgttcagctttgtttaactcagtgtggctcattatacgtacttttctcttcttggccaagttctcctcttatgggtatggagatgacatgctctaaatgctttgggagcaagcactcattagagaagacttttgatgtatccttatcttgttagtagtttaagcttgtcagatccttaaagaatgacaggcttaggaccatatcccctagacttaagaggattctcattgaccatttgttcagtgtccatcactgaatcacttaccaaatacagttgacactctgtatccacaggttccacacccatagattcaaccaaatgctgattggacatattcaggaaaaaaatgcattaacactgcaacaataaaaaataatacaggccaggagtggtggcttactctgtaatcccaacattttgggaggcccaggtgggaggattgcttgaggccaggagtttgagaccagcctgggcaacacagggagaccccatctctacaaaaaataaaagtgaaaaaattagccaagtgtggtggctatcaacttgggagg

SEQ ID NO: 195895 - DNA, 555 bp, Homo sapiens
gtggggaagggctaaaagtcccaatcctctaatcatgtcttggtcattctggtgaccagtcacattctgaagttattttggggttgccatccaccaatcaactcattagcatacaaacagacatccctttggagattctaggtctttcagaagttctatgttaggaagtggggactaacgccaaatttgtatttcatattatcacaatctgcaagttggtttcttaagaaatcactgctgatctttacagagaaatgctataacaaaagcacaaaacccaaatgcttgaggaccatgagtaaggaaataagatttttcatgtgacaagcaatgttccaaccactttaacactccattgtccctgtgcagaaacatgtttcccctcccattattaaagcatctgatgtatttttcaatgattttctatagacatcttatttagtaagtgtattaagcctcaggctttccctccagtcttacctagaacctgaaactgcactagagatgtgtcatagttgccaaatccctagctgaagtgtcaagtgctttttcatt

SEQ ID NO: 195896 - DNA, 451 bp, Homo sapiens
cacacacacacacacacacacacacacacaatggaatgctactcagtattaataaagaaaaaaattttgtcagttgggacaacactgatggaattggagaacattatactaagtgaattacgccagtcacagaaagaaataccacatattctcacttgtttgtgggatctacagttgaactcatataagcagagaacagaacagtggttacagagaatggaggatggggggaatggggcaatgattatcaaatggtaatctgtaagcatatcttcgaacgtagattcattatgtgaacaaactatatctagtttatttttggttgaatacaataattcttttaagaaaacatgaaacaaatctactcgatataaaacgcattttaaaactctcataagtcagtcaaaactcattccttttattgtataaagctaactacttgagtcactag

SEQ ID NO: 195897 - DNA, 800 bp, Homo sapiens
cagggctggggaggtggggaggtccgtggcgtttgtctgctgcttctcgggatgctgggagaaaacctgctggtggaattcagggctggcctgagggctggtgacaccatccctggggactccccgagtttctctctccatcctgctgatgggactctgggagccgccctgcatgtcttgctttcttgggtttttggattttaatataccttagcacccttggtttatacctttgatttatactttgggtccctcttcacttacactctcatacctctccttgacttaacacctgtgatccccgagcttaaacttctgatgcccctaacccctctcattttcctgccttccactccctctcggcttgtggttttatttttgtttatttatttttgtcctctgtggcctcttacctgtctgagaccttgattcctgcatgcgtcttctagactgtcagcccagaaagctaagtggacagagagacatgggcctccctgcctcctggacccatgcttgctcccggacataacattccagagacctaggagataccgggggagtgagagttctggctttcgggcttacagttcaacatcctccccgccaccttccagatttttttgtgtcgctcctgcatgcgttttctctgtgtggttgtgcatcttgagttgtggttttcttaccgttttttttctttctccattttgtttttcctttttcctttttttgcgtccatccgtccatccgtgcgtccatccctccgtccattcgtcctcactctctacatcctcctatgcccc

SEQ ID NO: 195898 - DNA, 390 bp, Homo sapiens
cagggctggggaggtggggaggtccgtggcgtttgtctgctgcttctcgggatgctgggagaaaacctgctggtggaattcagggctggcctgagggctggtgacaccatccctggggactccccgagtttctctctccatcctgctgatgggactctgggagccgccctgcatgtcttgctttcttgggtttttggattttaatataccttagcacccttggtttatacctttgatttatactttgggtccctcttcacttacactctcatacctctccttgacttaacacctgtgatccccgagcgtcccccaccgagcgagcgtcgacgctctctctgtggggggttccaccacatccgtactggcccgccccaacagagagagcgt

SEQ ID NO: 195899 - DNA, 795 bp, Homo sapiens
gtaccacgctgcagaccaccaggatgtggctgtccctggcagtgcccatgctgcctcctgctgccttccgggccagcaccaccacacggcccatatggatgattgctactttggtagtcgagctttctctctccatcctgctgatgggactctgggagccgccctgcatgtcttgctttcttgggtttttggattttaatataccttagcacccttggtttatacctttgatttatactttgggtccctcttcacttacactctcatacctctccttgacttaacacctgtgatccccgagcttaaacttctgatgcccctaacccctctcattttcctgccttccactccctctcggcttgtggttttatttttgtttatttatttttgtcctctgtggcctcttacctgtctgagaccttgattcctgcatgcgtcttctagactgtcagcccagaaagctaagtggacagagagacatgggcctccctgcctcctggacccatgcttgctcccggacataacattccagagacctaggagataccgggggagtgagagttctggctttcgggcttacagttcaacatcctccccgccaccttccagatttttttgtgtcgctcctgcatgcgttttctctgtgtggttgtgcatcttgagttgtggttttcttaccgttttttttctttctccattttgtttttcctttttcctttttttgcgtccatccgtccatccgtgcgtccatccctccgtccattcgtcctcactctctacatcctcctatgcccc

SEQ ID NO: 195900 - DNA, 147 bp, Homo sapiens
cctcaccgtggaggcgggggtgttcacacagaacgcttggctgctcatctccactgggaagttggtggctgcctgacgccctccttccctatcaatctccccattcctgtcgggctcagcaaatgaagtattgctcatggcccctgc

SEQ ID NO: 195901 - DNA, 342 bp, Homo sapiens
gaaatattggttgacgaatgaatgcatgaatgaatgaattcacagtgaggaccctgttgtgaggaatacatttgagcacaaaggggaaattatggctagcccttttccaggggatactgtttctagcatatgctgtccacatgagctattggttgtaaatgggatagttgaactggtaagggccaaagagagaaatggaatgttttgaacttcactttttttccctagtaagtgccacactcacctagcacgttgtccctgacgctagttctgggataactgtcctcaggaaatcaaatcttggtggactttgtgcctcatatatccctgccgtccttcaat

SEQ ID NO: 195902 - DNA, 388 bp, Homo sapiens
caatttgacagctgctcaaaaagttaaagaaaaaattaatatacaatccctcaattctactcccaggtatatactccaaagaaaacaggaactcagaaaagtatacagatatatacacaatggaatacatttagcagtgcaaaagaacagggtaataatacaagctagtatatgaacaaactccaaaatattatgctaaatgaaagaagtcagtcgcaaaaggtgtatgaggctacagggaagggaaatcagaaggaaaatgcttaatgactagagtgttttctctttactttgaagtgatggaagcattttagaactagatagaggtatggttgctcaacactgtgaatgtactaagtgccactacactgttcatattaaaatggtt

SEQ ID NO: 195903 - DNA, 129 bp, Homo sapiens
agatgattttaagctaataagaacccccaaattagaaactaattaaggagatggaaaatacaaatgtatttgtttttagtcgggtactatttttatcagaagaatcatgaaaaattaaaattgttaaat

SEQ ID NO: 195904 - DNA, 362 bp, Homo sapiens
ccagcctgggtgacagagtgagacactgtctcaaaaaaaataaaaataaaaataaaaacataaggcatcatcaaaaaaggccagaggaataaacagaaacttgcaattcttttttcttggatatttaaagacataatgacagaagaagaaacaattcaggtgataaccacatatactattcattacaataggctttaatatggtgatgatctgaaaagttactgaggcattaccctaaaataaacaccatcccaaactgccattcatcttgaaatactgcatccatttattatgggtttcatttccctcctgatggacaggtttttcaaatattacttccctgtattgtcagcactactacc

SEQ ID NO: 195905 - DNA, 609 bp, Homo sapiens
tatctttgatctcttgcctctttatcttccaaacctaaaatgtttaccacctggccctttacagaaaaatatttgccagtccctgctgtagaaggttatatagccagcagctttcaaagtaaccttttacctggaaatgtgaattctctcttagttctggtcatctgttatttgtgggagccaatcctctctctgttggctgatgatgagaattctgttatataccacaacacaaacttggggataaaactttccattaggcatttctgtaaaatttccatctattttagaagcagaactaaggtgaagcccagtgtgaatgaatcctgcttgttggtacaagccaagtgggacatttggcagcaaagcccaggagtccttggtgctcttcttttaactgcctcctcatctcattgggctgcccggtgttaactggttgattatcacctctgtgttttgcctgcaaggaaagaagctactgacacccagagtggctcatcgatactcacacgtgctttcagttactttacgcgggatttggttaaagtgagtttagctgcacatcctcacttggtaacattctgtggctgtgaaaattgtttctctctt

SEQ ID NO: 195906 - DNA, 419 bp, Homo sapiens
tgaaagctgccattggacccgaaatgtcactggcacttctcgttatttacctttttgtcactttcctgatcaaaaccagactcattcccagaaaacccaaagaatccgtatctggcagaggagcaggagtgggaaaaactgcatgggtccctggggaccaagtcaggccctccccggagcctccggcgttcttactttgtccactttgcccctgagcatggtgctgcctaccagtgacttcagtatcgactaggattttatctctttgagtctgccggtgaggacaaatgtgccctaatggcagtaaagctgggtaaggatccaaaacaaagccagcttccctctgtgtaactgtatcatggctgattctgaagtgtggtagacatgcaggatgttggagacagatcagagatttatct

SEQ ID NO: 195907 - DNA, 410 bp, Homo sapiens
ctcggcctcccaaagtgttgggattacaggcgtgagccaccgtgcccagcctgaccagtagtttaaatgtggtctagatcaagagacaaattaagaaacctggtgatgtgagtcctctttcacatggtctagtaggaaagacttcattcagtagtaatagcataaatgaaggattagagtcctctttcacatggtctagtaggaaagacttcagtagtaatagcataaatgaaggattaatttattggttgattagatgttcattacaaaggattttgtggattagtgttaattgtataggatagaagtaaattggcaagagagtaaattgcctgtatttgaggaaagacgtttcacatcttaacactctaataaataaaatattttcttctaagctcctatttctctag

SEQ ID NO: 195908 - DNA, 406 bp, Homo sapiens
cttagtgccacccacctaattatgacaggacttgaaacagaatgattattttgtatgtgatatactgagtatatgtccactctggacatgtggacccaataagacagcttaataagtggtctgcctgtccctctctccccaggaagaacctaaagacagaataaaagaagcctagcttcttgctcatacactggctattaggaaggctgttgtaatttttaaagccggtattaagagtattttgaaagcccaagttttgagtctaaagaccttggtagactttagtgaaactgcccgactgttgaggatcaggtgtaatcctggccacatgtttatattgctgtgcccatcaccatcatcccgattcctaaggctagtctctggtaccgaatgggtagatgatcaa

SEQ ID NO: 195909 - DNA, 276 bp, Homo sapiens
tcatgttttagaatatttactatggatgttgtgggagaatggatgacttccttcctcttgaggctggtattaaaggtaacctttatgcagctgatgatatttaaattgggtcttaagttggaaaaatctgtaggcattcaccagaaatgcttagggaaaactgaattcaggttgagaaaaaaagcatttgaataacatgaaactgtgaaaaatcaagggatttttttaaaaatagcaaatagtaaacaattcaatgtgtctgaaacatagaaaata

SEQ ID NO: 195910 - DNA, 199 bp, Homo sapiens
ggtaaggaacttgccccaaaaagattaagtgacttagccaaggttatggggaagagctgtcattttttccctgttatctgggtttaaaatattggaatcaccttggactcatctctctctttttctattgctgtatccagtaaagcaccaattcctataggttgtttctacaaagtatctgtttccatttcttcctctc

SEQ ID NO: 195911 - DNA, 352 bp, Homo sapiens
ctggagccggatcaccctccttaggcaactggaggtcccccggaccgggaggtcaccatatagatgccgaacatagtgcggacacccgatcggcatagcgcactacagcccagaactcctgggctcacgcaagcctcccaccttggcctcccaagtagctgggattacaggcatgtgccaccatggccagctactttttgtatttttagtagagacagggttttgccatgttggtcaggctgatcttaaactcctgacctcaggtgatccccccacctcggcctccaaagtgctgggattgcaggtgtgagccaccaagcctggccgtaagtttaactgcacatcattctga

SEQ ID NO: 195912 - DNA, 600 bp, Homo sapiens
  misc_feature (35)..(35): n is a, c, g, or t
tccacactggtgtaagtgattctcatgcctcatcntcctgagtagctgggattacaggcacctgccaccatgcccggctagttttttattttttattctttttattttttatttttttagtagagacagggtttcaccgtgttagccaggacggtctcgatctcctgacctcatgatcctcccgcctcagcctcccacagtgctgggattacaggcgtgagccaccacgcctggccatgactggtgttcttataagaagaagggccacacagagacacaggagaatgccatgtgaaaatagaggaggcagggattggagtgagaaaccaaggcctactggtaacccccagaagcaagagaggagcacagaacagattctctctccagcctccaggaggaacctaccatgacacaccctgattccagggtgagagagtaaattcttattgctttaagccactcagtttgtgacaacgtgttacagtagccagggataacccctagacccggacatacagcttgatcatattctaccggtcacacaggcattcaatggagactgtagacatctaggtccaccagtgtggagggtaatagcta

SEQ ID NO: 195913 - DNA, 397 bp, Homo sapiens
caaaaaataaaaaaaaatcagcaaagaacagtcagaagaaaatatccctgttatacacagaatgacaaaagaatggaaaattaaaaacaggaaagaatatcaaagacataatatgggccgggcatggtggctcaagcttgtaatcctatcattttgggaggccaaggcaggtggatcacctgaggtcaggagtttgagaccagcctggccaacacggtgaaacccctctttactaaaaatacaaaaattagctaggcatggtggtgggcacctgaaattccagctactcaggaagatgaggcaggagaattgcttgaacccaggaggtggaggttatagtgagccaagatcgcgccactgcactccagcctgggctacaagagcaaaactctgactc

SEQ ID NO: 195914 - DNA, 407 bp, Homo sapiens
cagtcatgggttgcttggtgacaggaatatgtcctgagaaatgtgtcattcggcaatttcaaggttgtgcaagtatcaaagagtgtacttacacaaacctagatggtatagcctactacatacctaggctatatgatatagcctgttggtcctaggctacgagcctgtacagcatgttactgtactgaatattgcaggcaattaaaacacaatggtaagtatttgtctatctacccagagctaaacatagaaaaggtaaggttaaaaaaaatacgagtatcggcctggtgcagtggctcacacctgtaatcccagcactttgggaggccaaggcaggtggatcacgaggtcaggagattgagaccattctggctaacacggtgaaaccctgtctctactaaaaatac

SEQ ID NO: 195915 - DNA, 250 bp, Homo sapiens
aattttataccttgtgccacacttagttcctgccctgtctctccttacacattgctaacaacctggaaacagattctatgaattcttcttacttatcctcaaagcaattaacaaaaacccttacaaacttttcatatttggtgtttaatacctacttgataaataaataagaaacagaatattcatattctgtataccaaaaaaggctgtgtgagagtgtatgtatgtgagtgtgtgggggggggcgggg

SEQ ID NO: 195916 - DNA, 538 bp, Homo sapiens
gacacagccagagagaggaccaagagaggtccaggaaaacaaaaccatcccctcagacaaaagagaacgatgacagccagaactggcaagagtgaggggaaacaagcccttcggtgcagatgtgagagtgcacatactttctcgagggcactctggcaacacatatcaaaagcctgtatatctcggtccttaaattccatgtccaggctttacccttcagacatagtcagtgatgcgggcaggatatagttgccagaacattcacaggagcatatttttattagtgaaaaattggaaatgaactatagatccagtaaaaacagataacagaatttatggtagatgtattctttggaatactatgtggtcattggaaatcattttgtgaaaaaatatgtaaacgctatgtcctcccattgaaggtaaaaagttggtacagtgacaggtgctggtaacgatctgcttcttttggtgccgatcatgtgggtgggttcagtttgtaaaaatttattgagctgcactcttatgacatatccac

SEQ ID NO: 195917 - DNA, 592 bp, Homo sapiens
cctaatgctaaatgacgagttaatgggtgcagcacaccaacatggcacatgtatacatatgtaacaaacctgcacgttgtgcacatgtaccctagaacttaaagtataataataataaaataaaaaaaaagaaaatcttatcagatacacaaaaaacatagtggaaaacaaatggaaattttagaactaaaacacacaacatctgaaattttaaaatttactggatgaacttaataagagactggggatgagagaggaaagaatcagtgaccactgaaattagattaatagagatgacccaatgatccaatctcaaaaagagaaaaaagataaagaatgaggtgcaggcatctttggggcaattcctaaaggcctaatacacaagtagttggaatctcacagaagagaacaaagagagtggggcagagaatgtttttagaagcagaaaactttccaaatttggtgaaagacataaatttacagatttcaagaagctccacaaattccaaatatgataagtatgaagaaactcatagcaaggatgctataccacacacttctgaataatccacaggtcaaagaagtcagactc

SEQ ID NO: 195918 - DNA, 411 bp, Homo sapiens
ccccattttctcaagcaggaagggagaaaagaaagggggaacagagaaaagaaaggcgagaaagaggaaagaaggtaagctgtaaggaatagagggagagaacaagggagggaaggaagaagtgagtaagaaagaaagcaaagatttcaaaaactgtaaccctggacatattctaggctctctcaagccttacagtaaagaagtttttttctaataataccaaatatgaataattcctatcatacatgaataagtttggtttattagtagtaaacagattatcattcctaggatataagaagtaaagttgctttctgataataaaatttgaaagatgtaatttaaaacttatttattgtatatactatatgatataaacttccacaaataatttgaaaaaataatttccat

SEQ ID NO: 195919 - DNA, 911 bp, Homo sapiens
caaatcttcaggaaccaattcattaccattaaaaatgatctaacaagctttattttttatcattgttaaaaatcctcgttttgagtaacacaaccacaaagtaaagaatgttatcattgatttaaccagtaaaagacaatacttaacaataaaattttaaaaacatacgccagccggcttacctggtgaaaaaaatgattgcggctgcaagctgcatttgccagacaatggttttagatttgctgtgcacgctgaacgccatgaaaaatggactgcctggcctcttcataaggaaatcaattacttgcctctttctgagtgaaaagaatgaaaggatttaaaaaatcataataaccaaaatggggagaataaaacaaactgggcagagggatgggctactttgcgtcttcagcttctgaagtcttcaaagccctcttccagttcttagaattaggtcacatgaaaaaatctggtaggatgaaatgagtgtcagagcagggaatggaaaggagagtagaaactttatcaatgtgctgtcgagaggtctgaatccacactgattcttgattctttgtggctggaagcttacggaatcttcgctgtctatggtgttctgcagttttacagtgatacgcccttgtgtgggccactttcatccacgaggtatttttggtgggcgttttcaatctggcaattgtgtttgattctgagaacttctcctgacaacttcctcttttccctcttgtatttatcttgagctatgattttattgaacgttggacttcctattttggtcttctgacattcttatcatttctctccagttttcctctttgtctctttttctttttggggtatttgtatgtgttcaggtttttaagatttccttatcttggtcgtccaaccctact

SEQ ID NO: 195920 - DNA, 147 bp, Homo sapiens
atacccttgctccgtaagcgtcggttccagttaggccgttccatgaacctgagggccaggaagaaccgctctcagatagtcctgttccagaaacgtcggttccagttcttctgttccatgagcggcagggcttgggtttccccggag

SEQ ID NO: 195921 - DNA, 434 bp, Homo sapiens
atgataaaactggacttctaattccctctttcacgtaaatcagagccagtcatatcatttctgcccacaacccaacagccgtagcgagccacagggccctacctgactgcagatggctggacgcatggggagcagaaggaaggtaatgaacaacaccacctccaccagcctttaacaggagtgacgtggctctacgtgcgcttacagaaaaggccttcaagacctgccgttagctggaaaaataagaagagcaagctacaaaactcacatagaatatgatcccacttggcacacagaggccgtgtgagcacagccagatggcggctgcttacaagcaagaggaggcctcagaacgaaccctaccttgccagaccttgatcttgaactacccagcctccagactgtgagaaaataaacatctgttgtgtaagcca

SEQ ID NO: 195922 - DNA, 391 bp, Homo sapiens
cagactttagtttcaccttctcagctgctgatataggtaggctgaaaaccagagaaaaatcaagagcagactgggtgccgtggctcatgcctgtaatcccagcactttgggagaccaagacaggcagatcacctgcagtcaggagttctagaccagcctggccaacatatagtgaaaccccatctccactaaaaaatacaaaaattagctgggtgtggtgatgcatgcctgtagtctcagctacttgggaaactaaggcaggagaatcactagaacccaggaggtagaggttgcagtgagctgagatcgcgccactgcactccagccttggtgacagagtgatactccgtctcacacaaataaaataaaataaaataaaataaaataaaat

SEQ ID NO: 195923 - DNA, 475 bp, Homo sapiens
gccattgctctccagcctgggcacaatctcagctcactgcaacctctgcctcccaggtcgcagtgagctgagattgtgccattgctctccagcctgggcaacaagaacaaaactccttctcaaaaaaaaaaaaagaaagaaaatgaacaaacaagaaatcttctattccctgtgacatagttataaaggcccattaagcctgaacaagtccctgggcactcctaccctgacacattgaaagcacgggccagtttccaatccttactaacttccagaatgagggccactgatacactgcccaacagcccactggtccctagaaaaggtgtcctaccatggaaatagttatacattcttaagagctgggctgacattaggatgaacaggcaatagcggtcaataatgtcacatggtacaagaaggcaggaaggatgaggaatggggaaaaggcactagacctcactaagggcaaatc

SEQ ID NO: 195924 - DNA, 482 bp, Homo sapiens
gagaggtgttacctgcatcagtcctctcaaaccaagctcccatgacacaggatctggcctgggaggaatatggttcccctatggtcacgggatctgtttgggggtaatgcagctctcagagattgagccaagtaacccccaagggacctctgtagtgcaaaggcaggttttctgtgggtgaggacaatggacaacatgatgtgggcagcagggactgaattccaaatggccctggatgatggtcctgctccccttgtaccagctgtgtggtcttggacaagtcacttctcctctctgggcctgtctcctcatttctcaaagagggatactgcccaagtgtgatgatggtcacagcagacaaggtctgctgaggggtctgcaaggggtggggcatggcatcagtgggaaagactggtatcaccctcttggcatgaattcgtattgtctctagtaaatttcctacttcatgaaggcacatggcc

SEQ ID NO: 195925 - DNA, 316 bp, Homo sapiens
tctggagttgtcatttaatggaaggattatgagtactttgatgatttttctctttgtgtttctttttttttaatagtaaagaatgtaaaaatttaaaaatcaatgtaaaagaaaaaaggaattaaatttatgacaaatattgtgacaaatgtttatgacatttttataaagatttaatcttttctcagtagtacactacagttcaggttattttctacagcctatattaccatctacagaatttttctagacagaattatcttggccattgcaacagtgcactctagcctgggtgacagagcgagactctgtctca

SEQ ID NO: 195926 - DNA, 460 bp, Homo sapiens
  misc_feature (424)..(424): n is a, c, g, or t
tgagacagagtcgctctgtcacccaggctgaagtgcagtgagtgatgtgatctctgctcgctgcaacctccacctcgcgggttcaagcgccgggcctcagtgaactattaatgcaactcagaaccacctggagaaaagcacagcttggtctttgtaaagtctgtctccacagcttcattctttctgcggtaggaataaagatgatgtcagaggctgggcatggtggctcacacctgtgaaaattaatattaatattttaaaaattaatgtgaaacactaaattatgttagttgccattattatgacacatcatttttaaaaagtgacagcaactattttatttatttatttattttgaggcagaggcagagaatcgcttggacccgggaggcggaggttgcagtgagcggagatcatgaagcgnacatccagcctgggcgacagagcaagtctacttatc

SEQ ID NO: 195927 - DNA, 156 bp, Homo sapiens
aacgggtttacaatcagaagcagacagggcagaagaaggtaatacaggagaactagcttttgacggtagcccagtatttcccaggtatattcagtatttaccattccttgcaagaccaggtgaaggataatgaaggtatggtttcatgtatggaag

SEQ ID NO: 195928 - DNA, 198 bp, Homo sapiens
caggaaacggtacacatgttcacacacacttgcacacatgctaccatgtgcacacacatgttcacacatgcttacatacattcttataaatacacaagttctcacacatgcccacacacatgttcacacacacgctcacacatgctcacacagatgctcacacacatgctcacacacatgctcacacatattcgcacg

SEQ ID NO: 195929 - DNA, 439 bp, Homo sapiens
tctctcaataattaatagttatgataagcagagacagtcagaacaatgctttcaatcactttgacctaactggcatttataaaaacactctgttcaaccacagaagaatatgcattcttttcaagtgcacaaggcacttttagcaagatagaacatattctaaggcattaaatatgtctcaatacattttaaaagatctaagtcataaaagtatgtttctgactataatagaattattacagcaaaatcaataaaagaaagctatctagaaaatccccaaatatttggaaactaaatgacacatttataaataacctatgagttaaacacagaaatcaaagggatattagaaatattttaatttaattaaatggaaaagcaaattatcaaaatttgtgagatgtagctgatgtagtatttagaggggaaaatgcctgtg

SEQ ID NO: 195930 - DNA, 250 bp, Homo sapiens
aataatttagaacaatttcaagagtatgagattatccagccagtagtccttcttctataaccttccattttagggcctgcatacttgactctcacttctttttcttaaaaatgggctcaaaagcaaataatcagtcttgggtcacatggccaggagaagtaagaagagtgaaggttattgaaggttacagaacatgcaggaagagtcgagggtgtggcagagtacagagactaactcctcaagtccctta

SEQ ID NO: 195931 - DNA, 453 bp, Homo sapiens
cgatctcggctcactgcaagctccgcctcccgggttcacgccattctcctgcttcagcctcccgagtagctgggactacaggcgcccaccaccacacccggctaggtttttttttattttttagtagagatggggtttcaccgtgttagccaggatggtctcaatctcctgacctcgtgatccacccgcctcggcctcccaaagtgctgagattacaggcttgagccaccgcgcccagcaagggcatggttttctcaaaagttaggagagtgattacctggggtgggggagaacagagtgggggagagccctgctgagaggtggctgtgttctctttgttgacctaggtgatagtcacatgaatgtttgctttgtattttttaaactgaatatatgttttatgtacatatgttgtatctcgcaatttaaaaaaataaagaggacagatcacct

SEQ ID NO: 195932 - DNA, 270 bp, Homo sapiens
tctgtaattttgagggcaagttcagcgaataactgtagacgctattaagagctgtcatggaaaatgtatctgtccttaaatggaagggagaaacattactgcagaggcagtgctgtttcaatgtagataattctccccttcaagctttttaaaataatgtttattgtttcctacgatgtctccccagaccgttctaacacttgcaattgcagtcctgcctttttcctcttgtcaggaataaaatttatggaagaagcatggcccacggga

SEQ ID NO: 195933 - DNA, 274 bp, Homo sapiens
tcccaaattaactttccccacacccaagaaagcagatttcggtacattccagagcgtggatatcaagcaatttcaccagcatggcaccactactagcacttctgagccactcagtgaaccacagctgcgggaaggaggaaggggctcttctctgggtccccgtcttagtcctaagggtagcagctcctccttatagataatacttctggactctttcattacctcttactggccaatccctgattacccaagttctgtgttggagtttgtaatt

SEQ ID NO: 195934 - DNA, 180 bp, Homo sapiens
gatgaaatgccccacgccaagggttgaggttgagagtggataactagtggggtgtgaataaaagatgaagagtgtatgaacaaatgagctccgaagtagaagtttcctaattttacaattctgcctgaggaaagcccagggccatcatatagggttgaatggactttgctcagactaagg

SEQ ID NO: 195935 - DNA, 288 bp, Homo sapiens
agcctggtccagcccagaatgggaagctcacctcaggccttttccctccctcctggccctgcatccagctcctccctgcatggcttcagtttccttgtctgtacaactgactcaaaaagaacccacctcctaggattttgtgcagattagacgggctgaagtgtgtcagtgctggcacatagtgggcactcaatacacgttagcaatgatgatgccatggcagagggcactgttcagtcctctccttcgggaagtgggggagtccttggctgtctttgtggagaccgg

SEQ ID NO: 195936 - DNA, 401 bp, Homo sapiens
ttagggatgacctctgccctgctgggtgcccttgatgactaacacagcaagtgtgtggaccgccacctgtcctggcctcacccaccttcaccctccatttcttcatgactgcccccgtggcttctagggggaaggccccagacaggtttgctaaactactgactcccagggctccctgacagggcctgatgcagggtggccagcggttgtgacccctagaccaggtgggtcccagcacagggacctgagccccaccctcagggagctggcggctacacggggagcggtcacctgtacagataaatctagtggaaagcccccatggccagaaccagggcggagggcctggggcaggctctggagtatagaagagggaaggcgcctttggaacagacagcaga

SEQ ID NO: 195937 - DNA, 541 bp, Homo sapiens
aaaagtgaggcaggaatagcagtcatgaaaatgaagcctccctggtggtcactgacaacatcttcagagtggcaggcagcagtctgctagctgctccggtagaactgtgtgcagcggtggaaatgttttctgtctgccctgtccaaatgggtagcccttagcacatgtggctgttgagcaactggattattcatttcaaataattgcggttaaaatccaaatagccacaagtagctaccatattagaaagtgctggttcagattgagccaagagaagaaggaagccagcagggagattaatgaactataaggaaatcctgccatttgcagcaaaacaacatggctggaagtggaggtcattatgttaactgaataagccaggcacagaaatacaaatacaacatcttctcacttatatgtgggagctaaaagttttgatctcatgggcatcgagaatagaatgatagaatccagaaactgggaaaggtagtggggaggtgggggaagaaaagaattgattaatgggtacaaatatatggtt

SEQ ID NO: 195938 - DNA, 552 bp, Homo sapiens
ttcaaagctttcaatggctttctgctgccttttcaatacagaacaaatcccttgaactaacagtcaagctcccttaccctagattcttatctagtctcattcagcacatatatataacatacacacactcacaaactctaccttctgtgcagcctacatactagaaactcagaaattcatttttctatagcatctgtttgtgctgctacagatacgatcctggaatatctttccttcttaactccaaaacttatccaaccttttgatcttgctcaaacaatagtttgcttcaagtctatccaaatttactctccagctaaaaagtaattctccctcttgtaatttatttgaactttttttcacaagacacttaagactttctgctttctgttgttatttatgaacgtgccttctagcccttactagaagctcctttaagacaagatttatgattgattcaccattcctacaacagtggtgttcatatgtaaaactgtcaataaaaatatgttaaattaactgacactttctatctggattagctgattttac

SEQ ID NO: 195939 - DNA, 339 bp, Homo sapiens
tatggtagactaatgccatgttgctaaccttgtgtaagaatattatagtaagaatagcaatgtgattttagaatttaaaaagataaataatcaacattagaagacatttgtaagtatagttcatatatagtcttgagaaaatatcttgtaaaattttatttattttaagaaactcttgggagcatagtataaaagtatcatataaattacttgatgtaattgtaattggatctttgggttgaattccattatatggcttactaaaatgctttttttatccatcagtaatagactcacagcatctattacgtacttgttgtagaaagtgtgccccaggat

SEQ ID NO: 195940 - DNA, 308 bp, Homo sapiens
cctagagcaaccagaggtccggttgggtcagcttttcacaccccatgccatgttgaaacctcagtggacgagaaggttcttttgaagttcatatgcaactgctgggtttacttctgtctttgtcccagaacagtttcagcatcaatgacctagggcaagtttttttgtttgtttgtttgtttgttttgactcctatgtctttgagtgtgtgggtacatatgagaaaactccctaactagagcatgctgcttctgttgactagtaaacattatgtggcagagagcgccttcaaagcaccagccttccct

SEQ ID NO: 195941 - DNA, 295 bp, Homo sapiens
tgtcccatacaaaataaaacagcaaatgtctagaaaaagaggactcaagatagtgactgtcatcgggatgagttccaagagaaggttggacttgagaaggattttgcataaaaggtgcatccttattcccaaagcacttccatggtccctgctccccaaactatcaagcccaaacaccatgatccctggctttcagagtttttttgatttggtcctgagtactcaaccatttacatgatctccttaatttccattacgctttcttatatagcctgtggtcctcgttttgtcactt

SEQ ID NO: 195942 - DNA, 365 bp, Homo sapiens
gggaagcagctgtgtacgatatataaatgatgcaatacagaaattattgtggcatggtatacagggagaaatgaaagcattgaagaaggcaaagaagtcttcctcgggaagtcatggcttcaaagagaaaagtaggctgtgtcttaaaggataagtatgactttgccaagctaatttagggaactttgtattctaggaagagggaacagaatgtgcaaagcctcgaaggtgcactgttttgtgtgtgtgtgtgcgtgtggggattctttagtatattttgactgcatgttgaggagtgatgaggaatagagtttgacaggtagtcaggatactgtaaggttaaaacctgagctctgtggttgact

SEQ ID NO: 195943 - DNA, 320 bp, Homo sapiens
tatttattgtttgacaaactggggaaagaaaatagaacttgttggatggaaactaggaaggcatgggactacccattgttgaatttggagaaagatattttactcctgttactccatctgaggggtggaagttctagtgcttatcttgcctagacttctctttactatttttattactgcagaattggtcctggcaactatattgagaggtgtagccaagcacgacttagggtaactggggagaagacagtaggaaaagtgagcattatctgatggtagatgaagcaatatagccatgagcactggtcaaacaatgactg

SEQ ID NO: 195944 - DNA, 417 bp, Homo sapiens
cagagtctccaggatttttccttggccttgtcccagctgcaccacctctgtcgcagccccatctccgggcctggaaagaacccaggtgcctcggggcccagcaggaaggggccagggacaaagagttgtttaactgggcaggctggtgaaggagagtgaagagggtgtctcaggcggaaaggtcattcatcgcccaaggcttgtgcagggaaaggcagggctgagccccgaggaagagatcctgaaagtcagaggtcagtggcggcaaatcctccaccgccatctctgggaccttggagcctggaagctccagggcttataaatactgtcacctagtgttcacttaggcaactgcagacactctccctgtccagcctggtttcttgccaacatagagcaaaacacctactgagtgcc

SEQ ID NO: 195945 - DNA, 215 bp, Homo sapiens
aaaaacagagatctatattccctggaaagagtgaacagaataattctgttattattaataaaaatccactccaacctctttttgtttgtctctcccacaacactaggatcatgactcagaacaaacatataaaagccaggtacagtaactcatgcgtgtaatcccagcaacttgggaggctggggtgggagaatggcttgagcccaggagttgga

SEQ ID NO: 195946 - DNA, 225 bp, Homo sapiens
cactcttttgcccaggttggagtacaatagcttgatcatagttcaccgcaacatcgaactcctgggttcaagtgatcctcccacttcaggctcccaagtacctggaactacagaactacaggaacatgccaccatacttacctaatttttttttgtgcgacagggtttcactcttttgcccagggtggagtacaatagcttgatcatagttgcccgccaatcgaa

SEQ ID NO: 195947 - DNA, 588 bp, Homo sapiens
cttttctgttacattttgttaactttagaaatagtagatcatgttagactaagtagagatcacaaaaagatgagatttaggagaaatccatagatgttttgaactgtggatgaatagttcaccaactatttcctgtacacaaaagccatgcaatatatgtgattaaatttgtgccttggtgaaataatatgttatatgtcactgtatgtattgtggggtcatttataaatggttacaatattttaaagtaggaatacctagggtctgcttgtcgttagttttctgtgatagatattcgacagtgcttcctggcatttaggaaggggcagtgagatcttttaatacatctagagaagacacttccttatatgatcttttcatttattcaaatatatatttattacttcctctgtgccaggtactgtgtggctgagcagcctagacttgattctgtaaaggaaattaaaaatcccaggacccccagactccttatgcaaaaggaaagttaatcctggagtctgagtcatgcaacacactctttcaagtgagtagctgttactaacattatgccttaaccagatcctcatg

SEQ ID NO: 195948 - DNA, 358 bp, Homo sapiens
gttgactttatctttttaaatatttcctgaatgtttactcttttctacacacccatgtttactctagtccaagcttctatcacacttacccaaacttgtggggaaaagcaagagagatcagattgttactgtgtctgtgtagaaagaagtagacataagagactccattttgttatgtactaagaaaaattcttctgccttgagattctgttaatctataaccttacccccaaccccgtgctctctgaaacgtgtgctgtgtcaactcagagttaaatggattaagggcggtgcaagatgtgctttgttaaacagatgcttgaaggcagcatgctccttaagagtcatcaccactccc

SEQ ID NO: 195949 - DNA, 590 bp, Homo sapiens
caaccctgtctctaaagaaaaaaagtgatttgaaatagaaaacattttttaaaaagtggaggtgcttaatcattgttcattgttcattttctttttgcttcctctaatatctctgccagtactcaacaaaagttcctttttcaaagcaaatgtgtttaagcagaggacagctaaggaggatgagggggagcttttgcaatatattgttatacttttgaagtggtaatgcttagctcaagtaggattttctttttaaagcagcattgtcttagatctctgctcagtggctggtattcccacagctaacctcaaaaagccttttggttggtggaatagctgtgacctgggtagggagggcctaaccccagggctaaggctttcaaaaggcagtgtacaggttttggtttttgcatttgtgtttgtttttgtttgttggttggttttagaatacttaatgctttaattggaccatttttcagtgcttgcagcccctgtatgcattaaggatagaactgaggtgttacaggaatgttccaaaatattttctgttacacttggaaaaatatattcagttcctagatttcaggtta

SEQ ID NO: 195950 - DNA, 461 bp, Homo sapiens
agatgaggatttgcagagccaagccccacctgggaggcatgttaagtcctttccagttcttctcaattatggctctgcagtgagtatcttttgttcataaattcttgactgcacatcttgattatctcctcaggatattttcctagaagtgggattactggattgaaggggatgcacatatttaagattcttgattccgaacccctccagcagtataaaaatgagtccgcttcccagcaagctggcccaaacaggctattatcaggcttaatttttattttttatttttgtgccctcctaatagaacaaaaatcgcatctcgtttggtttgcatctctttggggactaattagatcgagattgaactagttttgaagaaacactctaaggagtccagagaaatcctgtgtggggcaggagatccatgaaaggaggcacatcccgcccactgaggtgaaacc

SEQ ID NO: 195951 - DNA, 479 bp, Homo sapiens
actcagtaccaagagagtcttccctgcagtcccctgggggtggagtaagaacagtaagtttactgctgattcaccctaacacttacagtgtagcctttgagattagtctaatatggtagggcaggtttccttgtactagactcccaaacttggataggcccttggccttggcttctggagccatcagtccaggaggctagccaaacccaaacttagtttgcctggatttgcaaatatcaatcccccttacctgaggcaaaattactttaatgttctgatatttcacttacctctctgggtctctagaaagaaagggtaggtcacagagtaacttcacctgctaatttatatttgggaaatgtttgaatgttttataacaagcatacatttctttaacttttaattacagtttctttaaaaatatcaaatagaactaaaaagctggccaggcgcggtggctcaccgctgtaatcccagta

SEQ ID NO: 195952 - DNA, 162 bp, Homo sapiens
atatttaaaagaaaaggaacctgcatttagaagttattaaataggggccagacgcagtggctcatgcctgtaatcacagcactatgagaggctgaagtgggagcaacacttcagtccaggagttcaagaccagcctgggcaatatagtgaggcctcatctct

SEQ ID NO: 195953 - DNA, 972 bp, Homo sapiens
aagagagagaattatacctggaagcaactagaaacaaaaatgaagcaaaagcagctgttgtcttatctcaaatgacctttcagcaccattatttaagtctattttgtcctaaatattaatgttttcactactgggtctctaagactgggtctccaagaaaaatagtttataatttatatttaaaaaaggtagccctttaaacattttcatttgattctgcttctagctgcagcagcaccacaacaaagcagggaataaaataagagtccagattatttgaaaactcagcttaaaaaaaaaagactgtacaatttctttcttcccttgtggttctacagtgtctttagggcagaaatcaatttttgctcaccaaggttatgatttcaactgttcaaccagaagactaactaagcaaacaaaccaacactggtcaaaacccttttgcagctcttccagaggtgtcaactatgattactttacaaattcttcccacctttttgttggaaattcttatttctcttcttaacatttttgatctactctgaataatattcatgcaattaaaatagagattttttaaatctggtaagaacgggtggggcatggtggctcatgcctgtaatcctagctctttgggaggccaaagctggaggattgcttgaggccaggagatctagaccagtggaggcaacatagtgagaccttgtctctaaagacaaataaaaacaaaagttaaaaaaaatctagcaagaatgctttctttaaaaattgtcgacacatgatgatatttatttgggcacttattctaacccttaactaatgaccatacttgtaaatatcactaaagcaaccacctcctccataaatttgaggaaagaaaaattaaaaattttaagcaatcctttaaaatgtaagcaattctgaaaatacagtgatggtcctgcacaaagctactaaataaattctgccacc

SEQ ID NO: 195954 - DNA, 534 bp, Homo sapiens
acgagatccccgtgcttcatcaacctacctggaaaaaataaaattgaataagtgaaaaaatatcaaaaacatcccatgacattggataagacaaggtgataaactgtcaattttcagaaactaatacataaatataaatgcaattctgatgagaattctaacaaggacatttgtgtgtgtgtgtgtgtgtaaggctatatgactgagagtagctaagaaaagtattaaaaagaactgtttgggatatcaaatcaaaatagtattagcctaagaagaaacagatcagtggagcagagtaaataatccagaaactgattccattatatacatgggaatacagcatgtgacaaaggtggtcattcaattcagtaggagggattatttaatagacaataaactgactctgcactggaaagaaaaataaaataattagtgctcccaaccttacacaaaaaattccagattaaagatgtaataacacacaaaatacgtgttcaagaaaatctgagagactactgggaactcagaagtatt

SEQ ID NO: 195955 - DNA, 615 bp, Homo sapiens
tctagcagcaagtataaagaaacagaaacgggattgaaatatttaattcacatcactaacaaaaaccataaaacactaacaaatttaattaaaaagggctagaacctacctggaaaaaataaaattgaataagtgaaaaaatatcaaaaacatcccatgacattggataagacaaggtgataaactgtcaattttcagaaactaatacataaatataaatgcaattctgatgagaattctaacaaggacatttgtgtgtgtgtgtgtgtgtaaggctatatgactgagagtagctaagaaaagtattaaaaagaactgtttgggatatcaaatcaaaatagtattagcctaagaagaaacagatcagtggagcagagtaaataatccagaaactgattccattatatacatgggaatacagcatgtgacaaaggtggtcattcaattcagtaggagggattatttaatagacaataaactgactctgcactggaaagaaaaataaaataattagtgctcccaaccttacacaaaaaattccagattaaagatgtaataacacacaaaatacgtgttcaagaaaatctgagagactactgggaactcagaagtatt

SEQ ID NO: 195956 - DNA, 1037 bp, Homo sapiens
  misc_feature (883)..(883): n is a, c, g, or t
tgcagagaacaccaagtctgtggtcgtgtccatcagctcagaacttcggggtttctgttaccccatggttagggttccttggagtatgaaatgtgctaaggaagcctcaatggagacggggacggagactgggagttccctgaccacttccttgcagggtactttctgcagcccctagagatagtaccagattatttgtttggcacatcaggaaactgaggcacagatggtcaagttggcctcccaagaccgctctagaaaactggcagaagcagcctgtatgcccacagccctccacatgagtgagagcgtggaagacagaacatgccgagggagacgttagacgtctagctctgcgttctagacgtggctttgtgtggctgtgggaaggtcatgcagctcctctgtgcctcagtgtccccatctgtagtttgtgataatgctgcctgactgaccaagaactgttccaaggcagagatgaaatgacagatgggaaagtattttgtaaactctaaagtgccagccagatgtgcagttcattgctgagtgcttagtagatgagcctcccctatggacaccctggagctcagagggagggagagtgtgtggtgcagctggtttaaaggtttttctctgcgaccccaagctactcccggggaggcaggcatttggtaatatctgctagtgcccagcgcagtgggtgttcactgaaggctagtcaagcaaaccaatgagaaaatggggattgtgacatgcacagacatgcacagtagcctcacagcagaatagaaaaaggccggatggcaggtgcggtggctcacaactgtaacgccagcacttgggaagcagacagacagattgcggagtccaggagttcgaacanctggcaactggggaccatttagaaaacacaaggcgcgtggccccgaattcaccacaggcggggaaccgcccggggggcgccgcaccccgtgggaccaacgggtgcccccgcgcgcaggacgccgcgccaagggccgggaccgttgatcacctgt

SEQ ID NO: 195957 - DNA, 471 bp, Homo sapiens
gtgtaatcctctgtgcctcagtttcctcacctaaaaaatgagtgtcaaacccagtactaccccacagagtcattgtgagggatcagtgtttagaacagtgccccatgcagagcacacataagtgtctgccgtgactattactatttagctgacgtacctgaggtgggtgcgcaggtgtagaggaaagacgttcacgcctggccaggagtgtgaaacgtagacagccatttcagagggctcttgatgtttcaaaactttcaaactacatacaagactccccccaaggtgccccctctaaccctgaaattccacctctaggaccctgaatcccttggggtcaaacatgtttcagattttcggaaggtaacttggcgcatatgccccatcctgtgttactcttccccggggtctggggctgccccatgctgtagaccctctggggtgttcagcccacctcaagtgcaactgggg

SEQ ID NO: 195958 - DNA, 325 bp, Homo sapiens
acatgtattgaaaatagaatattctcaggatgcaaacccgaagatatggaaggctgactttgggacttgagtatttgaggatttttgtatactcgagggtcctagaaccaatcccctggatatatagagggacaaccatagttcaagagtcaaggagggccgggcaccgggctcacgcctgtaatcctaacattttgggaggccgaagagggtggatcacctgaggtcaagagttcaagaccagcctggccaacatggtgaaacctggtctctactaaaaatacagaaattagccaggtgtggtggttgggcacctataatccta

SEQ ID NO: 195959 - DNA, 272 bp, Homo sapiens
aatgtatctcttgcaactgcatagcttggattcacgaagaactttgcaaggatggaaggcgtatggggcaccatgaaagctattttatatacatactgagggaagggaagttacttgctctttggaaatcactgccatttatttgttatgtggagaatccctaaaataaaagcgcaaaaatgttgatgaaagatgatttacataaatatttcattgcatgctcttgtaattctgtgggaaaacatccatccaaacctcacctcccagacagg

SEQ ID NO: 195960 - DNA, 500 bp, Homo sapiens
ggataataggagttgttgaagatcttggagcaggccgttggtgtactggtatgttggtatggctggattttaggaagctggatcttgtggcatcgatgaatggttgattggagggtgttagggcaacagtaaacaacaatgaagatgttaacagaggtggggtataattagggcctgaacataggatggtgtcagtgggaatggaaaagaaggaatgggctgggcatggtggctcacgcctgtaatcccagcactttgggaggccgaggtgggtggatcacttgaggtcaggagttcaagaccagcctggccaacgtggggaaaccttgtctctactaaaaatacaaaaattagccaggtgtggtggcacagtcctgtaatcccagctactcaggaggctgaggcaggagaatcatttgaacctggaaggcggaggttgcaatgggccgagatcacgtcactgcacttgagcctgggccacagagcaagactctatctca

SEQ ID NO: 195961 - DNA, 320 bp, Homo sapiens
gctttatccaaactaatttctccttactctgaaatacctcccttagttggccctctaccattcaattctaattttaacatctacatcaagttcaaatgtctccctgttgatttctctaaaagggtttatagttaacaccacaatttgttctcaccttttcagatcatttcaagcatatcaattttatctctacaactgtaagattctaaagataaaaaatggtcttatattgcttcttaaaacccaaagcacataggagagggatggaaatttacatcccaattttttttttttttagaaaggacagaaaggtatcagag

SEQ ID NO: 195962 - DNA, 172 bp, Homo sapiens
ctgggaagctcccttacaccccctgccgccctcactctgctttaatatctctccgtttcttgctttcttaaagaagttctcatcttgagtctagtatgtacgtgtgcatgtggaaatgtatgtatgcaggtggaggtgtgtgtgtggagatggaagtgtgtatgtccagatg

SEQ ID NO: 195963 - DNA, 353 bp, Homo sapiens
taacaaaggccctataacaaaattgagacaaaagacagactggaagaaaacatttgcaacatagtcaatctacaaagtctttttagaggtaatcactcgaaaaaagacaatgaaaaaaagatgggcaaaggatttgacaagaaggttgataggtgatgaatacatattgccagtaaatgcatgaaaagatggtcaagttgacttttcatctaggaaatccaaattaaggcaaactataaattttcactcaagttgtcaaacatttaagaagtttgataatatcaagtgttgagcagggtaaaaggataatggaattttcaaaatgcaattgatgtgtaaattaatacagccat

SEQ ID NO: 195964 - DNA, 606 bp, Homo sapiens
ttgtccagaaagatttgaacccaagtttatttgcaaatgtctgctcataactgttacgattatactgtcttccagtagttggagcagggaattcagagaacacatctttgattctcttgctaaaatagatagtctaaataggttgcctggtagttttcttatagaaagagatctgtgaaagagtgcaacaggtactgggtcctatttgccttagagctcaccatagttacactgcttttgcatatgtgaggcttgtaggctatgctgtctaatgcatttcattcattacgtatgtcttgagagttctagagcagcatatttctagcagaaacttcgctggcgatggaaatgttctatatttgcactaatatggtagctgctagccacatttgactattgagcccttaaaagtagctagtgtaactgatgacctgaatttttttgtttaacttattgatttaaacttaagtagcctcatgtggccagtggctatttattggacagcgcagttccagaggtatattgcccacacttccttagttcctgcatattgtccacgagggatcggtatcagctcactgcaggcttgacctcctgggctcaagc

SEQ ID NO: 195965 - DNA, 815 bp, Homo sapiens
gggggacaggatacttgtcacatatttgaagaaattccatacagtgaaggaaatttgagtctgtattgctgctacaagggtaaaaccaggaccaatgggtaaaagtaacaggcgggcagattttggcttgaggaagagcttctagcacgactggttcatgcgggaatagctgctctggccacctgcaggcagaaagtgggggaagtggctcctggcaggagatttctcccagcactaatatcctggtgttctataaaatctttattgagtgcctaccggtgcaggcgctgggagagacaatagctttgaggagctcacaatctagctgaggagacaagacacatccaatgctgcaaaaatggtgaataacctgattcagggttagcagcaatgagtatcacagcgtccaactcagtagctccagtgtatgaaaatgtctccagggctaaaggctggagatctcaccagtggggaaagtacatctgagtcaggattttgggggaaagctagttactgatagccacaggaagttgagacttctgccccattctctccaatggctgggtgaaaaccaagaattcatcggaagatggctttggcctggaggtagctagggtggtctaggaagctcactcctctcttagtctcagtctttcattctttctgctgagactggcctgaaaggctggcaagtgggagggagtcagtggggaggccaggatagaactagagctggtgtcccaggttccagtctgggctcttcactgacaaagtgggcaacactagaaacttccctttgtctctctgggccttag

SEQ ID NO: 195966 - DNA, 540 bp, Homo sapiens
aatgaatgaagcattttttgctataaacttggagggtctaattattggttgttatctctttaaaatcatctcatttccatattttcaattcatttatattatgtatgtggccttatttatgatttatttttttcctgcatggtattaaaaacccaaataggtctgggcgtggtggctcacgcttgtaatcccagcactttgggaggccaaggcaggtggattgcttgagctcaggagtttgagaccagcctggctgacatggcaaaaaccatctctactaaaaatacaaaaatgagctgggcatggtggtgtgcacctatatagtcccagctacttgagtggctgaggtgggaagattgcttgagcctgggtggtcaaagctgcagtgagccaagatcaccccactgcactccagcctgggtgacagagcaagaccttgtctcaaaaacaaaacaaaacaaaaatcaccacatggactcttatattctgtactaaaaaaatagaaggaactagaaggcagatgtcaaagttgtgtttggg

SEQ ID NO: 195967 - DNA, 549 bp, Homo sapiens
gcatcttcctcttctgctgccacgagccgccgtgctgtgccgccctgcgagtttctaggaatcagctacccaggaaaaatgatttttactcatatgagccaccttctgagaatccttccccagaaacaggagaatcggtgtatctccaacttaagtctggtgctcatctctgcagtgtttgtggctgtttaggccccaaaacttgctccagatgccacaaagcgtattactgcagcaaggagcatcagaccctagactggagattgggacataagcaggcttgtgcacaaccagatcatttggaccttacaactccagaccacaacttcctttttccagaatttgaaattgtaatagaaacaagatgagattatgcctgaggttgcggaaaaggaagattattcagatattatagggagcatggttaagcagtttcaggacttcattcattaagtggttaaacttaatgcttggaagaaaggtctcaatgtgtctagaagagaggtactgagaggaagactcactttggaggctggagcctacaatttt

SEQ ID NO: 195968 - DNA, 169 bp, Homo sapiens
gttgctatttttttgttgttgttgtttggcttggggccagtcttttcacggctgtagtgagcaatgactttataagaccaaagagacatagaaaggtttctgctgccccaaattatcactctacaggacacgtcacagtgcctaaaattcctcacatttcctccttgga

SEQ ID NO: 195969 - DNA, 888 bp, Homo sapiens
cctcctacactgtgtgaactcaaatcactgtaacaaatgccttaatacatacacacacatatcccatatacgttttcctttatccatcctaggggtttcatttttctaaaccttatgtgatcctgaaaaaaatattacaattaaaagtcaacaaggccgggcacggtggctcacgcctgtaatcccagggaggccaaggcaggcggatgacctgaggtggggagttcaagaccagcctgaccaacatggagaaacccgtttctactgaaaatacaaaattagctgggtgtggtggtgcatgcctgtaatcccagctactcaggaggctgaggcaggagaattgcttgatcccacgaggcggaggttgcgatgagccaacatcgcgccattgcactccagcctgggcaacaagagcgaaactctgtctcaaaataaataaataaaagtcaacaaattgttacttaataatcactgtatgacaaacacctgtgcagacaagacatttaaccaaccagacaccctcaattttcttattatttaattctcgctactgcacagggtagcttgagccctcacaattcagacactgagctagataccagaaaagtaattacaggcaaaaacaggaatggttctgctttcatgaaactcagcctttgtgggaaaactaaaattaattaaatcacataaactaatataacattgtaattctgataagcaccaagaggacttgactgcagaaaagtcaaaaaaattcaagaacttcagacagccaggcacggtgactcatgcctgtagtgcagtggcacaggtgggaggctgaggcagcactttgggaggctgaggcaggtacactgcttgagttcaggagctcgagaccagcctggg

SEQ ID NO: 195970 - DNA, 435 bp, Homo sapiens
cctcctacactgtgtgaactcaaatcactgtaacaaatgccttaatacatacacacacatatcccatatacgttttcctttatccatcctaggggtttcatttttctaaaccttatgtgatcctgaaaaaaatattacaattaaaagtcaacaaggccgggcacggtggctcacgcctgtaatcccagggaggccaaggcaggcggatgacctgaggtggggagttcaagaccagcctgaccaacatggagaaacccgtttctactgaaaatacaaaattagctgggtgtggtggtgcatgcctgtaatcccagctactcaggaggctgaggcaggagaattgcttgatcccacgaggcggaggttgcgatgagccgagatctccacactggctctctccacttcagcctgggtgactgagcgagactctgtctc

SEQ ID NO: 195971 - DNA, 674 bp, Homo sapiens
tattttcattctttttactttaaaatatgccttagtttttgaatagataagacattcaagtgtcagaaagtaaaagtcagttcaggactgagaaaggaaagatcagtgctgattttaatcagactgtaatgtaccaactagatacagacagggccagtggcaaggccatcagaaaacttcttcccaaggccacaccacacctgcaaaatgcctaacaaccttcttcttttcagtgattaccactttcttaccaatgacttcgctttgttcctcgtgcctctgaacagactgctgagatacccaatcaagagccaatccttgcttccctagactctcctcaatcattcaacagaagcccaaatcttgtaaaagttcctttctgggccgggcacagtggctcacgcctgtaatcccagcactttggaaggccgagatgggtgaatcacaaggtcaggagtttgagactagcctggccaacatggtgaaaccctgtctctactaaaaatacaaaaaaaaattagctgggcatagtggtgggtgcctgtaatcccagctacttgggaggctgagacaggagaatcacttgaacccgggaggctgaggttgcagtgagccaagatcgcaccactgcactccagccctggcgacagagtgagactccatctcaaaaaata

SEQ ID NO: 195972 - DNA, 249 bp, Homo sapiens
ccatgaggtccaactggccattaactggacctttcagagaatagaaaaaaagcactgggggaaaaaaaatcaagaattcaagaaattttcctagacctgaatgacatgagtttcctgattaaaagggccaagactgccaggtacagtggcatgtctataatcccagctactctgggaagctgaggcaggaggatcacttgaagccaagagttccagaccagactgagtaacagagcaagatctaccacg

SEQ ID NO: 195973 - DNA, 532 bp, Homo sapiens
ggcacctttatatacatcatttcacttcatcattattaaagccctataaagtaactcttttattcctgttttacagatttgggaatgcagttaaatatattattcacttgctcaaggtcataatgctaagaagtggtagaatcaagatttatatccaggcccaaatttgaagtttataacttgcattttttccattacatggtacgtgtcttttggttagagttagagacagcagctggacttcaagagtttggtaacattacttactttctcttactaaagaaatggggttggggggaggaaagagtctacaactgagctttaaattggggattagtggaagcatattttataacattttaagttcaatgtcttttattgggttggccttgaaatgaaagtctaggaaataagatgtctgctctgagatgggggtggaagatcctgtactttcacatgcctgttaaaattagagatgaaatataatcagttgatggagggcttggataaaagaaactgagacacataactg

SEQ ID NO: 195974 - DNA, 262 bp, Homo sapiens
gcatgaacatgtccaagctatcccactggaggatgaggaacatatggcccagtgattctgccccactcaacagcctatcaactgccagactcatttgaagccagaagaacctcccagctgagtccgtcctaattcagtcaaccctggcaactatcaggcatactaatgggtccaaccaagaccagaagaacttcctagacaggccaacctacactgccatcctgagaccatggccttagtaaatactcattgctttcagcca

SEQ ID NO: 195975 - DNA, 175 bp, Homo sapiens
agttcatgttagtgacagtaacaaaaagtaaggctgttttatgactagggagagattattgctgagtcagttctgcattgatatcccatctccagggagactacttccgttaggcaaaccaacttagtaaagtaaataacattttactcagcattataaccacatgtgactagta

SEQ ID NO: 195976 - DNA, 157 bp, Homo sapiens
gttcttcttcccaaggacaaatgcatagtatatctcatgtttttatagcctcctaataaaaggcagttgtatataaattctataaaaacaaagctctcatgggatttgagaggagatgaaattaagttatttctatagtcttgggctctgccattta

SEQ ID NO: 195977 - DNA, 395 bp, Homo sapiens
caaaatcccatctctacaaaaaagaaaaaagtaaaaactagccggaggtggtagtgtacacctgtagtcccagctactcaggaggctgagctgggaggatcacttgagcccagggagtttgaggctacagtgagtcgtgcaccccagcctgggcaacaaatcaagcaagaactgtctcaaacatgcaaacaacaaaatccccacaaactcttcctttccttctttcctcgtgggtcaggatgagggtagggatcttattcttcctgcacggagaagcctggggtatcttttttgggccaggctcctctgtgcaggaagagtaagacgctcttcctctccttccctgtggcatcctgacttcagctatctttcagtgagcctgacactagacatgg

SEQ ID NO: 195978 - DNA, 908 bp, Homo sapiens
  misc_feature (11)..(11): n is a, c, g, or t
  misc_feature (20)..(21): n is a, c, g, or t
  misc_feature (23)..(23): n is a, c, g, or t
tagtctagtangaggctggnntnccacccggactggctgcctttgagaccctgtccctgcctacctaatccacactgaccccattcgcccctgaacacccttcgtcctcctccaaaaccctcctactctgtctggtccccagttgtacgacatcttcccgagcctcctgaactgggtgcctgggccgcaccaacgcatcttccagaacttcaagtgcctgagagacctcatcgcccacagcgtccacgaccaccaggcctcgctagaccccagatctccccgggacttcatccactgcttcctcaccaagatggcagagaagaaggaggacccgctgagccacttccacatggataccctgctgatgaccacacataacctgctctttggcggcaccgagacggtgggcaccacgctgcgccacgccttcctggcattcatgaagtacccgaaagttcaagggcaccgtctgtgcctgggagagtcgctggcgcgcatggagctctttctgtacctcaccgccatcctgcagagcttttcgctgcagccgctgggtgcgcccgaggacatcgacctgaccccgctcagctcaggtcttggcaatttgccgcggcctttccagctgtgcctgcacccgcgctaacgccccggcccttccagattcgcctgtgagcgatgaggcccacccatgtgggttgctacgtccccttcttggtccacggtctgcctccatccctctggcagtcacgctgtcttccctgcatgctgtgcctgccggtgccttcccccatccctccaatctgtaccccgtctgcaggcaaggcagatgtggcatgtctttttgtacccacagactgtctatggcacgcctttctgggctttttgtatcatttcttagtacattgtaa

SEQ ID NO: 195979 - DNA, 504 bp, Homo sapiens
tcagcccccggagtagccaggactacaggagcatgccaccacacacagctaatttttgtatttttgtagagatggggtttctccatgttggcaaggctggtctcaaactcctggggtcaagtgacctgcctgcctcagcctcccaaagtgctgggattacaggtgtgagccactgcacctggccaatttaaatcatatttgaaacaccatccacagacacacttgataaataccttattctgaatcccatagttatgtaaaataatccttaccactcaaaatagaatagacttcttttgccctggaatcacccacttatgtggttcccattttaaaacatctagaggccagaaagggggttggggggctgaaaagaaaaaaacaaaagaatataaatgtatttttactactgaattgtacacttaaaaatggtaaagatggtaaattttatatgtacattttacctctataataaagaaataaaaattttttaaaaatttaaca

SEQ ID NO: 195980 - DNA, 273 bp, Homo sapiens
attcacccaaaggtcagaagcggtgagttctggagttctttatggtgtcctgggaatgcctttcaagtctctggctgctcacaatatttttgtgtgtgctgaactgttatctaaaacgaagtatttcctaatttcagcctactctgagaaccttcagcttttaaagagcttgctgtataaaaaacacaacaggcctctgtaattctacttcaggtgcgatctggacaccatgaagcactgcaaattctctaaggggatgcccgttaatgtcaa

SEQ ID NO: 195981 - DNA, 641 bp, Homo sapiens
tgtggaaggaagcggaagaccagaagagcatcacactgcctcaagtcccaaatttgattctgctcctgatcctgtgactcaaattgtcattctcttttactgctgtggggtgtgctctgggcccagctgacaggacattctttgtactccacgtatttatgctggtgggagttgtatggctagtgctttgtgctttgtctcagaaattgtgtggactaaatgtaatatgggcagtgaatgggtttcttctggaagatgttaggcctggagggtggtttgggtttttacgagtctttttctcagattacagattacgaatggatgttataaaacaggcgtgagccaccgcgccccgccaggaaatcctttcctactcttaacaacagatcaatagtcatctatattttcttcctaaaaaacctgatgatgtattatattcatacatacgtatttaatacatacaaaagggccaccgtgcctggcctcaggatggtgtatataatacatattctgcatttttccatctcatatattcatctctgcctcatttctttttaaatagcagttgtagttccagggctgacttaaccgtcatgcatttcgaagtcctctctatgttataacagatgctacagggattg

SEQ ID NO: 195982 - DNA, 656 bp, Homo sapiens
cttctctggattaggaatccaggaacagctttgctaggtgcctctgcctcaaggaatccacaaggctgtaatcaaggtgtcaacagggcttaggtctcatctgaagactcaactgaaggaggctatgctccaaactcactcacattgttgttggcaagattctcaagtagctgggaccacaggctagttctttgaaaagaaaaaaatggcagaccattagtaagattaaccaagaaaaggagagaagatccaaataaactcaattagcaatgaaatgggagatattacagccaataccacagaaatacaaaaagatcattcagggctactgtgaacacgtttacatgcacaagctagaaaatctagaggagatcgataaattctgggaaaaaatacaaccctcctagattaaatcaggaagaaatagaaaatctgaaaaaaaaaaaacaataacaagtagcaagattgaaacaataattttttaaattgccaacaaaaaagtccagaacgagatggattcacagctgaattttatcagacattcaaagaaaattggtatgatcttactgaaactattccaaaagatagagaaagaaggaatcctccattctatgaggccagtatcaccctaataacaaaaccagtaaaggacatta

SEQ ID NO: 195983 - DNA, 543 bp, Homo sapiens
gacctatcatagttacctcaccaattgctgccatcctttctaaaggtacctcctccaagaagccttcacagctccaactggtagagaacagaggtcaccaaggctctacctcaatcatatccataacaaatcttagcatagtgcatcttgattcatctgattggcactcaatctttcctcaacaaactaggagcttcttaacagcaagactggtgtttcacatacctgtatcccaagagtagatatagcccgatactacagtggatactcaggaaatgtaggctgactccagtgctacagggctttgccttgggccctgtcccattcatactatatcaatgactttaaaacaaccaaatctgttggtgataataaattggaagggaaagcgaccaccatcaaagacagcactgatagccagaatgatttctataagctgtctctcaaggttgaaacccataaacaaaataaaatctcatggagagttgagataggcattgcatgaagtttcaaaatgcacatacaaaacagaaaagattccaa

SEQ ID NO: 195984 - DNA, 130 bp, Homo sapiens
tgtagttcttggccctcttttcccctctcactccccacattctcttatgcattctcagcatttaaacaattatcagaaataaggcttcagttcaaaggctgataaatagggatgtgaatcccacaacttg

SEQ ID NO: 195985 - DNA, 393 bp, Homo sapiens
acaacaagtagatcagaactatatgttatcagtgtaaataatttcaaaagcatgatatcaagtgaaaagagtaaagaaattttgcgtatacagacttgcataacatgtagaagagaatcatttacataaaatttaaaatcatgtaaaacaaaactatatgtttttttatggacagatgtacatgcactacaagtacatagacatatttgttatttgagaggctgaggtggggtttcattgtgttagccaggatggtcttgatctcctgaccccatgatccgcccgtctcagcctcccaaaggactgggattacaggagtgagccactgcacccggcctacttgtcattcttaatagctcctcttcccgggcttcaaaatacaaaagctactaa

SEQ ID NO: 195986 - DNA, 258 bp, Homo sapiens
atctgtctttctctacatcagtgactaggaagtgaaaggaaatattactggtaatatctctcagcttacagaataacaccttcccttcccaacattaatcattcactgacattcagagagtttttagaaatttgcttatgggtaatctttcaataagtagaggctgaccctttcatgatttgatgtccctttgtcaccatgcacgtgattacgtgtcaacaaatgttcattacaagttgggctttctcaattagaata

SEQ ID NO: 195987 - DNA, 821 bp, Homo sapiens
aagaagggggatcttttaaagaaggcagtcacaccgccatgattgcctcttaaacaatggacagtcgctacttaccagcaaacatctggtcaatgtttagatgtttccactaatctcacaggctttttgcagctggatcaggatccaaacaagatccacatgttgcatttggttgacgtggccctaagtctcttttaatctcatacagttctccttttcccccctgaaatatatttgtgaggtaaactggttgtcttcctgggcttcctggagctaattttcctagttgcacccctaggtttaagttggcctgtgcttcctggaaatggttcgcatccaaggcttcataagattccggctcagtgtggccggaatggttactgggggtgccgtatgctgctgttggggctggaagatcctgtcgtctctcctattatgactggcttgcagcagtgtgcatcgccagcttgcagaatggtgatctgctggctctctcattccatctacattaattaactgcgatacttccagaacgagagacttcccctcaggtgtgttggggacagacaggcaggttccatgtttgctgtttcctttgatttccctgtctccagtggatgggttggtttgggagatgcttgtctaaaaatgagggaaagatgttggcttcagcaaggcctaatgttcctccagatttggatgtggctggagtctgtgaggagagtctgggtgactggagtgagagccagcagggagtgggatggggtagaggctcatgcggagggacagggagtcactagagacccagtgccggccacaca

SEQ ID NO: 195988 - DNA, 340 bp, Homo sapiens
gtcagattatccaaaccctagacttggaagagatcgatgaaattgaggaggcatacacagccctacggcacatgcagagagactccaaccccacggtcagctgcctcaccacgcagactttccatatcctggaagccaagaagaagctgctactggccaagcccccaacctcctgcttctgcaggaggaggccccaaaggcactacttctgagcctgcatccttgagtctcagatgtaggcctggccattagaccctgtgacaatggggccagattcctgggtcctgcactagaaatggaggtgtatccctgcagaatctttgtaataaaaggaaaaagt

SEQ ID NO: 195989 - DNA, 406 bp, Homo sapiens
actattacagagtattttgcatgctgtacattttaagtgaaataacattccagttttatttttaagatagaaaattgttatatatatatataatttgatactctattcttacagtttcaaattccttatcccttctttacaaaaaaaactttttttttacctgttatgatttattctatacttttttcttcttccttcccctttcccacttgccatttattacttcatgtcattgccatatgagaaagtaccaaattatatccagtttcctcctagtgatattactctgaaaaatttcacaaagccagacaagaataattactcattttttttcccaagacgaccctcaaagttaatgtgcagcaggtattccaaatggtaatttttttttttaggattccctaat

SEQ ID NO: 195990 - DNA, 553 bp, Homo sapiens
atcgatctcggcacccgtcagacgctgaactctgtgtagagtgatgtcctggtttgccggggactttcaccagttttagcactgaaagacctgtgtcctgagaaacccctcagccttggcaaagcagaatgagtagtcactcaatgttcgtccagaaatgtcacttctaagaatttatccaaaaagagtactttttttttttagacaaggtcttgctctgtcaccaggttggattgcggtgacgtgaacacagctcactgcagcctcagcaacagagtgaaaccctgtctcaaaaacaaaacgaaacaggccaggtgctatggctcacacctataatcccaggactttgggaggccaaggtggaaggatggcttgagcccaggaggctgaggctgcagtgagccaagatcacatcactgcactccagtctgggtaacagccagatcctgtctcaaaaaataaaacaaaaaaataaccctattctcataggtaaaaactgatattttaccgttatttaatggaaatcacttccgaaaagtcttcacatagttca

SEQ ID NO: 195991 - DNA, 287 bp, Homo sapiens
agcctgtactcagagaaggaatgtgagggagagcaggacatggaatgagaagccaccagggtcacagatgccttctcaggcctaggcccagctcttcatgagatcaagcttcacttcctgccctgggattccagggaatacctctgtatcctcttaatcctttttacttgagctagcggtaatagacctactcatgttaccatgaagctgtcttagacgctgaacccaaagttgctggcttaaggatgagatataatcaagcgttttctgggtattgaatggagaga

SEQ ID NO: 195992 - DNA, 356 bp, Homo sapiens
atcttccttaaactaaaaacaaaacattaagtttactatatactttattaaacttttataaaatactaaaactagaggagaatttgtagaatatgaatgccgtgataaaaatcattacacttcggcattcttcggtcaagaagccaatgttaactacgtaaacattactccttaactaatgttaactagaataaccaatcatacgagactgcaggttttaaacctctagtgtttctcccgcttattacctcaaacttatcttccttctctcttttgtgttgtcacggtatatggcaatttctgctttaaaatgtatgtatgccttaaccagccctatgcgactgcacataacaaaa

SEQ ID NO: 195993 - DNA, 527 bp, Homo sapiens
aaagagttaaaatagagtaactatgtgactcagcaactccactcctaggagtccacgccccacaagaattgacagcagtgactcaagaagatacctgtgcacacatgtttatagcagcattagtcaccttcaccaaaaggaaccaacaacacaaatacccatcaatggatgaacggatgaacacaatgtgttccagacacgctatggaatattacgcagccataaaaaggaatgaggcactgatccatgctacaacctcgatgaaccttgagtacatcatgcagagtgagagaggccagaatgccacctcttgtatgactccattgatatgaagtgtccagaacaggcaaatcgacagagacaagaagtagattaatggttgtgagccacttgaggagggggaatggggagtggctggtaatggggatggggtctccttttggggggatgaaaatcttctggagctagacagaggtaatgattgtacaacactaaatgccactgaataaaatgattaattttatgtt

SEQ ID NO: 195994 - DNA, 424 bp, Homo sapiens
gttcctcatcatggtgggaagcttcccagacaatgaatgtggacaaagcctttggagctccaagactagaacgagtccatcatcacttctatcacattctattggccaaagcaaatcacaaggccaagcgcagagtcagtgcggaaggatcttaccaaatagcatagacactcagagatgtgaaaaatcagggacaagcaaccatagtgatggagcccgaatacaaactccagagacctcactcctagaggtcttactccacagtcatctcccaagcaaatctttaattagtatctatgtcaagttccacctagcctggcactgtgaaagagcaaggtcctgctgttaaggagtttacggcctagataaggagaggagacacccaccatgaaagtttggtaacaagaaaggtaaggcaaatgta

SEQ ID NO: 195995 - DNA, 232 bp, Homo sapiens
cataaattccttgagggaaggtagatattatgtcttgattgtgtttctattttcagtgacaaaagcaagttaaataattggcataaagtcaaagtaaagatctaggctaagattccagtacaaacctgccaggaataactgcactcattctccctacaccatactgctgtcaggtgcaacgcttacattactctaacttcagtgatggttatgtgtttacttcatatgatgg

SEQ ID NO: 195996 - DNA, 545 bp, Homo sapiens
aaatgcaagaaacacatatttgacttatccatttactttagccaaacagtctccttatttttaaatgtctgtgtatactactttgacctgcatcttaagaaacatatcaaaagtagctgacaaattctaccaccatatggttcatttctcttttctttgttcctttttacttctcactgtagcagtgtctgcagaggggagatgtttagagaactctccagataatttggaaaaggaagtagctaggggctcaaattttgtagagtgactctctcctctgtttgaatctgctagataatttcctgtttcattttgtctgagcaaaaaacaagcctcctttatgcaaaacagtttactgcagggaaagaataaatttgctggattaaataatttattctctttagtttacaacctgagttggatgagataaaatctagaaaatctacaagcaaaataaccacattttgaaatgttgccttcttttgttcacaggagctaaatgtgcctcttctttattagccaaaggcacaagaactaaatacaaa

SEQ ID NO: 195997 - DNA, 276 bp, Homo sapiens
ctctatcttttcctggtcctgattttcagaactgcctgggcctgacccaggatacccacagctgccacttctcttggaggatctagtgattatcaacccctgggtcactcctcccagaggacagcttaaggtgtaggggtggggcctctcacgggagcagctgtatgccctgaggtgggaggagtctcccggtatccccttcctctgaaaagtttaccctttgggacgctcagcttttcttcctcaaccccagtttccgttccttagggacacatt

SEQ ID NO: 195998 - DNA, 446 bp, Homo sapiens
gaatgtgtggtgtgtggtgggaagccccagccttaagagtcaggcaggctcagggtccaggccctgctccccattcccaggctctatgacctcaggcaaattattcttctctccagggcttagtcttctcatctgcaagatggggataatcatgcctacttcataaaattgttgggaggattaaatgagggaacctatgtaaggcatacctggaatttagtaagtagtcattggcgctgctatcgtaataggagggagtctgctttgagtaatccagtgccttctgaaagtttctccctaattgttgcccctcagccaaggtgctcagagcgtttaggtagctgatgttgttttaggcatgtagtgcatgtaagtgctggtgccaccctgtcgcttttgaagcctgctcctgagtgtcctggagctcctgtgtcatgtttgctctt

SEQ ID NO: 195999 - DNA, 418 bp, Homo sapiens
ccttagaagtagatcaaatttgtattttaaaagcaaaaggatttcatattaaacctatctgtaagtctgtctgttttggaaagtaaaagaaaaactattttaaaattctaatagcatagaacatggaactaattctactttgtattcctctagaagtggtacccaaccttggcatcaggaactagttttgtgaatgacaatttttccacagatgtgggttggggagtggggccggatgaaactgttctacctcacatcatcatcaggaattagatgctcataaagagcacacaacctagatacctcagaagcgcagttcacaatagggtccgcactcctatgggaatctaatgccgctgctgatctgacaagaggtggatttcaggcagtaatgctagcttgccagtgtgtcgctcac

SEQ ID NO: 196000 - DNA, 308 bp, Homo sapiens
accaggtgcccacttaactttgaaaaagatatttgttggtggcattaaagaagacactgaagaacatcaactaagagattattttgaatagtatggaaaaattgaagtaattgaaatcatgaccgactgaggcagtggtaagaaaagggattttgcctttgtaacctttgacaaccatgactccatggataagactgtcattcagaaataccatagtgtgaatgaccacaactgtgaagttaggaaagccctgtcaaagcaagagttggccattgcctcatccagccagaggtggaagtggttctgga

SEQ ID NO: 196001 - DNA, 494 bp, Homo sapiens
taggtatttcttattccaaagatactgtcttggcctagaaaacacataaaccacagatgatacattgggatatagggtacattttatctaatgataggctgacgttggtttcagtttgtaatctatgagtgcacataaaatactgctagaaggcaatggccacagagttgtgctcaggacatgtgcaattctgaagttaaaattactgtgaataatttgcctatggtcaataaaagctaataaatgctagttttctttttacaaattaaattcatagaactattgctctcaaactttgatatattgtattatttttccactgtattatttcagagatgtgttcccatagaaaaggagtaactatatcaccaattttaaacatctctacttaaattttaattttaatatgtacttcagggtgcattcattcattaagcagatattgatggaatgtctattctgtgccagtcactgtttttcatgctggggatata

SEQ ID NO: 196002 - DNA, 572 bp, Homo sapiens
aagctcacagcaaagagaagggtcctgaaagcaagttgccagttgcccccttcacagttgaatacaagggtgtaaggcacgaatttctggtggctccaccccatccttccagtgtgcctgtgggcccttggtctgagccactccatattaatttatatcccttgctgtgcatatgttacggaatggaattttccacgtggacatgtttaggcaatccccctttgcaagttcccttatctgcacaaagcatctcatgctgtggagccagtggcagattctccggggacccttcccttactgtctgcctaaagcaaactggctaaattctttcacaagtttttctttttcttttttttctttttctttctttttttttttccaatttgcattagaaagcttttattgagacaaggtaaacagtgggctgaaaatattacaggctgaaggaaggctgaggaaaccagtatgaaggctgctcaaatgatgaactaaatacattccaaaggtactatttatacttaaggcagttttaaaagtgaggtcttaaccaaaaatcctttacatggcattca

SEQ ID NO: 196003 - DNA, 1028 bp, Homo sapiens
ggatcctggaaccaaaaaagaaccttaggtaaaaactaacaaaatccaaataaatgaattttagttagtagtaatgtaccaacattggttccttaacggtgacaaatttaacattgaaatgtcagacactggcaacatgacgagacccccatttcttacaaaaaaaaaaaaataggggaaactgggtgcaaggtataccttaactccctgtaacttttctgtaaatctaaacatattttataagaaaacatttattcaaattaaataaaaatatggggaagttgttgccttaaccaatctgattttagtcctttaaggcatgtatagtgggttggacaaaaacagaaatacaggtagtattgtgcaaaataatctcaacattgatgaaccatttataatactgtatgtgtaagtgcctataagtcatttttttatgtgcacattttgattccttaattggtaagaactacaggagcagaaagccctcctccaagcaggaggaggccactcaaatttgggactaaagcaaaactgtggtactaattatattaataaaaattccacctgggccgggcaatggtgtctcatgcctgtaatcccagcactttgggagcctgaggcgggcagatcactttaggtcaggagtttaagaccagcctgaccaagatggtgaaaccccacctctaacaaaaaatacaaaaattagcaaggcatggtggtgtatgcctgtagtcccagctacttgggaattgcttgaacctgggaggcggaggttgcagtgagccaccactgcactccagcctgggtgacagaacgagactctgtctcaaaaaaaaaaaaatccacatggcttttgtagtggtaaatattttttttgtttctaaatgaaagccgaaatacaaagatcagaaatttataaaggctgggcatggtggctcacgattataattccagcactttggggggccaaggcaggcacatagtttgagaccagcctgggcaacatggcaaaacctagtctctacaag

SEQ ID NO: 196004 - DNA, 243 bp, Homo sapiens
ggtttacctggggaaggtggcatgaagtaagggcatgagattggagggccacatcacctacggcctgatccagatttgtttcttagcctgaagtacgggattccttagaagggagcaggtgcacaaggcaggcagattggtgtttttgaaaggtaccctggctgctttttggagactgaattggaaaggtgtattaataaatcaggtttctgggtgtctcttgctgtgttgggtgagactggg

SEQ ID NO: 196005 - DNA, 447 bp, Homo sapiens
gccgtattacatagtagtaatggcttgctaactgtgaatatactaaacaacacgaattgtatatacttgaaaagggtaaatgtgccgggcacggtggctcatgctgtaatcccagctctatggaggctgaggtgggagaatcacctgaggtcaggagtttcagaccagcctgggcaacaagagcaaaactccgtctcaaattaaaaaaaaaaaggatgcttttatatattttgtgtatcatgaattctcttatagcagaatatataatttaagaccatcacctcaaaacaaaacaaaaacaccagattacttttgtgtaggcagagtttgttatacacaattgcaaaattctgttttcttagaaggcactattatatgtacacttaggtgtttagaaacctggagaaaacctcaaattttcatgaaaacagaaacttagcactatat

SEQ ID NO: 196006 - DNA, 443 bp, Homo sapiens
agggggttctaatgcatagggagagggtagtttcatctccagtaacagtgtagtaatagcagagaataaaagtagccctgtccaattaagtgtaatgtgagccacaaagacaatgtaaattttctagtagccacattaaaaagtaaaacacgccaggcatggtggctcacacctgtaatctcagcactttgggaggccaaggtggatggatcacttgaggtcaggagttggagactagtctggccaaaatgatgaaaccccgcctctactaaaaatacaaaattagccaggcatggtggcaggtgcctgtagtcccagctacccgggaggctgaggtaggagaatcgcttgaacctaggagatggaggctgcagtgagcggagatcatgccactgcactctgttgcctgggcaacagagccagactgtctcaaaaaaaaaaaa

SEQ ID NO: 196007 - DNA, 369 bp, Homo sapiens
tagctagggggtcatttggacttgaaaaggaggcatggtttctgagtcttggctcaaggcaaggatggtgtagacccctatatgttataatgacattcacattgataataattgcagttaagataatggtgaaatacgtactggatccattcaaggcattgtacacaatgaggcaccatagagtttagatactcctgttaatttcaggtactgatagtggatagagctaatctgagagccaggaacatatagaatcttctaagaaaataattaatagtctaaaaatgtgagccaggctactgaaagttaggaagtcaaaagtagtcatgcataaggcaagaccaaaatcagattacttgcttagtaatg

SEQ ID NO: 196008 - DNA, 454 bp, Homo sapiens
tagctgagattacaggcatgtgccaccaggcctggttagtttttgtatttttagtagagacggggtttcaccatgttggccaggctctgcctcgtgggttcaagcaattcctgtgtctcagcctcccgagtagctgggattacaggtgtgcaccaccaagcctggctaatttttgtatttttagtagagacaggttttcaccatgtcggccgggctgatctcaaactgctggcatcaagtaatccgcctgcctcggcctccaaaagtgctgggatgactgctgtgagccaccacactggccaacatctacagacatttctaattgtctttaagttcagaggatgctgccgaacattgacacatcgttaccactcaaagtccatcgtttacattagcattcactggtggtgttgtacatagatgcatccaccattacaatatcagatagactcat

SEQ ID NO: 196009 - DNA, 129 bp, Homo sapiens
cactccccatccctgcttttaaaaacagattcaggctttccaaacaaagtcatctgtaaaccttgccatggaccaacagaagaaattaacagtgactccaggctagacaaggtggttcacgcctgtaat

SEQ ID NO: 196010 - DNA, 282 bp, Homo sapiens
ataaaattattgtggagaacgaaaggtgttgcttctttaaaaccaaatctacctttatctattcttttatgtgttaataaagttgaaatacttgatactgcataaccttctgcagtatcttttgtccttttcctccatgagaaatcagtttccttgcatcagaataagtcaaaattccctctctgtacgtgccgcaaacaagaaatagtagtagtattatcaaagagttcttgcacatgaatacaggtatatttcttaaactgacatcaaaaattgccctcc

SEQ ID NO: 196011 - DNA, 202 bp, Homo sapiens
agcagcacacttgcaattatactcaggtatatccactatctccaagaagcctgggtttatgaacagaggagaagagaagacaacagagaaagtgcctactgcctctgaaattctgaccagggatgtgttctttcactagtttacttatactaagaactctatcaggtgccaactgaggtattcccaactcatcacctaaaaa

SEQ ID NO: 196012 - DNA, 498 bp, Homo sapiens
tgggattacagatgtgagccaccgcgcccggcaataacagttcttttcaaagggtaaggtttgaatccaggtcttagaacagtgcctggcatataactaaataagggttatctctgattattattcctcaagctcagtttggtgaaccagatagatccacaaatgaataattatacaaacagtgaaatgcagttgagacaaatgcttctaagaactatagagtcctgagagggcataggaaggaggctgggggatgacctggcctggagagggcgttgggtcttttgggaagggatgtttgccatgagaatgggtaggaactggcctggcaaaatggagcaggaggaagagtattcccagccaagggagcaacacagggcaaggctatggccagggaaggggtcccagaggtttgagaggggtacggaaggtttagcaagggccaaggagtgtgggctttgttatagggacactggggaggcacagagaggggttaag

SEQ ID NO: 196013 - DNA, 321 bp, Homo sapiens
tgatcttcttttagatgtctttctttacacccccaaggtgcaggaaaatagctgtaagctgagggtaatatgcttttccttttaatatgttattcttatatcaagaccattctcttggccgggcacggtggttcatgcctgtaaccccagcactttgtggggctgaggcaggtggatcacatgaggccaagagttagagaccagcctggccagcatggtgaaacccagtctctacttcaaaaacaaacaaaaacctgggcatggtggtgcatgcctgtaatcccagctacttgggaggctgaggtacgagaatcacttgaa

SEQ ID NO: 196014 - DNA, 342 bp, Homo sapiens
ggaggatgtagaagggaacttctgtctagctgttgctagatgacctgtctcacacggtagcccattccatcattaggaagtgccgacaatcagaatattccccacaccctcttccctctggccatagatctgttcttgagtgacacgcagagcaaatctaaatttctttttctcatgatgacctttcaaataattaaagcagatcctatgttcccgttcaatatttcctgctctaggctacatctcccctgattccttcaactgttctcagatgatgtaatttaagatttatatttaccactgttcacagaaatagaaagtttcaatgatcctttatcagtg

SEQ ID NO: 196015 - DNA, 415 bp, Homo sapiens
agaagaaatgtaaaagcagagatgtgaacaagagatagagtgcatctttgttgcttgggtgctccccctgttgtccaatggcagaagctccacgtcttcctctgagggctgaatctggttctacttgtgcccattggatcctcttattgatgagggttacaaaggccgagattggcctgccagagagacccacagcacctcttcagacttactaccttctttcctttccttcttttgacaaatatgtattgagcactcctagtccaggaattgtaccaaatgcccagaatataaatgaacaagacatggtcctcaaccaccaccctagagacaggcataaaaagaactgacagtaacaagcccctaatttcatgtagtaaattatatctaataaagtgccttcgcttttcatgga

SEQ ID NO: 196016 - DNA, 145 bp, Homo sapiens
tatgcatgccactcactctttttctcctttattttcttcatgtaatcctacctgaagttatattatttgttaattgcttattttttaccataggactttgtccagtctaccactgcaaccccatcacccacatagaaagtgtgta

SEQ ID NO: 196017 - DNA, 816 bp, Homo sapiens
gagccgttcctgccacgagcttctagtgcatgttctattctgaaaaagatgagaattaaccagctacagtgcaagatgtcatgaaatgagctgtgttcagaatctaggcacgtgtgactttgacatatctatgaggtttaaaaaagaaatatcaggaatacaagtagaatatgtgccatatgaagaaatcatagcttatttatgtaacatttagtatcctcattagctgtttgactggttttagaattcagcatataatccttggctctttggaaataaaattgtataaatactaatatttattagatctgaatggtaggtacatgggtgttaaactagtctctgtgcttttgtgtgttttttttaattaaactagtgactttaattaaactagtgatttatgactgcctaggaatgtggccattcatatcataccttttcatccatttcttaggttcccagtctaagtgggtgactttccaagatagaggcagatcatttctccgtcaagtatagagagacacatctgctcctcctagagtgtccataagtatgaagaaaatagaaataacttagaagaggctgcaaaaacattaaagtttgaaatttttttgggtggggaataacattttgatggcaatttaatagtgattttcatgtgtgtcttgataatgtcaaaggtaataaccaggtgttttggcagggcaagttttggggatcagggaaacactcatatttgctaagtacctattatgccataaactgtactgaaagctttttatctgttacctcattttaatctgtagtcaatttatg

SEQ ID NO: 196018 - DNA, 400 bp, Homo sapiens
ttaaaaataattgtcagggcatagggccctgagtgcctgtggggggcacctacatgtaccccataacccttccatggggaaattccatagccagccagagattggtattttaatagcaattcctcaagatgctgtataaaaaagaccacagaaacagtttttttccgtatgtcccagcatgcctttgtgtacggtctgtagtattgtaaactccccaaaatcaaaatgtgcatgaacaggggattcgagagagaagcaggtgtagctctgggaggggatatggaatagtcgccccagcgcagggacttctttttgtttttgttttttgtttttttttttttactgtatcaatgtagactggaaacaatgtcagaaggagaaagcaagtagcagaaggatg

SEQ ID NO: 196019 - DNA, 623 bp, Homo sapiens
actggagtgcagtggcacaatctgggctcactgcaacctctgactccctagttcaagagattctcctgcctcagccgcctgagtagctgggattacaggcacgtgccaccacgcccagctaattattgtatttacagtaaagacggggtttcaccatgttggccaggatggtctcgatctcctgacctcgtgatctgcctgcctcggcctcccaaagtgctgggattacaagtgtgagccaccgcacccggccttggctctgtttttaaaaagaaatacctggtaagtcagattccaacccactaattgcccgcttgtgattgctgctttgctgccactgccccagaaaccatttggaaaaatcctcatgctttttgaaaataccggttttctgaagagatggagcaagctctggaaggcaggaaaggcagatttctcaccaggagcaattttgttttggttccccttttctactcctgaagttccttcacttagaacaccttgatgtagacgtgggggcatagtaggaagtggacagaggatcaaggtctccaggtcttgaaaattttatgtttatcaaaagagaatattggttaaaataaaagattaaattggtgaaaata

SEQ ID NO: 196020 - DNA, 269 bp, Homo sapiens
agtgatgggttaatctgtgcagcaaaccaccacagcacacatctagagtttctgattgaattcattattggagtggtctgaaagtcagaatttttaaggcttcttaaataattctaatatatatcctgagttgagaaccataaataaaatcaggtgcagttcttatcaaaaaaaaaaaactgcagtaattatgagagatcccatatccaaggtaaatgggtggatttgtatttgaattgaattagagaagggtcagctgtgaacccacc

SEQ ID NO: 196021 - DNA, 247 bp, Homo sapiens
gtgctgggattacagacatgagccaccgcgccctgctgacctcttaactctttagaacagagttctaaacttcctgactctgaagttatctttccatttcatcctcaaagatacccaaaggaccttttagcatactggtgattgagacaaaagaatttccaaacctggagacaaatcccaactcttgcttcctgattctcttttctatactgtcttctcaggtcatcctttccccatggctgcataa

SEQ ID NO: 196022 - DNA, 360 bp, Homo sapiens
agcatttctcatttggaattttactaacaaattaataataatgactttgactatggggatgcttaagaaaatctcccagtccttggaggtatcctgggagaagatagaaacaactctgagaatcagaacatctgggaggattctgcagatggatcccagggacagcccaacaatcagagggccctccttcaaagcaagtgctgcctccagcctggggcagacccatccctctctgtgtcatttgttttcccaaacattcccttcttaaactggggttcatgaagtctatagatggaattccagagggtttatgaacttggagaataactggatctttattatcacaggcttctagccgaa

SEQ ID NO: 196023 - DNA, 517 bp, Homo sapiens
taagaagtagatgatgtgactatcaattgtgtacaggatagaatgttaggaaacttttgattctattcctgccttttattttgcagcaggaatttggcaatgtgtgtgctccctctgttgttgagtttcttgagtgtcttcatgaaatagatgcaaaatatcagctaatggccacaatagattttcactaaaaggctacacgaaattattaattctgtttgtgctgtaaaatgtgaattacagtcatgcatcacttaacaatgggaatacatttagagaaatgcatccttaggtgatttcatccttgtagaaatatcagagtgtatttacacaaacctaggtggtagagcctgctatatacctaggctatatggtatatagcccattgcccctaggctataaacccatacagcatgttactctactgaatactgtaggcagttgtaacacaatggtatttgtgtatctaaacgtgcctaacaaagaaaaactacagtaaaaatacagcataaaagat

SEQ ID NO: 196024 - DNA, 489 bp, Homo sapiens
atacgaataattgatttgatctgtttaatactgagaaagaattggagagtgttgtcctcagtagaagcttagaaagcttctaaagaaggagaggctggatgaattccccaagatgacatactaaaaaatagaaccaggctgggatggaagggctcctgactcctccttcagtgctctatgctaaacaaaaccttccttttcgcctttccacatgaagcccacatctgagaccacaaaagcgtccctctcaaaaaggtgtggaattgttgtgaaagctgtgcctggaggacaagggctgcgcctgactgttcactgcaggattctttctcttgtgcctccacagtaggcaagcaggactgatgttccgttgtcccgaggctgacacggcttccctctcccagcctgaaagcatccaaatgggtcacactggcttcactaatagtgaccatgttattaaaattccaggcagaatccaaagtgcaagattaa

SEQ ID NO: 196025 - DNA, 1215 bp, Homo sapiens
gcgccatgtcctgcttggccggctggagggcggcctccagctcggacagcttggcgttggcacccttaactgccagctcctcaggctgctcggcatctgtgatggcggcctccagggaagccctctggcctttgaggcactcagtctcagcctggagcccactgatgttccagtttatctcggaggtctcagtctttgtatgctgcacgtcatcccagtgcctcccagccagcgcctgcagcttctcatacttgatctggtacatgctctcagcctcagcccgcctgcggttggcgatctcgtactgcgccttgacctcagcgatgatgctgtccgtgtccatggagcggctgttgtccatggacagcaccacagacgtggcggagatctgggactgcagctcccggatcttctcttcatacagccgcctgaggaagttgatctcgtcagtcagcccttccaggccagactccagctctaacttgttcatgtaagcttcatccacatccttcttgatgaggacaaattgattctccatctctgtacgcttattgatctcatcctcgtacttgttcttgaagtcctccaccagcccctgcgtgttgccaagctccgtctccagcttcagcttctcctggcccagagtctccagctgcgcctaaggttgttgatgtagctctggaacatgttgtccgtgttgctcccagccgtctgctgctgctgcaggaggctccacttcgtctcctgaatcttgttctgctgccccaggaaccgcaccttgtcgatgaaggaggcaaacttgttggtggggttcttgatctgctccttctcctgggtgcgcatggcctggatgttgagatccacctcctaagggggctcagcagactctggttgactgtgacagcagtgatgcctcccatgccgctggtcccaccatagcctctgcccaggccagcccagaagctgctgctgcccagtagggagaagctctaagagctgatgcaggcactgggcccactcgtataggagcggcatagcagcatttttacaataatccagtaaccctgttgttcatcaatagcataattgagaaatatattgtgatatatttatacgatggaaactattcagcaatgggaatgactgaactacagcactatgaatcttatagattgagtatacgaagcaagatacaaattactccatttatataaa

SEQ ID NO: 196026 - DNA, 888 bp, Homo sapiens
gcgccatgtcctgcttggccggctggagggcggcctccagctcggacagcttggcgttggcacccttaactgccagctcctcaggctgctcggcatctgtgatggcggcctccagggaagccctctggcctttgaggcactcagtctcagcctggagcccactgatgttccagtttatctcggaggtctcagtctttgtatgctgcacgtcatcccagtgcctcccagccagcgcctgcagcttctcatacttgatctggtacatgctctcagcctcagcccgcctgcggttggcgatctcgtactgcgccttgacctcagcgatgatgctgtccgtgtccatggagcggctgttgtccatggacagcaccacagacgtggcggagatctgggactgcagctcccggatcttctcttcatacagccgcctgaggaagttgatctcgtcagtcagcccttccaggccagactccagctctaacttgttcatgtaagcttcatccacatccttcttgatgaggacaaattgattctccatctctgtacgcttattgatctcatcctcgtacttgttcttgaagtcctccaccagcccctgcgtgttgccaagctccgtctccagcttcagcttctcctggcccagagtctccagctgcgcctaaggttgttgatgtagctctggaacatgttgtccgtgttgctcccagccgtctgctgctgctgcaggaggctccacttcgtctcctgaatcttgttctgctgccccaggaaccgcaccttgtcgatgaaggaggcaaacttgttggtggggttcttgatctgctccttctcctgggtgcgcatggcctggatgttgagaacccgcgttcatcacaataccattaacat

SEQ ID NO: 196027 - DNA, 319 bp, Homo sapiens
agatgacttagcctttcaggacaataagaaatttacagtttaaaaagtgacagaaatagggttagacataagtttttaaatgccaggacatcacaatgagaactggcaaaaaccatgatatggaggaatgggtggcatctgctctgaagatctgacaactactatctgttttatcctacaaggaaatggaggacaatttgattcttaaagttccttcccacttggtgcttcaaataacactgccatgactcataaccatttggatatttaaattggaattgtcttttgagccaataaaagttatggaagaaatctgcct

SEQ ID NO: 196028 - DNA, 467 bp, Homo sapiens
cgatgaaagaactgaggctgaaattattattgacatgagctaatctcactctcttgtttcagaatatatacagccctgctctgggacacacctccattggatttaaaagacagtcctcgtcagcactgactttcagctatggaatcggtaaatactcactgcattctctatcaatttatgtttttgtcattgatttgtaaaaataagtatcaaaataatgcgtgagtgtccaggttggttttcttggacttgatagagttttgtcgaaatgttgtgaattttgttctggatttcacttagagtgtattcagagtggtaacaggtaagcatttttggattaatgaatgggatccttggtgtcacagtgagaagaaatctgctgaaaaattaaataggttgttaatagcctataaaagaagtttatttcctcttgtcctcctttaattttcttcatcctcagatggtct

SEQ ID NO: 196029 - DNA, 894 bp, Homo sapiens
ggggaggcgccgccgccgagcccgcggccagacgccccatcagtagcgtccgcaccgggagccgcggctctcgcccgagccgtgggcgcgcccgaggggcgggctcgcctcccgccgtccctcgcagctctgccgggcccgagcccgcgccgccgccgccgccgccttgccgctcgggccgcgcggcccgggaaacgcggccgcgggctgcatgggcagcgcccgcgccccgccgctgagccgtcgcggagccgcgcagccctcggagcacgaatatatacagccctgctctgggacacacctccattggatttaaaagacagtcctcgtcagcactgactttcagctatggaatcgcagaacggtgatgatgaaggcgccggcgggtaaatgaagatcgggtgaggagcagggacggatgcccaaggggtgggtggcctaaaagcagccaccagcagggaagagcttccccttcagcagcgaccatggtgggaagaagcagactggggaaaaacaggctaccgataaaaagtttctctaaccaaaagaccccaaaaactggagcgtggccgattggccgggaaggagcgtgagggaagcgagggcagcaagcggaaacgctgccccatacaaccggggggggcgccaaatggggcgacgcaagaaagggacttccggaacaccagagaaagcaggggccctgcagccggaaacaggatacaacgaaacacggctggtatcccgggaaaggccggggacgcgctgtaggaacatgggggcatgcatggactacagcagcaggtacccacctatccgaccgcccagagggggggcctctcatgcaaatacaggcgacgaactgcaacagcacgtgacagaaaacaaacaacctcc

SEQ ID NO: 196030 - DNA, 520 bp, Homo sapiens
ggggaggcgccgccgccgagcccgcggccagacgccccatcagtagcgtccgcaccgggagccgcggctctcgcccgagccgtgggcgcgcccgaggggcgggctcgcctcccgccgtccctcgcagctctgccgggcccgagcccgcgccgccgccgccgccgccttgccgctcgggccgcgcggcccgggaaacgcggccgcgggctgcatgggcagcgcccgcgccccgccgctgagccgtcgcggagccgcgcagccctcggagcacgaatatatacagccctgctctgggacacacctccattggatttaaaagacagtcctcgtcagcactgactttcagctatggaatcggagtggaaggtctccctgagcctgtgtcctttgctggcagtcccactgccctcagagcggcattctcccagcaggatgggcctcagtgctgcctgcagagccttctggtgatgcggatgttcctctgctgattctgtagcatcataaccaaagaagaaaacac

SEQ ID NO: 196031 - DNA, 677 bp, Homo sapiens
ggggaggcgccgccgccgagcccgcggccagacgccccatcagtagcgtccgcaccgggagccgcggctctcgcccgagccgtgggcgcgcccgaggggcgggctcgcctcccgccgtccctcgcagctctgccgggcccgagcccgcgccgccgccgccgccgccttgccgctcgggccgcgcggcccgggaaacgcggccgcgggctgcatgggcagcgcccgcgccccgccgctgagccgtcgcggagccgcgcagccctcggagcacgaatatatacagccctgctctgggacacacctccattggatttaaaagacagtcctcgtcagcactgactttcagctatggaatcggtaaatactcactgcattctctatcaatttatgtttttgtcattgatttgtaaaaataagtatcaaaataatgcgtgagtgtccaggttggttttcttggacttgatagagttttgtcgaaatgttgtgaattttgttctggatttcacttagagtgtattcagagtggtaacaggtaagcatttttggattaatgaatgggatccttggtgtcacagtgagaagaaatctgctgaaaaattaaataggttgttaatagcctataaaagaagtttatttcctcttgtcctcctttaattttcttcatcctcagatggtct

SEQ ID NO: 196032 - DNA, 638 bp, Homo sapiens
ggggaggcgccgccgccgagcccgcggccagacgccccatcagtagcgtccgcaccgggagccgcggctctcgcccgagccgtgggcgcgcccgaggggcgggctcgcctcccgccgtccctcgcagctctgccgggcccgagcccgcgccgccgccgccgccgccttgccgctcgggccgcgcggcccgggaaacgcggccgcgggctgcatgggcagcgcccgcgccccgccgctgagccgtcgcggagccgcgcagccctcggagcacgaatatatacagccctgctctgggacacacctccattggatttaaaagacagtcctcgtcagcactgactttcagctatggaatcgggcatccctcagaagggctttatttgaaccccggtgatatgcagcgggagaagagttctttatgacagcgacaatggggacagaggaacggtgactggaagattctttccttgcagtgaacgcacgtactgtgggtgctgtgccttcctcggggtgtatgtaggtaggcaggcacacaccagtcagcttgcattctgtgggtgatactctctgaggtggactgggtcacccgggagcttccggggtccgtaaacggggaccactgatgaacgagtggtgca

SEQ ID NO: 196033 - DNA, 476 bp, Homo sapiens
gcatgggtagtagaaaatatgacaactgagtccagtttgggagtgaagaaatcacatggattagtgatgacgacacttactctgccactggaaatgagcacaaataagtcttagtatgaggcagttaagagagaaacaaagataggtgggaaaactgaccttgatcacccagccccagccagatacccctctgtgaaccttatcatatttatcaaatagtggaggctctgaaggaggaagcttggatggcttgaatccattcaatttgaggtagtttttttttttttaatagaaaaggttgttgcagcaggcagctgttgtcattcatgctgagaacttgaaagaatgatttattagagtggtggaatggaatgagcaatggaatgggaattgtgagatgtgagatcttgtcttgattctgccagagcttcatagatgggtcactgatgatctctctctgtctcagttttctcatg

SEQ ID NO: 196034 - DNA, 397 bp, Homo sapiens
atttgcttcttttgatccaggcgtgtaagagacagtaagagaaatttagtcttgggaatcactattttaaacaaaggccaaaaacagtggtgtctatttttaaagcctcctcatttctccccagaaccaagtgcaaggtaatttgaattcggtttccagtcaatatggttaacctgatttcactctacaatttagcagtctgttctttatacttgatttctatgatattaagtgcatgcaacatttccttcccttttaacccggtttccacttacagttttctgtgtatttgagatctgtttggtggcctgcctgaactcatggaaaattgacgacactgaaagagaattgttgtagttaagcttccctgatggcattttttaaaaaacaacagtgg

SEQ ID NO: 196035 - DNA, 433 bp, Homo sapiens
ctttttaatgtaaccactcaccaacagacatgaaatcagtaagtcaatcattaacggtctccaaatacttatagattgaatcaaaaacgataaataccacataacaatacctgtctagaactttgactaaatgctttatattttcacccatgtcttttcatcagaagtgtatttatatgacactatctactaattgggatatttttattcttcttaagatcagttcttctttctgcatatagggctgcctttgatagtaaagggcctctccccagcagaagtgtataatagtttgagcctcttcatcctgggaattgcaagtgtttgttcattttaacatttgcttttcataaagtttgctggttcaaactgttttcaactgtgttagccctgcaacacagttcacctaggtcactgctattgctgtaaactt

SEQ ID NO: 196036 - DNA, 347 bp, Homo sapiens
atgttctgggaatagcagaagtatgtgttctgaatacaagtgatgggatatgaatgggagaagaggtagaagattaggttgcaaaaatacattggtgctagattgctggggcctacaagcaccatgctaaggagtgggtccactatcctgtagctctgaggctctcaactctggatacacattaaaatctcctgagaagctttaaaacaaaatgctgacggcctgttatttgttagcaataataattgggtccaggcatcagcagtttttaaaaacttcccatgtagcaattctaacctgtgggcaagaaccactcctgtgggcaacagggagtcaacaccactgca

SEQ ID NO: 196037 - DNA, 354 bp, Homo sapiens
ttggaagtgtgaagttttgagaatcctgtgagacatcaagtgcagatgtcagaagccaacttcagatgtggaaatctggaactcccaggagagatttggcctagaaacagaaacgtgggagttttcagttttaaaagccatggagagatgtatggaatccttaggagagagtatagagaaaaaagaaaaggaaaaaggattctttgtgcattataattgggcaaaagattgtatataaatacatttgggttagaagttttgaagatgacagacttgtgtgatagcttcctttttttagtgaaataagaggaaaagcccagaatgagtgggtgcagcatatttggagaatgtgga

SEQ ID NO: 196038 - DNA, 360 bp, Homo sapiens
gaaaagttgagtgatgtggtgaatgaagtgttggctttttgccagagatgcaggtttcaatctgacctatagttctagacaatatgaatagtcttagcccggtccctagggtcagtggtctatggcagataaacctttgaatgtaattcaacacagtaggcagtcctgtgaggttgaaagctgggactgtgtttgcaaagaggattaaatacttccccacttagacagggagagagaaagagcgagaaactttcttgctaagacttcaattcattggaaacattcacacctgagttctttgtacctgttacagagaagcaatggtgcccattttcaaagccaagctaaaaatgtctataa

SEQ ID NO: 196039 - DNA, 359 bp, Homo sapiens
ttttattctttgtagagacaataaagcatatacactctggcatcagactgccaggttccaagcctgacaaaaaattattaatttatgcctatgaacttgggcatgttatttagtctttctgtgtctcagtttttctgcctataaaatggtaaaacaaagttagagttatcatgaggattacatgaggtaatatacgtataaagtacttagtgtgtggagttcaatattagtaatattattctacatgtattttttctgtataaaacatacagaaatgtaagtaaattttaaatgtgagtaaattttaatatttcttgtaacttaaggcttgcagaattttctggcatctctaagagaat

SEQ ID NO: 196040 - DNA, 245 bp, Homo sapiens
actaccagctttccaccactcctacctcatccatcagaaaacagagccaccagccttccagggtagggttcatcaagccttttcctccccatggaactaagctgtacacagtagtcagagataaataatgtctaagccaaaccggcttgagggcacatatggaggtggggggcagagggacactggcctgggacctaaaccaccattcagacctcatctttacaaaatagtatactccacattcc

SEQ ID NO: 196041 - DNA, 834 bp, Homo sapiens
tacatattcccagggtacatgtgatgttttggtacatgtatacaatgtaatgatcaagttagggtaactggaatatctatcacttcaaacatttatcttttcttatgttagaaatattacaattctcatctagctattttgaaacataaaataaatagtcatataatttctctactgtactacagactactagaatcgattccctctgatatttcctgaaaggaaaataaaactcaaagaatgatttcatcttcccttcccctagcttatttttctcctttatctgtgcttcttttcttgagtggatcattttactatcagactatctgtgaaagtaattatacttctctggatatttgacaaaggaaaggtattaagggtaggaataacctataaaatagaaaccatttctgacaacatgaaaaagggctgaggaaggaatggagagaatgtggagcccagtgattcagcgagagatatacattttccaagagacaggaagtaaaaaagttaaaacaaagagtctacaaaagaggagatctgtagaaaaggcaaaaatggtggaaagggggctcaaggggtggaggaaagagattttgaaatattttcaagtaaaaatatgagaatattagacaacaaacaatataaaataaaaaagagaataagaatcagatttcagacacagtagactgaagagctggtggaattactaacagcaaaagagaacagagaagagagtctgaaagatgagtagctttctttttgtaatgctgggtttaaggtggcagtgaggttctcactagtggaaagggtgtaagagctttaagaggtaaa

SEQ ID NO: 196042 - DNA, 354 bp, Homo sapiens
tcctgtctgagatggccctggtgaactccatgtaccagtactccctgattgccttcttagaggtcttcaggctgtcactgaagaagtcgctgcctgattccatcctcatgaaacgcctgaggaacatcatggacacgctgaccttcagcatctataaccacggctgcacagggctgtttgagaggcacaagctactcttttcttttaatatgaccatcaagatagaacaagcagaagggagagtccctcaagaagaactagatttctttttaaaaggaaacatttccctggagaaaagcaaaagaaaaaagccctgcgcttggttgtctgaccaaggatgggaagatatcattc

SEQ ID NO: 196043 - DNA, 361 bp, Homo sapiens
ggaggttgagattctggtggaaggaactcatatttgaacctgggggctgttccctcccagctgtgcagtgctgggggagaccagctgtgctgagctcaagttcttcctctacatgggagaacctcaggcttcagggctgtggcagggctcggaaataacaacctaaagacctcacgcctggcccagcaggtgagctgtcctgcaaaacagttgctttgaaattagaggctgggcctgctagcttgcacctgaactcccagcactttgggaggccaaagcagaaggaacgcttgaggccgggagttcaagaccagcctgggcaacatagggagaccccatctctacaaaaattaacaaatac

SEQ ID NO: 196044 - DNA, 383 bp, Homo sapiens
agtcacattaatatatgatatataatgttcatttattaatacttatacgtatgtaaagtcttgtactagataattaagagagtgttaatttctaaacgattgtttctcccagttcacatttcataatgttttgttaaaacttgtcacgagtgtctttgaggtcccaagatcacttttggaatcccccagcatggatttccagggctcagcaatatcacttaggtctatgttatgtgacatgtaccattttctgagtccgaggtgggtgctgagcctggaattgttaccccaaacccaagttctcatttacataatataggcaagttcccccatgcacttgctattttatgttcattagctcagtaaaataacgtccaactaaa

SEQ ID NO: 196045 - DNA, 350 bp, Homo sapiens
gtacaggcatgagtcaccatgctcagccgtctcctctcatcttctaagaactggatattgtcatttgaaagtcttatttttaaccatcatggtctctacgcttgagtgtgtctgagaatatgaagacatactgtaattactggctcattaagattaagcatcataaccttcctagttgcaaagggttagccaagtactgtataaggtgtaactataagtatttaaccttacaaattcctcaagaagataggcagaaaatcggaaagaaaagggcaaaaataggccgggtgcagtggcccacctgaggtacagagttcaagaccagcctggccaacatgatgaaaccctgt

SEQ ID NO: 196046 - DNA, 390 bp, Homo sapiens
agctttgagtggcagatgctgaaggggatctggaaatccagggaagaagagagacttgggattggagagataaaaggttgtgggtaaaaagttcccccctggctgggcgcagtggctcacacctggaatcccagcactttgggaggctgaggcaagtggatcacgaggtcaggagatcgagaccatcctggctaacacggtgaaaccccatctctactaaaaatacaaaaaaaaataaattagccgggtgtggtggcgggcgtgtgtagtcccagctactcaggaggctgaggcaggagaatggtgtgaacccaggaggcagagcttgcagtgagccgagatcgtgccaccgcactccagcctgggtgacagagcgagactccgtaaaaa

SEQ ID NO: 196047 - DNA, 385 bp, Homo sapiens
aactgttattattcttgataattttaccaaagatgtagtagtcttagttataaaatacaaggtaaaattatacacaaagtgctaagtgcaatggagtttatgtactatgaagtatagatagcataaatagttgaagttgaaaatataacttgtattatttaaatactgactggtcacattttattgtaaaactattcaagacaactctaatagatataatagacaataatcttaaaatatgcaatttaaattaaatatcaaggtcacatgtgccctcttacattgttccctcaggacagggacttgggccttatttaacattgtagcactcataagcctaacacgagtatctgtatttaatatatagctaataggggcctcctga

SEQ ID NO: 196048 - DNA, 439 bp, Homo sapiens
tggctgagcatccatccctacactccttgcagctgcttcccagaccagacttcatatttctcttcaagaccagaacacacagagtgacttcaggaaatcttgagagaatcagacttgagaagcctaggaaagacaagtatctatttacagttaatcagcaccctacccggccctgcagacagttctgacaactggagccaggaagaatcaaccacaggctctgactggggcccacctgaggctaggagccagttggacccccagatgagtactgactctgatccccacccagactggctgcactgccatagggagccccttcctcggagacacactcaggcactgggatccaaagttcatggaaagtttcactttctcttatagctcaacccccaaaactgcctgataatcttatcatcttatctaaatatcttcccca

SEQ ID NO: 196049 - DNA, 526 bp, Homo sapiens
acttagaagtgagaacatgtagtgtttggttttctgttcctgtgttagtttgctgagaatgatgatttccagcttcatccatgtccctgcaaaggacctgagctcagtggatttttttttttatcttctctcttattgttggttttgccagctgtcacctcctggcagttattttgtctccctttgatagtctttctggttcccttttacctggctgctttaaactttgtgtgctagaaaaatcggtatttctagaagttaaaatttcattaattaagttataaaaattaaattataaatacaggtacctggctttagtgctggggttttatgacagctgttttggttactcaacagtttttttttagatgtaggaactgttagaagatgccaaatatctctagaacaatgcaatattactgtattatgagattctatagcagcaaactagatttttgtggattatgaaaatattaaacaaatgtccctggtactaaattgtcataaaattggagatttttcttta

SEQ ID NO: 196050 - DNA, 778 bp, Homo sapiens
ttaaaatttatttggtgcaataaatagtatgccaggcttataatctagagattgagtcttgaaaaaagacaggataaaccaagttgaaagacaaaaggaagcagggcatggatattaatctttgttacattgtctccataacatctttgttaaattgtctctaatttctcaaatgctctttggaccacttttaacattttcctaacccccaccctgtttttttttgttgttggttttttttggtttttggtttttttgagacagagtctcactctgtcacccaggctgcagtgcaatggcgtggtcttggctcattgccacctccacctcccaggttcaagcgattctcccgcttcagcctcccgagtagcgagtagctgggactacaggtgtgtgccaccacacctggctaattcttgtatttttagtagtagagacggggtttcactatgttggccgggctggtctcaaactactgacctcgtgatccgcccacctcggcctcccaaagtgctgggatcacaggtgtgagccaccacacccagcgcccccttattaataagttaaataaaacctttaatttgtcggaatcagtattttacttttttcaaagttatacttcaacattctgtgcctattttggtttagctgttttcccactgatttgaaagagttctttattatgtatttatatactctacttattagaatttgcattctggtggttttaaaaatatgtccaagtaatgatttgctacttctcccttcaagagatata

SEQ ID NO: 196051 - DNA, 770 bp, Homo sapiens
ttaaaatttatttggtgcaataaatagtatgccaggcttataatctagagattgagtcttgaaaaaagacaggataaaccaagttgaaagacaaaaggaagcagggcatggatattaatctttgttacattgtctccataacatctttgttaaattgtctctaatttctcaaatgctctttggaccacttttaacattttcctaacccccaccctgtttttttttgttgttggttttttttggtttttggtttttttgagacagagtctcactctgtcacccaggctgcagtgcaatggcgtggtcttggctcattgccacctctgcctcccaggttcaagtgattctcctgccttaacctcccgagtagctgggattataggcgtgtgccaccatgcccagataacttttgtatttttagtagagacggggttttgccatgttggccaggccggtctcgaactcctgacctcaagtgatccgcccacgtcagcctcccaaagtgctgggattacaggcctgaggcactgtgcccagccaaaaaaatgttcttacattcccttttatatgactggtgggagaagagagatgttagagaaaacagggaagtcggcagagccagaggaatgcccaaatgttatcctattaaggcagacaaatcttcagacatgctatgatttctctcccagcccagttttaccatctgaacccacccagacttattcactaaaacataaccacttggttgcgcgcggtggctcactcctgta

SEQ ID NO: 196052 - DNA, 868 bp, Homo sapiens
aaacttaagtggtatccctccattacccctctaaaattcactcatccaattttgccttcatggaatttatccattatctgaaattatctttatttacttgtttattatctgtttcccttctggaatgaaaactcaacaaaagcagaaaacttgctggtcttcaacagtgcctataactgcctggctcagggtaggcactgaaataaatatttggtatatgaaaaagggtgtattgctaaactacaaattgtatttaccttaacttcttaaattctaggatccaatgtcaaattccacagagtctaacattataggttatattccatttttaaaaatcaacttttattctactcaaaattttttttttttgagacagagtcttgatggagtgcagtagcatgatgtcggctcactacaacctctgcctcccaggttcaagtgattctcctgccttaacctcccgagtagctgggattataggcgtgtgccaccatgcccagataacttttgtatttttagtagagacggggttttgccatgttggccaggccggtctcgaactcctgacctcaagtgatccgcccacgtcagcctcccaaagtgctgggattacaggcctgaggcactgtgcccagccaaaaaaatgttcttacattcccttttatatgactggtgggagaagagagatgttagagaaaacagggaagtcggcagagccagaggaatgcccaaatgttatcctattaaggcagacaaatcttcagacatgctatgatttctctcccagcccagttttaccatctgaacccacccagacttattcactaaaacataaccacttggttgcgcgcggtggctcactcctgta

SEQ ID NO: 196053 - DNA, 151 bp, Homo sapiens
ttactttgctatgccagcctatccactatctaacatgttatctgggccattatttaaataaaataaagttatgcagaaaatatgcatcagtcagaatttaacactgttcctgagttatatcagataggcagtgtgacagagaggaaagaat

SEQ ID NO: 196054 - DNA, 794 bp, Homo sapiens
taattctgcctcttgcagtctaggagacctattatgctaggaagaaagcaaaagtggttgggggtggggatagtaatgactattgatcaaacagccagcaaagtctgccagattcagggcttaataaatgtttattgaattactttgcttggatttatagttgctactgacaattcctaatatgaagaatgtttttttattttggaaatctttcattagctgtttttttctccctgttgataaatgctcctgcattaatctacttagactgctatacaatattccacagactgggtggcttagacaacagaaatttgttttttcatcattaaggttgctagagtcaaagatcaaggtatcagcagggctggtttctggctgtgtccttactggcttgcagatggctgtcttcttgctatgtcctctcatggcattttcttagtgtgcacaagtatacacacacacataaacacataaacacacacacacacacacacagatgtggtgtgttttttccttcctcttctaacaacacccagcctatttgattagggtcccacccttatgactttatgtaacactacctacctccttaaaagtcctatctccaaatacagtcacattcacaggttaagacttcaacatataaatttgagagacacagtttagcccataacattctgtcttctggccccctgaaatttatgtttttctcagatacaaactacattcactgtgtcccaagagcccccaaagtcttcacccactccagtgtcaatttcaagtccaaagtc

SEQ ID NO: 196055 - DNA, 415 bp, Homo sapiens
agtaattgcttgctgtaatgggtacaagaggttatacctgttacaatgattaagaaatacagtccctaaagaaatggaatgcaatgttctacttaaaggaggacactagaataaatatgatttcacagtccatacttttagggttgtatttttctaattataacaccaaactgtagttcctttaaataaatacctgaagatgtaaagacacaacttatattaactgctaatgtattcctcagtgcccaattgtgattcttatattcagctctgcattctgctttttaattccacttgttgtagatttttgtattaaggtatatattttagtgtctctttgttctgctaacatgaaatgtgttatgatttattcaatcatccctataataaagattaaagttttttctgagtttcc

SEQ ID NO: 196056 - DNA, 296 bp, Homo sapiens
tccaccttactcagtccctcaatggtgacagtctccttgaacttggctgccagcggcatctgacacagacaccgaccccgcctcctcctccttcctctggttctgtgccagtctcctccttccttccacctctgactgctccttctcatcctccacctagtttctcatctctctgaattccaaatactggactcaaacccaacactcagtctttggacttattttcttctacttgtctgcttggtaatctcaactagtctcatcactttaaaccacagcttcatagtaaggcggag

SEQ ID NO: 196057 - DNA, 253 bp, Homo sapiens
cggagactaccttacgagatttaagtcacaattctaaattttggaataatagcaagaaacgtttggaacactttgcagatagtttcaggtgtgtatatgtgagtgtaccctttattttctctgcagcccttacctaacacacagcagagagaaaaataccaaggaatgaaattgtgttttatgagtaaacatgatgacttccttctcaaacagacataactctgtaactgcttaagttgttgaaccttttatt

SEQ ID NO: 196058 - DNA, 343 bp, Homo sapiens
atgtctaactgtcctcttcttgaggatccccaaggacagtctgacttaatgcaaagactgcatattttcactggtccctaatgaaatctcattcccttctattttatctaatatcctctctctgtcccttggagtagatttgatcagtgttcaccattagactcttcaaaagtcagtcatctccccttgaaactttattaccccagtcactttaaccttgcctctggaacaaaccatgtaaacaaagctaccactgggaagtgcagccatgtggacctcatcccatggctctcttactcatcccaaaatataatttttgctcccaccatcccaggtgcctcct

SEQ ID NO: 196059 - DNA, 117 bp, Homo sapiens
atccttactgcaatttcttgagagctcctcaagagtaaagaatattgtgtccgtctttgtgttccctgtacccagcatacaacttggcttccaaagagagggagtgatgtgttacat

SEQ ID NO: 196060 - DNA, 868 bp, Homo sapiens
gttttcagactcattcaggctacagatatttattgagcataactgggtgctgagaacgttgtccaccccctctcccttttccctgactccagcccttggcagtgtggaccacacgcaatgcctattatgtctcgaggcttgtccacacatctgtctcatgatgcatgtgggtctttatgtttgattccccacaaacggatggccattccatccattcttgttccttgggaacaagaacagaggcctcttttccccctagtcctcctgtgctgccacaacaaagcatccagacctggtggctttgaagcagctacgttgtcggggtatataccctggggttcgttgtcgcgcaccaggaaagtttaggacacggacgcattcaaagcagtgtgtagagggaaatttatagcactaaatgcccacaagagaaagcaggaaagattcaaaattgacaccctaacatcacaattaaaagaactagaaaagcaagagcaaacacattcaaaagctagcagaaggcaagaaataactaaaatcagagcagaactgaaggaaatagagacaccaaaaacccttcaaaaaattaatgaatccaggagctggttttttgaaaggatcaacaaaattgatagactgctagcaagactaataaagaaaaaaagaggggagaatcaaatagacgcaataaaaatgataaaggggatatcaccaccgatcccacagaaatacaactaccatcagggaataatacaacacctctatgcaaataaactagaaaatctagatgaaatggataaattcctggacacatacactctcccagactaaaccaggaagaagttgatctctgatgcgtcttcgcgactgg

SEQ ID NO: 196061 - DNA, 493 bp, Homo sapiens
gttttcagactcattcaggctacagatatttattgagcataactgggtgctgagaacgttgtccaccccctctcccttttccctgactccagcccttggcagtgtggaccacacgcaatgcctattatgtctcgaggcttgtccacacatctgtctcatgatgcatgtgggtctttatgtttgattccccacaaacggatggccattccatccattcttgttccttgggaacaagaacagaggcctcttttccccctagtcctcctgtgctgccacaacaaagcatccagacctggtggctttgaagcagctacgttgtcggggtatataccctggggttcgttgtcgcgcaccaggaaagtttaggacacggacgcacacgaggagtttaggaggggaggtttaataggcagaagagaagagaaagagaaacagctctctccatagagaaaggggtctccaatcggaaaagactggctggtggtgaatgcgc

SEQ ID NO: 196062 - DNA, 443 bp, Homo sapiens
agattgtgccagtgcactccagcctggccaacagagtaaggccctgtcttcaaacaaacaaatcaaattaaacaaaaaacccaaaacccttgtaaagtaagctatgacctccatttacgggtgaagaaatgaactcagaattaaagggacttgatgaagcccctttgaattgtgaatcaatgtagatttaagctctagggaggtgtcataatgcagtcctttagaggatggactggactgactgaaagtttatggacccagaaatttaattccagcattgaggctgatcttttgtttggattgttattttgcttattgcccatccttccatgtaggttccatgaggacaagggtgggtttcttcccccaccactgtgtctcagcacctaaagcagtgcttcacatacagatgttcaataaatgcttcttaagtgaattgttat

SEQ ID NO: 196063 - DNA, 302 bp, Homo sapiens
gatactttacataaccaaaaacctaggagagcattctacattgtaattttttttttactttgtttacataaaatttacagggttttgtttttttaagcttagtctgttctttgacattgttgattcatgttctaaattttcatcagatttaacatgtttggaggttcttgtgcactcaatgtgaacctactacaagcttctgaactgcaaaaccttttttttaggtcactgtcaacagaaagatgccttatagaatttctcatgattgaaacagaactctgcattctaaccaagcaacccct

SEQ ID NO: 196064 - DNA, 459 bp, Homo sapiens
tgagaggtgtttgtgtcctgacatgctggagggcccgtcataaccagtgccattccctttaaagttgttcatgtgacttccagtaccctggtgtctgggattagttgaatactggcttatagaggagctcagatttacagagacaagaacactgcatgtttgctagattatgcctttagaattctccataacacacaaggatgattacttcttttggttaagaaatacatgattttactgatcatttttacagtctttgtggtattagaattctaaaaagtataaaacaaattatttatgattacttgttagagatactacacactggctgggcacagtggctcgtgcctgtaatcctagcactttgggaggctgaggtgggcagataaggccaggagttcaaagccagcctgagcaacaaagaaagaccctgtcgctacaaaaagataaaagaaaaaa

SEQ ID NO: 196065 - DNA, 290 bp, Homo sapiens
acttccccaaagccatacctgtggtgtataagaatattatatataaagggttttttgtgtgtgtaggtttctcagatgcgtatgtgaaagagaaagaggaagggtgtgtgtgtgtaagagtgagaatgcatgtgtgagcatgtgtgtctgtgtgaacatgtgtgtctgtgaatgtgtatgagaatgaaagtgaatgtgtatccaagaaaaagaaagagaggacagagaggtgaacctatgtgtgtgtctgtgtgtgtgcatgtgtgtgagggggacgatcgtgtgtgtgt

SEQ ID NO: 196066 - DNA, 313 bp, Homo sapiens
gtcctaccttctaccttactaaggagactagaataccaaaagagagtttctcagcttctctcctcttcataaagttatttttacacaccacttcatctctttacccatccttgatgactttccaaatagctcaaagaagcagtgaccctcctttcttgggttactctctccccattcctttgaatttattccctctaatctcctttcagaataatttgcagaacacctttgctgcaaatacctttgctgcaaaggtatttgcagaatacctttcagaatacctttgctgtttgtgaaaatgactggaaataca

SEQ ID NO: 196067 - DNA, 422 bp, Homo sapiens
tgaaaagcagctcattttcccccaagttttctgcatcagtggttctccaactggagtgcagcttgaacaatgtgatttttaagttttccaggcatttctaaaatgtagccaagtttgggaatcaccacacctagttggttatctcaaactactactatcagaatacaggttctgtgctgcgaatctgaatatgggatacattttctttaggtagcaagaaaggtttatttacctttaggacattatactgatctgcatgagaatcttagaaactaagaacccttaaaatcagttaaggttggtacactgtggcctcattttgatagttctctgcatggagtcatgtttggcatgatttgcatactgtgctagaattaagctgggttggttgagaaggggttaggaagaggcagatgtaagct

SEQ ID NO: 196068 - DNA, 502 bp, Homo sapiens
agttagagacatattatgaactcaggagttccaataatccaggggaagattgatgtcattgtagattatttaggccagcaattctcaaaccttggtagctagctaacagaatcatctaggtagctaccaaaaacagacaactgaacactgtccctaaagctgaggattccatagcctggagtagagcctaggagtctgtactctccacgagcccttgggagattcttatacatgaccaagattgaaataaacatggacttttgccattattccaggtcagctttatttccacaccccagaagatctaggctaagtcctcacattgcccagtcagcatgtgttaagagtgtagactaatctcaaagcagtaacaccacattaagcagcagcagtggagctgggcatgcctgtaatcccagctacctaggaggtcgaggctttagtgagccataatcacaccactgtacttggcccaggcagcagagcaagaccctgtctaaaa

SEQ ID NO: 196069 - DNA, 564 bp, Homo sapiens
actcggtgcagacccctcgcagctcccaaaggaggagatccagccatttgccacgacatggatgaacctagatgacactatggtaagtgaaataaaccagacaggaaagaaaaacattgcatgatctcactgataagatggaatagaaatagagagtaagataaaatgtggttactggagcagggtgggggatagaaatggggagatgtaggtcaaaggatgcaaagtagcaggtgtgtaggtccccacactgtaccttagctctctgcacttcagatctaaggtatggtgtggggactgtggctaataacagtgtactgtgtcaggaggttcactaaatgagattacacctgctcttgccatgaagggaaaatgggtaactatgtcactacatatatgtaactcataacatgtacagctttaaatatactcgataaaaaaaaatttttccgggcaggccccctaagccgggatgaaactggcaagagctaaacacaggtctgagctatttatataggacactccatgttcttgcggaataagtacccttttacacaagttcag

SEQ ID NO: 196070 - DNA, 316 bp, Homo sapiens
cccacaaggctcagctcctcatggtgctgtcacggtccagctgccacttgagttgcttcttcatctgtgaccagagtggctgtgagacaccaataaggtgagggacatgcaggcactctgccagcaggtttcttaggaagtgatgggactcagcatgaagcctccagttccccttacattgcctcatggaggaggcaggatgcaagtggcctgtgcacaaagacagtgcctgtggagcccagtgtgcccttccccatgtgttagaaaatgtcattgttgaagctgggcgcagtggctcacgcctgtaatcccagca

SEQ ID NO: 196071 - DNA, 600 bp, Homo sapiens
aaaattcctctcccatcatgcctgtaaacttgggcatgccactcctttgtgtctaggattttttcttatttcacattcctctccaatcttttctggtcaaaaatgaacaaagtcgcagagaatccagaaaagcacaaaagcagaccaaggcttaagggctcctttcactccctctgcggcatagcttccttcaatttcctcacgtggcaacagcttcaccaacacaattcaaactcctagtatacatttgttgctatgggtaaatcaagtaccaacgtagcctacctatgtacagacctaacctaaaaggacattctctggtgggaaacttctggaaaatgtgctcttcaggggtgcttaggagactgtgagctggctggcagggctacactctctctcctcaccatctgccctctcctcatcttcccaccttcccacctgattttctgcgtcaccttcccaatagccagaattatgccttaacttttgttccctaagaggattagaaaaaggtacaatgaatgaaagtcctatcccagactggctatttgtggtaaaataagcaaatcattggaatggtaatcacatgggcacgattaa

SEQ ID NO: 196072 - DNA, 300 bp, Homo sapiens
taaatgagtaaattttttttctagtaagacaggaagatgtctggctcatattaacatcatcatatgtttaatagtttaatttagcatctggtgcctttgctgccagccctacagggagagagattaaagatggaccacatctgcagttagtaatagccaatcaaagcagtcagactctaagaaaacgaagatcttcaggccacattatatgctgctgggttgctagccataatttgtgacatgtccagaacactccagatattctggatttacctaagaaataatactaaacttgaagtg

SEQ ID NO: 196073 - DNA, 171 bp, Homo sapiens
tttgagggtctaaaccacatcagacaagagggacaggctgttctgttttttaaaaaggcccagattagacctgaaaccctcagatgctggaggaaggcttcacctccccacagtcttttttttttttttaagacagtgtcagccaggcacagtggctcatgcctgtaatcc

SEQ ID NO: 196074 - DNA, 498 bp, Homo sapiens
agacctatgtagtggagagatgcatattgcaaggaaaaaccttcacaaaagttcactcgtttttgaaataatgtttactgaatgccaggcactgtactaggccttggagttaccctacctactttccagaacttctcattctaagaaaagaaaaaaactgatgattacaatgtgataagtgctataataaataggtaccaagtgtaataagaacgatccaactgtctggggcagtaatgtttacattctaaaggattaataggactcatgaggttcaaattagagagaaatagacatttgaagacataggtatgaaaaggaacattgtgttggaataacacaccaaattccagaaattgctgtctgaatgtttgctatgggtaaaagaggggaaactgataagggatgttgctaggtaggtaagtttggaccagttgtgaaggcctggtggcatgcaaaggaaattttaactttggccatgggaaagcactggagatt

SEQ ID NO: 196075 - DNA, 404 bp, Homo sapiens
cattcaaaaaatggttcatttcaatagaacaactgacctggtttctttttcaatgtgttaatagtgttaaaaagtctgttttagatcaaaagagactgatgagaccacatgcaaatacattgcacagctcttgtttgattcaaagaagtcaagtgtaaaagacattttttagacacgtgaaatggtgttgcggctgactaaaaggatgtgtatgtgtgtttttgaagtatttagggctaaaatatgtccaggattggcttttaaatactacaaaaaatggagtatgccaaaacgttgaccattgttaaagctcagtgaagggcaggtagatgccaattgcactcttcacttttatgtgcaaagtttggaaaatttcacaataaaatttttgtgtttacataaat

SEQ ID NO: 196076 - DNA, 400 bp, Homo sapiens
ctctagcacgatccccccctgaaacccagtttagatgaggtacccaggtaaggcttctcagaggaggtgacttttgagctgaggtctgaatggcaagaaggaggcagccaggagcagcttggaagagaagcattccagacttagggaacaaccagtgttcagaccctggggtatcatgaactgggtgggtctgaggaacagaaaaaaggcatacaagatggagagcagaaacactcaaggcagcagaactagttggggcctgatcttacagactttggaaaccagggtcgcaagacgccgagctttattcttctacctattactttaatgctaaaagggaactaggaatctgttcagtcatgagccaaataatagaatcagtgaaacagtctccagatat

SEQ ID NO: 196077 - DNA, 649 bp, Homo sapiens
taagaactcagctgtcaccaggagcgctcccaaaatcatgtgagacgtaagaactcgctaacatcaggagtgctcccaaaatcacctgagacatgaaaactcgctctcaccatgagtgctcccaaaatcacaggagatgtgagaactcgctaacgtggatttttcttctggaagcgactctaaagcatgcacccccacacagtccctgagtctcctcgtggtgggcgtggccaaagcactgtgcctggtgactgtgtgtgaatagcactcagtcctcgtgctgtggcctcagcacaggacgaatgtgtgttgtgtgtgtggatcctcacgccacggcctcggcacaggacgggtgtgcgtttgtcgtgtgtggatcctcacgctgcggcctcagcagaggacaggtgtgcgtttggcgtgtgtggatcctcgcgccgcagcctcggcacaggacgggtgtgcgtttggtgtgtttgtgcacaaacacccgcctgtctcagccagctcacaaagagactcacacccatgtgtcggtccccctgcaggttcctgtgtgatcatggaactgcggggaagggaaggtgccggaaccagggctgggagatcactgagggttgaggtggggcccgtctcctgtacacccctgcgg

SEQ ID NO: 196078 - DNA, 1225 bp, Homo sapiens
  misc_feature (926)..(926): n is a, c, g, or t
gggaatctcttgaacctgggaggtggaagctgcagtgagccaagatcacaccactgcactccagcctgggcgacagagactccatctcaaaaaaaaaaaaaaagtgtttaatgaacttacagttccacttggctggggtggcttcagaatcatggcggaaggcaaggaggagcaagtcacatcttacatggatggcagcaggcagagagagcttgtgcagcaaaactcccatttttaaacctatcagatctcatgagacttattcactatcatgagaacagcatgggaaagacctgcccctatggaactgggttccttccatgacacgtgagaattgtgggagttacaattcaagatgagatctgggtggggacacagcccaaccatatcagaggccttggaaggaaccaaccctgccaacaccttgatgttggatgtgaactgtgaggacgtaaataaatctctgttgttttaggccacctagcttgtgatatttgttacaggagccctagcaaactagcacactaggctagacaatgctgccggggactgacatctgctcatgtgcacttatgcctttgactgtgggctgaaatgagccagtgccccaggtctgctggccaacattggttcacaagccacctcctccaggaagccttcctttatccatccaggaagaatatggggtctctttctctgactcttgaacccttgtgcagatttccatgagggcatcttgcatctgccactgcttttataaatggctctgactcaggtactattcagcagctcctcaaaggggaccagaagcatgtctctcccatgggtgtactctctgagtgctgcacagagccacctgcacttcttggcccttttgcctgctgtactacagcttccccatggggcttattgtcttcctgagttgnttaggatttacttcctggttttacctgtcttctcccactggcatgtgagccatgtgtggctgagacatttggtccattttgtccctgctgcagctcagtgcctaggacagggcctgggacctggtagtcactctatgcatttttgttaatgaataaataaatgggaaataaaggtgcaaatatctctgctgctgatggggattctgctctcccagagggaaggtcttgctgtttggatgtgccagttattctctctataagatccacactcagcatttttccttgcctctatgttcccc

SEQ ID NO: 196079 - DNA, 1240 bp, Homo sapiens
gggaatctcttgaacctgggaggtggaagctgcagtgagccaagatcacaccactgcactccagcctgggcgacagagactccatctcaaaaaaaaaaaaaaagtgtttaatgaacttacagttccacttggctggggtggcttcagaatcatggcggaaggcaaggaggagcaagtcacatcttacatggatggcagcaggcagagagagcttgtgcagcaaaactcccatttttaaacctatcagatctcatgagacttattcactatcatgagaacagcatgggaaagacctgcccctatggaactgggttccttccatgacacgtgagaattgtgggagttacaattcaagatgagatctgggtggggacacagcccaaccatatcagaggccttggaaggaaccaaccctgccaacaccttgatgttggatgtgaactgtgaggacgtaaataaatctctgttgttttaggccacctagcttgtgatatttgttacaggagccctagcaaactagcacactaggctagacaatgctgccggggactgacatctgctcatgtgcacttatgcctttgactgtgggctgaaatgagccagtgccccaggtctgctggccaacattggttcacaagccacctcctccaggaagccttcctttatccatccaggaagaatatggggtctctttctctgactcttgaacccttgtgcagatttccatgagggcatcttgcatctgccactgcttttataaatggctctgactcaggtactattcagcagctcctcaaaggggaccagaagcatgtctctcccatgggtgtactctctgagtgctgcacagagccacctgcacttcttggcccttttgcctgctgtatcaaaaagctttcctcactggggtttatctccgtcgtatctctgatgtgtagtaatcacggatttaccgtcactgatgttacttgtattctgggccaatgagatgtgagatatgacttcactaaaacatgtgatgcctatgctcggtaccctgaacgcaacgcgtacgacgtgaccgctgaggtaccagtggacctgagggacagtcggtcagtcacatactattcgcaattatgtctatatcaattaaaatcagaatgattaatgcaagattcagtacagaggatgcgaatatatgtgcgggtatatcgggcaatcacgtctcgccatatgaagtcttggttactgctggcca

SEQ ID NO: 196080 - DNA, 493 bp, Homo sapiens
  misc_feature (477)..(477): n is a, c, g, or t
aagaagagaagagaagagaagagaagctgtggcctgtaatgaaaagaagtggagaagtgactgtcagaggaagcagattaaggagctgccggagagtatcctgaatacctgaagaagacgattgaggacaatggcaatttgcctgagcaggttgtcagtgctgctgaaactctggaagcaaatgcctacttgcacatctattgcaaagcatgagaaaaggaccagaggcttcaagcctggaaaagacaaactcaaagttctgctttgttccagtgtgttctgattaaacccatgttgctttacagattccaaaattgttaccttctttaaagagaaagccagaaacacttttctgtgtacatgaagggaaaccatgaaatatggatcactgagaaactctttttgaactggtctttgaagtgttttgttctgaggttaaataacatttaaatgaatgcagtcattgctgctccttgngttcgtcatctccatt

SEQ ID NO: 196081 - DNA, 195 bp, Homo sapiens
gaggaaaattgtatgagcacagggaggtgtgattaaaatgatacaggatgcctttttcatccttatccccactcctacatgcccacaattcattgcctacctctggtgatcagtcttggcagactcataaaatgaaatacatgatactccctcaaattccataggaattcaaagaatatatgagagatggggata

SEQ ID NO: 196082 - DNA, 394 bp, Homo sapiens
atcttactatatgttatggcacgctatgatgatgagcagcgatgagcagccgaagcctcaaggaagggatgcttttgtaaaacaagacttgtagaatataacgtgtgaaagtaaagcccatggcagagctccctcctcagcacacggggagcagacaggaagcttttgcctcaccttcctcaatggcctgcagccacgtctcccaggtcagtcttaaggacaatgaaactctggtcttcactgtggacacgccacactaccaggtgctccaaagccatggtgacccaccctcgggtgggtcctgagaacaaagctctggttctaatcctaaccctaaccctgtcccaagactttgagcctgaacctaaatcctgatccctaccctggtccttaa

SEQ ID NO: 196083 - DNA, 616 bp, Homo sapiens
cgaagcttgtgcccagcacagccagaattagacacagtccgtgggtgagcacaagtggtagccttggagagaagtcagggtcggcatcagaggagcagcacgaccatcaggctcggcgcccgcgggcagctgcaagcaggcgagacccaagtccaggcaccaggaacacaaagcaagatgcacagtagagacacattgtggcaggtgacacaaacgttggcttcactgacagtcactggaaggtcggtgctagtgtcctgggcagtggcgtcatgaagacagggccatctctcctccctgcttatctgctccctctcccggatccctgctccgtgaacaccgctgtcatcagagccaggttcacacgctggtctctcagcaactccggcagaaaggagggatttccacttccctataatcctgtccaaacacagaaattatgttttcttggctccactaaggccacaagcccaaccctgcactaactgtggtagccagaggcgatgcagagcccagagggccagggccgagttgtggccactcctgggaatatggagaatgggtgattcccccaggaaaatcccattgctgtcatcttaggaagaatgactggatg

SEQ ID NO: 196084 - DNA, 442 bp, Homo sapiens
catgataagttgcacagataacattatctctactacaacacaattttcaagggattgttcacaatatctctccagtatttggagactcctagaatttctttgacttcatgatttggttctcaaagaaatatacatttatatctgttttatggactctaggacttcttacagttcctcaaatagtcagcaaccctttcattgtgtatataagcatgatgtagtagtaaagtattgccttggagtcagcgccatttcagttagattattctacaacctcccttggcaaatgttaacaacacccttatacattggttcttcaatttaggcatctgagaaatgaagataacatgaattgtggactgcatcatatgtgataaagaggatggctgcctaaggaaggcaaacaggaccctctgtcaggtagttctcaataaacttcaga

SEQ ID NO: 196085 - DNA, 533 bp, Homo sapiens
tcagacgctgaactatgtgataactttatgtttaacattctaggaaactgccaaactgtttcccaagcagctgtactgttttacagtcccaccagcaatgtagaagggctctgatttctccacatcttcaccagcacttgctactgtctgtctttttttattatagccatcatagaggatgtgaagtggtatcttactgtggttttaatttgtatttccctgatggttaattatttgaacatcttttcatgcgcttattaaccacttgtctatctttctctttctttctttctttcttctttctctttctttctttctttctttctttctttctttctttctttccttctttcttttcttttcttttttcctttccttttcttttcttttcttttttggagacagagtcttgctctgtcgcccaggctggagtgcagttgcgcaatcttagctcactgcaacctccacctcctgggttcatgtcattctcctgcctcagcctcccaagtagctgggaccacaggtgcccgcca

SEQ ID NO: 196086 - DNA, 426 bp, Homo sapiens
ttaacaccacatgctgctgacagcagaatatgtccatttccccaaatcctgtgtcagaagatggcacacatgaaaatagccattgattggattttaatgagtcaaccaaacattcctgtaagactggtaccaaaaagtaaacccaaattccctgctataatcatccctgggaaaacccactgttttgatatttcatattgccgtctgtttgacttacccctctatgtttctgtggggaaaatctgcacagtgagcaaatcctgtaatttcagctgcccatcgttgtattatcattggcacctcagcagcagtgtttggctgcgtttcaattatgacagggatactttcgcattttccctattactcaggagtcccagggcctggctggcactggctcctcctgaaggcacagatgttctgtcttct

SEQ ID NO: 196087 - DNA, 414 bp, Homo sapiens
cagactggtgcagttcagggctgaaaagtgctgcctgggatggcaaagcattctctgaaggtttatgcaaatttctgcagcaaaaaagtgttcgcttgttgcctcaatgcttggatgttgacacatttgagcccattagaagggcatcttgtgcgcaagtcactgccagtctgtctgcatgaaacaccatgatggggggtggggatgtctagtcagtgtaagaaagaaggtggcgagtgtgtgtgatgtgtaattcccccaggtctttatttgaacacaaatctatgctctttcccagctacaaaaggaaacatttacctacatgaataatcaacactctgggcgtgtgtgtaagctatgtatacatacaaattcataatctaatatataccagctattgcaacagtctgtctg

SEQ ID NO: 196088 - DNA, 322 bp, Homo sapiens
caaaacttactatataaaacaagtaatcaagacagtgtggtactgacacaagaacagacatacagatcaatgggatagaattgagaatccagaaataaaaccatgtgctaattttcaacaaaagggccaagaccatctaacggggaaagaagtattttcaacaagtggtgtggagataaatgtgataactacacacaaaataatgaatttgaatccttaagtcataccctatataaaaattaactaaaaatggccaaagacctaaatgtaaaggttaaaattacaaaattcttagaagaaaacacagagtaaatcttcatag

SEQ ID NO: 196089 - DNA, 203 bp, Homo sapiens
  misc_feature (11)..(11): n is a, c, g, or t
aatagccggtncctctctccacactggtgctcaatgagggaggagctctggctgaaggctttcccacacttctggcatttgtagggcttctcgccagtgtgggtcttgcggtgctcaatgaggttggagctctggctgaaggccttcccgcactcatcgcatttgtatggtttcttcccagtgtggatccgctggtgtcggat

SEQ ID NO: 196090 - DNA, 128 bp, Homo sapiens
tattcagccattaaaaaggatgacgttctgacacatgctacaatacggatgaagcttgaagacattatgctaaacacaaaaggataaatcttacatggttccatctagatgagatgtctggagtggtc

SEQ ID NO: 196091 - DNA, 476 bp, Homo sapiens
tgagatctcactacattgcccaggctggtctcaaactcctgggcttaagtgatcctccagtattggcctcccaaagtgctgggattgcagtcatgagttaccacgcctggcctcagcatagtttctttcataatcttcacatatactaatctgcaaaaactatattgtgttctgtaaggtcatcttagtttttataaaagataaggaaatgttttcttcacattaaattacattaaaataagctgaaagcacttatttattttctaaaattagtatttagtaatagcattccctaacctgaactgcagaagaccatttaaaagtagctctgttccctctactatgatgaccaggtttctgctcttcaaagagaaagaaataagaacaaccaacattggcttactctgtgctaggcactattctgaactctttatcaatatgatctgattcagtcctgacaaccaccctctgaagat

SEQ ID NO: 196092 - DNA, 188 bp, Homo sapiens
ggacatttcaattctttcctctctcttgtcttactcccccataatctcccactctttagctagagtgaattattcaacttttctttggaaacccctttattaagatacaatttaccgcaaagcctcttgccaccaccagccaacacactccctcgtccagtccttccagagctggtcattcgatcatg

SEQ ID NO: 196093 - DNA, 551 bp, Homo sapiens
ataaaggctgtagaccctggtgactagtgaagaacctatggcctggcttctgcttaaagagagctcaatgttgcaaaattcctatttgccctttcacttttgctagaagtgtattgcatcacttgtaagattaaagggaaaatatacttattttgtttcccaaaagtttataggtttctgactttcacaaatgcttaagagtactcttctctttgttgttatggctgtccacgtgtagcagtttcatctttagaagtttaaattcttttctctttcttgctggatacaatggctcatgcctgtcatcccagcaatttgggaggctgaggcaagaggatcacttgaggccaggagttcaagaccacctgggcaacatagagagatactgcctgtacgaaagtttaaaaatcagctgggcatgctggtatgcatcccagctactcaggagcctgaggtgtgagtatcactcggggccagaagtttgaggctacagtgagccatgatctcatcactgcactccagcctgtgtgacagggcaataccctatatca

SEQ ID NO: 196094 - DNA, 491 bp, Homo sapiens
ggcacgatctcggctcactgcaacctccacctcctgtgtccaagcgattctcctgcctcagctctctgagtagctgggattacaggcacgtgccaccacacccggctaattttttatatttttggtagagatgggttttcaccatgttggccaggctggtcttgaactcctggcctcaggtgatcctcctgcctaggcctcccaaagtgctgggattacagatatgagccactgctcccagcagtaattttttttttataacttgtaacagaaatttggcattttcttcaattatgaagacaggcaacaaaccacagcaatattagcaatacttgtgactatgtcaccagtagaaaccacagatactttaatatcagattatatcgttgcagatattgcaaaatatctgtgctttttataactagaaaattaagatctataaaaagatctataaaagagttataaaaatacttcaaaattaagattataac

SEQ ID NO: 196095 - DNA, 515 bp, Homo sapiens
agctgctgctgaatgtggagggcccagggtaagctctctgtgccccagcctccatgtctgcagagccagcgaagattcccagccatgtgcccgcctgacggtcagtgttggccactcgtccagtccctgagacatccttgctgcctttactcctgaatccccttccacgggtggggctgccacttggcctcagctctgctcagccctccttcagcctgccccagagcaagaccgggggtcctgccctctccccgcactctgtctccttgcagatggatgaatgtgcccacaaatgccaggaccgctccagctctgcagaggagctgggggcaccccgggcccatcctctgggcccagacagtgcacgctgcctccttggtagagacgaggttagaggaacctcgtaaggatggacaataggctctaaaaataccccaaaggcaggcaggatttgccagtaacatctgtaagttctgtccggcggaagttataaatactaaataatgttaattcag

SEQ ID NO: 196096 - DNA, 330 bp, Homo sapiens
tcagactagtatgaacccacttattatactaccatactgttatgagattcaagtaaaaaaaaatgtagacattccacaaaagggataacaactgtttttttaatcaatgtattctcaaagattaagtatgtttcctggaattaaatgtgtgtcacctaaaattaaaacaaacaacgcccccccattctgctaaatgcaatgtggtatgctggatcagatcctggaaaagaaaaaggacacttgcagagaactagtgatttggtgaaaacaaattttgttgaaattcaaatagtctgtagtttagttaaaaataaggtaccaatgttaggc

SEQ ID NO: 196097 - DNA, 690 bp, Homo sapiens
cagtgcatgtgtgggaaaaaactacacagagccaaagaaagaacaacctgaaaggattacaagtaaccatccttggaattcacataggactagaaatagtttatattcccatcagccaaagtggaatttggctccaaattttatggaatatcaagtacagtactcagaaagatgttatatcagtagaggagaaaattagccttaaagattgctctgatctcaaataacaaagcagaaaagtaagcctaaaaagagtgaaaaccagactcaaactgtttccaagtaacagaactgtgtcccaaaacaaagcccaaaaatgtttataagaatatagaaatatgcagcattaaacagggtaaaatttacaatgaccagcatccaatcaaatattaccaagcatacaaaagaagcaggacaacataatccataagaagaaaaatcaatcagtagaaacagacccagaaatgaaacagataatacaatgagtagacaagaattaatggttatcataattatattacatgttgcaactgtattccatgttaaacaacgtaaaggaaggatagactatgttaagtagagatatgcttaaagatttttagattttttaaaacgacccaatcaacttctagagatgaaaataaacaatctgatatgaaaaatacactggatggaattaatgcagattag

SEQ ID NO: 196098 - DNA, 347 bp, Homo sapiens
gccccatggaagtgctatttcatgctttagtatgtctaaaagagaccttgtgttttatcttgaattttgttgaatgaaaatttggactgttatgttaccagacttaggatagatgatagcaagaaggaaagggaacacattgattccatccagagttcaatgacctgaacagtattctgttatcactaggctgggagataatttccactagttattcccagaagtgctagaattgctgctgtttttcacttaatcagtaattactggtttctctctcttggctaattctgttcctaggtagttattttaaagattacaaggcagtacattaaaaattaagtaaaaca

SEQ ID NO: 196099 - DNA, 333 bp, Homo sapiens
  misc_feature (256)..(256): n is a, c, g, or t
acagtggattcgctactcctcacatctggaattctcccacagtctcctttgtcaaaactgtacctatattccaaggactagattcaaatgctatctctcttttttctttttttttgaaacggagtctcgctctgttgcccagactagagtgcagtggtgctatcttggctcactgcaacctcaacctcctgggctcaagtgatcctcccacctcagtctcctcagtagcgtgttccaccacacccggctgcttttngtattttttggtagaggtggagtttcaccatgttgctcaggctggtctggaacccctgagctcaagggcactgatca

SEQ ID NO: 196100 - DNA, 998 bp, Homo sapiens
ttatcagtgacattgtcattggtggtcagagaattaactgtgtgtaactgtatatttgaggcaaggcaaggggacagatattttccttacgttattagttgtgcaacagaagccaattaagagattggagagatgaataacactagtgatgggttgcaacttgggtgtggagctgggcacacccacgtacgtcattgtgactcagaagtccctgtcaccgccctgagccaagtactaaagtaaggcccaaataccacacttacttcataaagaaaccaaagtctgactgcctccatttctcatgagtgaaaaactgtttctattataggaaacttaggtcttcagtgtgtttgatggtagcatgctattagattgtgtattctcaagtctgattttccccattactgtgctttctccttttcacttctgctttgtcacttggaatgtttctagaagtagaagtcactgcccctgcctacatcagactgcaattccgggacatccagacaacagcaagggataattaggaataaatttggctggaagaaagggagaatgcagcttaggcagcctaaaccaacaggcttatttttctcactcagtaagagagctgaggtcgcctgactcagctcaggttctcagtgagccatcagccaccaggtgccacctttcagtgagtgggcttctatcccttccaggtgtctcttcatgctccatgggaattagatgggacatgctttgactctctcttccagaagctttctcttctttttgaaggggcttctgtttgcgctgggtggtcaatgactcagcctagtcttgatttatcccccaggatggggacagacagcaggggagagatctcaggttgagatgagtgtacagtaagggctgggagtatcagaaggggaaacgctctcccagatagtgacaaagctaagcgtccatgtgaagggagaggacaaacatcccatggaaagaagggtagctgccaggcc

SEQ ID NO: 196101 - DNA, 286 bp, Homo sapiens
gagaaatgctggcttggggtgtgagagtcagatcaggaagagactggggatatgggctctggattggtgtttataaagttgtttctactcgggaggctgagataggagaatcgcttgaacccaggaggtggaggttgcagtgagccaagattgggccattgcactccagcctgggcgacaagagtgaaactacatttcaaaaaaaaaaaaaataaataaataagccgggccaagagagtttattcagatcatctttcttttgttactttcactttctcataaataa

SEQ ID NO: 196102 - DNA, 457 bp, Homo sapiens
aagtgtttaggaaagtgcttccctgtgtaaaacttagctggttcacagatgaagagaaattttgtgagaatgaactgtaccgtgaagctcacctgcatctgatttaggtaatatttaaataagaccttggactttagactggacttgaggctggaatgagttaagatttgtggatttgttggaatggaatgactgcattttgcatgtgaagacatgaattttggggaacctggggcagaatgttacggactgaatttttaaagtgtaccctcaaaatctgtatattgaaatcgtaactgtcaatgtaatggtattagtagtgggaccttcaggaggtaattaggttgtcatagtagaggcctcatgaataggcttagtgttcttataaaagggacctaagagagctctcacttctttccccatgtgcttatacaaaaacccaacagtctgcaaccgc

SEQ ID NO: 196103 - DNA, 254 bp, Homo sapiens
tacgaattctctttacctcttagtagttaatcccctattactacttaataactccttatattaaaatttctggtcaggcgtggtggctcaccactgtaatcgcagcactttgtgaggccaaagtgggcagacagcttgagtctaggaatttgagaccagcctgggcaacatgatgaaactctgtctctacaaaaaaaaaaaaggggggacccttcaagagcggccctgcgggcttgcagggttgggaccgggcc

SEQ ID NO: 196104 - DNA, 168 bp, Homo sapiens
aatcaaattaatttttaatgagatttacggaatatttactatgagtctctgccagaccctttcacatgttgcaagtgattctaatagcagccccctcacatgagcctttcctggagaccagccagtattagtgtgtttgtatgttatttcatttagtgctcatgacaa

SEQ ID NO: 196105 - DNA, 240 bp, Homo sapiens
aggaaggtttcattcacgtcctcattgttctgcaggcactgagggcctggggaagggacagccacactttcacatgctgagatggaggaaattgtgagtaggacaaatgaactaatgggtggaaatcagtttgcatactgtctggcacaaagcaaacgcctagtaaacgttagctattacacagcatgcagaatagagcagtccctgcctggggtaactgtgtcgagtatctgtcgtgtg

SEQ ID NO: 196106 - DNA, 382 bp, Homo sapiens
ttaaagcttccgcgcagatacaaaaactcagggagaaatgaccacatgctgtacttggccgtgctgatgaagtttttgcagcaaatggttcttaagggggtcattgatgtaaatggtgcagccttttagcccttgtaagccttgcatagttcatagccagggcatcctctcctccaccttctgactgcccaaggagaaatgagtagatctcagactgctcagctggtgtatgatagtggcaagagtactattggttacacattcaagttcactggtaatcccctcaggcagagctccctggcacaagtgctggggcttggtgttcctcttcactaaaggcatggctcacaatcgtatgatagttgactgcgggttgcagaaa

SEQ ID NO: 196107 - DNA, 513 bp, Homo sapiens
ctgcctcgtagacctcatgcctgatttcacagcttcctaggcaggcagtgttgtccctgcttaactgatgaagaaactgatgtcccaagaggtgaagctgcccaaagcttcgtggccaggaagggttgaagctgggactcagcctgggctgatcccgtcgaaagcccacactctttctgatggaccctgctagaaccttttcatgggacttggtttactttcatgggagggcacaaggagggttagcgataagggtgtctgggtgcttcgcccgccttgggtccctggagctgcagggctgagggccgcgtgtgctgggtggggtggtgctggtggggggctcacgtgctctgacaaggccatctatgcagctggcacggctgcccccttaatcacatcatgacaccgaggacatccaaatgtgacccgagagagccatctagagtcctcctctgaggagtggctgggaatgagattagtgggatgaggtgacgcttgtgaagccgtgcttca

SEQ ID NO: 196108 - DNA, 517 bp, Homo sapiens
cgtggccggcgcctactttcttactctcctgctgctccctcgtctccctaagtctccttgttggccatgtcttgcgcccaggttctaaggtctctgtaggatgcttccccatagccatgatatggctagccgtttagaaattccatctagctagatgccctaaacgagggagatagatatgacgcttatttgtcctccaagggggatccagctggatagcaaccgccgactccagtatgccaccaggaacccctcccagggaggtttgtgcaggcctaggattccaggtttgacctcacctccccgactcctcctgtggtctcccaaaggcatgggctgggggctgggggctctgaatgctcctcatgacaccatggctcctttcagcagccgcatctcaatgccagatccccttagagtaaagggcagcggaataacgctagggggttttcacatgcacccctgggccaagccgacttgcccttgccgtggatccctgcattcatggatcggttat

SEQ ID NO: 196109 - DNA, 425 bp, Homo sapiens
tgtccagtcgcctcgcagcagcgagcccgagcgcccttctccagtcccggcttggaactgaactgtgtgagcacgggtcctggaacccgggcccagaaccggcgagcccaggtctgagcccagagctcagcggtcagcctcgtaggccctgactcggaatcgagccgaggcgctgaggttggagccggagagcgtgagagccgaagagcagggagggcgggccggctgcgcgtccgacgagtcgcagagcaggaccgcggaaggcagggagacggccgcaagcccagggcagagggcagagggcagagagcggcctggctcggcggagagggcgccgcccggccggaaccaagctcgccgcccgggacggcgggccccgtggggcgcggacccagggtggccgtgggtccgcagcgactccccgg

SEQ ID NO: 196110 - DNA, 513 bp, Homo sapiens
agcacaaacggatttaaggcccctttgcaaaccacattacttctatataggccaaatggcaaccacagggaaactttataatcagaagatctggataattcattatcttggatctgctgctgatggagtttagggaaatcacatgacctctcaaccccatttttaaaatttattaaatgagaggcattgaataagttaatgatttccaaagtgtttcaaagccttgggagtcgatagggaagtattgaggaattagaggagagaaagggcatttctttcaactcttacatattgggttccctcagattcgatttgaaaaaggtttcatagcacttttaaaaagaatctaaaaacctgatattttcccaggtttttggattctgtgagccagtgggattttaagattggccagtatatggaagaggtacacgtaccagtcctgtctgccagatgtaaagacatgaaatgaggcgaataccatctatcactgtaattacaacactaaaaaaaaaa

SEQ ID NO: 196111 - DNA, 739 bp, Homo sapiens
ccatgattgtgccactgcactgcagcctgggtgatagagccagaccctgtttcaaatttaaaagaaaaaaattataaatactcttttttttcctaaccatcaacttgccactaaaccaataacatttgggtttttttagagtcctgcagaaaccttctaagtcagttctacagtttacaccctttatcatcacctcctctctctctaccccacctctccatgttgcagtcagaatgaacatttaagacacagagctgagcacaccattctactgcttaaatctttcaatactttcccattaactgcaggataaaatgaaaacttttagcaagcactacaagaaggtccctgaataatctttttcctattttattaatctcattcccaggcttgctttcccttactccttgcatccagccacactcactttcagtttatggaactagccatctgattttcaccccaaggttcacttatactggcccccttacctaggattctgtttcccaccttacaccacacaccctacctgggtgggagatagataactgctatccatccttcagctttcagctcaaaaaccacagaaaagtattccttgacccccatatgaagtaagtttcccatataatatgcctttggagcacttaatataataaaattaaattttatttgttggctggttgcatattggctgtctcaccctctgaaatgtaagccctatgagatcgccaactac

SEQ ID NO: 196112 - DNA, 472 bp, Homo sapiens
gtaccaatgaaatgcaacatgtaatactgaaccagacgatggactagaattttgattttcctttttgccataaaggacattatttggacaattgccagatgtgaataaagtaatacatactcatggtattttggagtcaaagggacattatgtctacaacttgctttcaaatgattcagaaaaaatactgtgtagagagaaaatgataacagcaaatgcggaaaatgttaataacgggggcatctggttttagggtatatgggagttctttgttttatccttgcaacttttctataaaccagaactattttaaaattttcaaaaagtataaaacataagtggcagcatttggtagctactgaaaagaaacagcagtttcttcagtctattaaatgaaaatacaagtaatagctaaataactggagtgtcatatagtgcttcttcaggccccattcatgggggcacttccccc

SEQ ID NO: 196113 - DNA, 517 bp, Homo sapiens
tctctcaggctcatgtgattcttgtgcctcagccacccgagtagctgagattacaggctcacgccaccacgcccagataatttttgtatttttagtagagatttcaccatgttggccaggctggtcacgaactcctggcctcaagtgatccaccagcctaggcctcccgaagtgctgggattacaggcaggagccactgcgcccagccttaattttttcttttcacgatttttttccattttaaattaaatgcctttggattttaaaaaatgcaacattcctctgctatcttattaaacgtatccttgaacttcagggagtggagaataggtgtctggaaaatgagacactgcttttctttgtttttgaacttaacaagttccacattcagagatctcaattacatgcccttcattgaatgtaagtgtgatgcatttaacatacagcttgtgtgaaagcaggatattataaccacaaacatatctgactttaaaattaagtaaaatactcaacatag

SEQ ID NO: 196114 - DNA, 530 bp, Homo sapiens
atgtcacgagccagcacagatatatgaggatagaaggataagcaaaagactccaccttttgatgggaggacaggcatacgtcatattgcacaaaagagtgcgtatataaaaatacagccagaaattgtgtctatactttgacatcttctatcttctacaaaatagagaaatttttatagtacctatattttcaactacaaatcatcacagaagttctgaaggacaaaagtaggtactagcttgcattttccccaacatgaagtaatattactctgctgcttcagtcacagatttcaacagaagaccaagatccagactcaacgtctgataccatcatttaagttgcttggttgggtgatttttctgtgttttaagagccttcaacacttttctatttgatctaatcgataaatttccatctaatttgatatttttacctacaagagcagctttattttatttgtctattgtttgttgagatggagtttagctcttgttgcccaggctggagtgcaatggtgcaatctcgg

SEQ ID NO: 196115 - DNA, 421 bp, Homo sapiens
tagagaataacataggagagaacacgttgaaacccagtggtaggtaaacttttatgttacacaaatatcttatgagaactctaaaatttaaaacaaatgttgattgaaactcatcacaattaaaaacttctgggccaggtgcagtggctcacgcctgtaatcccagcactttgggagtctgaggcaggcggttcaaactgaggtcaggagtttgagaccagcctggccaacatggtgaaaccctgtttctactaaaaatacaaaaagtagccaggcatggtggcacgtgcctgtaatcccagctacttgggaggctgaggcagggtaattgcttaaacctggaaggtggggtttgcagtgagcccagatcacaccactgcactccagcctggatgacagagcaagacttcgtctcaaaaaa

SEQ ID NO: 196116 - DNA, 249 bp, Homo sapiens
gtaatagaagaatttagttaagcaagaataaagacctagggaggcactggctgtaggggtggaagaggcactggctgtagaggtggagaggaatggattcatctgggacataattaggccatagaatcaacagaacttgaccaactgactgtgagaggaaaggaaacaatccttctggagcactgaccagggtgtgtggcaacaaaagaggtgaaactgccgcagcagttagcgtgacccgtggcagtg

SEQ ID NO: 196117 - DNA, 788 bp, Homo sapiens
aaatggtctgaggtctattcctacttatcctactagattgcctcttggtgcttattcaaattcttgatcctgaattcctttaatcaagtaattatttcaaagaacataattaggtttccatagggtcgttacttcttttatattcttggttctttttaccttatccacccgtatctttattttcagggatttccatatccatcagttgggactgaaaactaatctgcattaaagtagcagttgttacttgatatgacttacttttttttttctcatggatatttgaatgttacaggatttgggaaggtaatttttttaaattactgataaaaatcttgtggaggattctgattctcaggtctggaataacctgcattttttgaataagtggagcattcacatgtggtttaaaattcaaaatatgtaattgatgacaccatatccgagccattcagtttccttctcaggaggcagtgttgttagtgggtgtgtctgttgtgtgtgttcttctagagatagtttatgtttatataagcaaatgcagatataccttcctctcattttacatacttttcagttttctaagcctttagcaaaagtatataaattaatgttatgggattttacaaaaggcagaagccttcaagactataagcagtgcagacagagtgatttgaatgataggaagtaggtatgctaagtaacctctgaaatgacacccgcacaccacaattttcactttctgtgcacagagatggtactatctgtagatttccagagttttgcca

SEQ ID NO: 196118 - DNA, 193 bp, Homo sapiens
aaaaaaaaaaaaaaaaaaaaaaaaaaaaaaaaaaaaaaaattaaggttttcagtggaaaggaggaaaaaaaatcaaagaaattttgaaaaacaacttaaattggaaatctatgaactttatttttgaatatatttgcttactctgttttttaaaggactagaatcaaaggcaatctgacagcggcacccagat

SEQ ID NO: 196119 - DNA, 227 bp, Homo sapiens
agcagaaactaacctcaaaagaataggtaatagtgcaataataagaaatgtttattacatttgtttttaatattttatttttttagtttatttttattttttattttagtttttttagtttatgtaatttaatttttaataataattactttaaagactggcttgcaaaattcatgaaaatctaataagtaatcatttttgctggctgactccatcacactattgaa

SEQ ID NO: 196120 - DNA, 532 bp, Homo sapiens
aatgtcaatagtgcctagattgagaaactctgatttgtgggaattgaactcagcaaaccaggcttgggactgggtctcttgaagctttctaagttaattcatgttcatccatctgtgcaatgaaaaggaggagatgggaaagggaaataataataaaatcacctgccctatcaacttcagtgagttataatgaggatttcagcacaattagataatttgagggaaagtgctatctaaactactatgcagattttattataggactcatggacttgcctccagagtttgtacatggaatgagtttttaatacattttggatccataggagacatgaatgatcctgtaccttaaaagttcattttgtttttattcagaaaattggaaaggtcattctgctacataaagcatctgcatcagactccatattacaaatgaaccaaaaagcctagaagctcctcaatgcaaatatttgagttttggccaattctcatgataaggtcacattgttagcccttgagattattaaaaaaa

SEQ ID NO: 196121 - DNA, 424 bp, Homo sapiens
taggtgtctctacaggatcccccctcgaaacccaatattgtcacatcgctactgctggctgccaggttgctcggttatgatcagtgggcagagtggactggagctgttttttcttttggaaaaacatttctgcagtacttattacattctcagtgatttgcaaaaatgctctctctcttaacccaatgacagagctacagtttttgttcccatttaacaggttaaacaattgagatacagggaactaatccaaagtctcacagtgacagggacttgaacccaggtcatctgtcaacagagtctgtgctcttagctgctacattggatttctcatccacaaaatgtctaatcctatgtgctctttttatttgttgtagctctcctgttgattcagagggaaaactgatatggcatattattacac

SEQ ID NO: 196122 - DNA, 420 bp, Homo sapiens
atagttgagattttgggaaatgaggtctaatctgaagtaggccaaatatctaaaataatattagacattcagatccatcctaaaaatgatataaataatttaaaaccagagtaattttttactatcaattatatgaaaataatgaagtagggacattctaataggaaagtctattcaccgaagctttgaataaatgtttactgctcgtgatggatattcattcaacaatcatttctgaatggcaactgtgaactaacactgtgttaggcttctgacaacagaatacctttatagagcaacatgagatttaacaggaaaaagatagaacaaccaaaaaaaaggagtcaacaaagtaacggatgttaatcatagcactcctagtggtgaatacaaagttggaattctcagagttattggtta

SEQ ID NO: 196123 - DNA, 759 bp, Homo sapiens
gcagtcacgtgggggatgagggacgataccagtgcgtggccttcagcccagctggtcagcaggccagggacttccagctccgagttcatgcgccccccactatctggggctccaacgagacaggcgaggtggccgtcatggaggaccacctagtgcagctcctgtgtgaggctcgaggagtgcccaccccaaacatcacctggttcaaggacggggccctgctccccaccagcaccaaggtggtctacactaggggcggtcggcagttgcagctggggagggcccagagctccgatgccggcgtctacacctgcaaggccagcaatgctgtgggggccgcagagaaggccaccaggctggatgtttatgtcccacctaccatcgagggcgccggtggaagaccatacgtggtgaaggctgtggctgggaggcctgtggcgctggagtgcgtggccagaggccacccgtcccccacctctcctggcaccacgaggggctgcccgtggcagagagcaacgagtcgcggctggagacagacgggagtgtgctgaggctggagagcccgggggaggcatccagtggcctgtacagctgtgtggccagcagtcctgccggggaagccgtcctgcagtactccgtgcgaggttcaggtgcccccacagctcctggtggctgaaggcttgggacaggtgaccaccatcgtgggacagccctggaacttcctgccaggcctcaggctccccagtacccactatccag

SEQ ID NO: 196124 - DNA, 714 bp, Homo sapiens
atacccactctccgcgcagtacacgttaaccacaaaccacaccaccttacacagtgaagcacaagtgatagaggttgtcaagtctgcatgtggccctttcccaaatcctctggaagaaggaatctcatttgatatttattcaacattcatagagccccccacaatattggatacggaaatgaagaggttggatcaagaacaaggccctgaggagtctcagccagaaactgacacctcagacatggatcctttagttggtttcaccattgaagatgtaaaatcagtgctggatcaagtcacagatgacattttaatcggcattcagaccgagataaacgaaaaactgcaaatacaggaagaggcctttaatgcacgaatagaaaaattgaaaaaggcctaaggacttggtacaaggagagtgatgctaaacttcacagaaacaaacaaaaccagccagaataacagactctctggagcgtcgtgtctccatcacttagttgtgaaaggaaaaccaagccccactttttattttcctaagtaattagaaaagtattggtcccaattttgctatctcccatcccataacagcctctgaatttattgcaccaagtgtaatgagaacattttgtatacaagagtttgaaaaattatatataaaaatacaattacttttatgatagtcctttgacgttttgactaataaatcctattcat

SEQ ID NO: 196125 - DNA, 1254 bp, Homo sapiens
acgaggggcagcgtctctcggccgagattgcggcgatgtcgcaggggacgactccctgggggccgaccccggcaggccgaccccggcgggaaccacgcccgaatcggagagagacactgaattccaggagcatgaaaagattctgtctccggattttctttcagttgcccaaatcactgatttgttaatggaggacatcgatggagttcaagaaaaactgagaatatttttgaatttcaaaaaccttgaaacttgtttaaaggatgccattctactagattattatgtatctggatttttgtgggctagaggaatggatttctctattattcagtattcaaaatttatgactttactagctatgtcacttcaaaatcttaaaacactacatatgtccttagaggaaagcataaaatggcttggagaagttatggctgaaataggaccaacacattcgcaaaagagtgaggactggaatatctttgatgtaaaacaagccaatgctatcattgattacttaaaaatcagcttatttcaacactacaagctatacgagtttatgttctactctgccagggaagaaattgtgataggaactgagcaagtgatagaggttgtcaagtctgcatgtggccctttcccaaatcctctggaagaaggaatctcatttgatatttattcaacattcatagagccccccacaatattggatacggaaatgaagaggttggatcaagaacaaggccctgaggagtctcagccagaaactgacacctcagacatggatcctttagttggtttcaccattgaagatgtaaaatcagtgctggatcaagtcacagatgacattttaatcggcattcagaccgagataaacgaaaaactgcaaatacaggaagaggcctttaatgcacgaatagaaaaattgaaaaaggcctaaggacttggtacaaggagagtgatgctaaacttcacagaaacaaacaaaaccagccagaataacagactctctggagcgtcgtgtctccatcacttagttgtgaaaggaaaaccaagccccactttttattttcctaagtaattagaaaagtattggtcccaattttgctatctcccatcccataacagcctctgaatttattgcaccaagtgtaatgagaacattttgtatacaagagtttgaaaaattatatataaaaatacaattacttttatgatagtcctttgacgttttgactaataaatcctattcat

SEQ ID NO: 196126 - DNA, 1027 bp, Homo sapiens
acgaggggcagcgtctctcggccgagattgcggcgatgtcgcaggggacgactccctgggggccgaccccggcaggccgaccccggcgggaaccacgcccgaatcggagaaaactgagaatatttttgaatttcaaaaaccttgaaacttgtttaaaggatgccattctactagattattatgtatctggatttttgtgggctagaggaatggatttctctattattcagtattcaaaatttatgactttactagctatgtcacttcaaaatcttaaaacactacatatgtccttagaggaaagcataaaatggcttggagaagttatggctgaaataggaccaacacattcgcaaaagagtgaggactggaatatctttgatgtaaaacaagccaatgctatcattgattacttaaaaatcagcttatttcaacactacaagctatacgagtttatgttctactctgccagggaagaaattgtgataggaactgagaggttggatcaagaacaaggccctgaggagtctcagccagaaactgacacctcagacatggatcctttagttggtttcaccattgaagatgtaaaatcagtgctggatcaagtcacagatgacattttaatcggcattcagaccgagataaacgaaaaactgcaaatacaggaagaggcctttaatgcacgaatagaaaaattgaaaaaggcctaaggacttggtacaaggagagtgatgctaaacttcacagaaacaaacaaaaccagccagaataacagactctctggagcgtcgtgtctccatcacttagttgtgaaaggaaaaccaagccccactttttattttcctaagtaattagaaaagtattggtcccaattttgctatctcccatcccataacagcctctgaatttattgcaccaagtgtaatgagaacattttgtatacaagagtttgaaaaattatatataaaaatacaattacttttatgatagtcctttgacgttttgactaataaatcctattcat

SEQ ID NO: 196127 - DNA, 748 bp, Homo sapiens
acgaggggcagcgtctctcggccgagattgcggcgatgtcgcaggggacgactccctgggggccgaccccggcaggccgaccccggcgggaaccacgcccgaatcggagccgcccctttcccttcccggtaccggtgccggtaccagagacctccgagcgctcattcccagtccgcggagtctgcggccaagccaaatccggtctccgaagaggcgccgcacgtctggccccggctgaaaactgagaatatttttgaatttcaaaaaccttgaaacttgtttaaaggatgccattctactagattattatgtatctggatttttgtgggctagaggaatggatttctctattattcagtattcaaaatttatgactttactagctatgtcacttcaaaatcttaaaacactacatatgtccttagaggaaagcataaaatggcttggagaagttatggctgaaataggaccaacacattcgcaaaagagtgaggactggaatatctttgatgtaaaacaagccaatgctatcattgattacttaaaaatcagcttattgcaaacacatacaagactatacgaaggtgatgttcgtactctgaccagggaaagcaaattgtgcataggacactgagcacagctgaatacaagagatgacaaggtcttgcacatgtgggcctagccccaaattcctatggaagaaggaatctcaatagggtaattaactgaaacgtccatagagccccca

SEQ ID NO: 196128 - DNA, 980 bp, Homo sapiens
acgaggggcagcgtctctcggccgagattgcggcgatgtcgcaggggacgactccctgggggccgaccccggcaggccgaccccggcgggaaccacgcccgaatcggagcactacatatgtccttagaggaaagcataaaatggcttggagaagttatggctgaaataggaccaacacattcgcaaaagagtgaggactggaatatctttgatgtaaaacaagccaatgctatcattgattacttaaaaatcagcttatttcaacactacaagctatacgagtttatgttctactctgccagggaagaaattgtgataggaactgagcaagtgatagaggttgtcaagtctgcatgtggccctttcccaaatcctctggaagaaggaatctcatttgatatttattcaacattcatagagccccccacaatattggatacggaaatgaagaggttggatcaagaacaaggccctgaggagtctcagccagaaactgacacctcagacatggatcctttagttggtttcaccattgaagatgtaaaatcagtgctggatcaagtcacagatgacattttaatcggcattcagaccgagataaacgaaaaactgcaaatacaggaagaggcctttaatgcacgaatagaaaaattgaaaaaggcctaaggacttggtacaaggagagtgatgctaaacttcacagaaacaaacaaaaccagccagaataacagactctctggagcgtcgtgtctccatcacttagttgtgaaaggaaaaccaagccccactttttattttcctaagtaattagaaaagtattggtcccaattttgctatctcccatcccataacagcctctgaatttattgcaccaagtgtaatgagaacattttgtatacaagagtttgaaaaattatatataaaaatacaattacttttatgatagtcctttgacgttttgactaataaatcctattcat

SEQ ID NO: 196129 - DNA, 614 bp, Homo sapiens
cttctgggctcaagctgtcctcctgccttaaccttccaaaatactgggattacagacatgagccaccacacccggtctcttctaaatttttacttgacacttaagagtagtaaaaaacatactttcctttttatcttacattaatggatgtgtttaaactggtgtttaataaaataatggaatgtggccaaatcatatatattgtttgacatttactttaccaaagtaaaacggaaaggcactggtcttcaatcttaacattgtatgcttaataatacttttttttaaattatgaaataatcactttcatggtatgcttactttgttccagggactattctaagcactttacatgtattaactcattaaattcatataacattttatgaggattactgttgctatcttatgggtgaagaaattggcataaagaaattaagtaagtggcccacaaattacttaataatacaaaatctgtcatcactctatatctaaatccctaaaccttaagcatgcaatgaggacagcaattgtgcctcttaattttcagaaagaatccttatggatattacatactctgtgtccacacaagttcttataaagtgaggtgctaa

SEQ ID NO: 196130 - DNA, 809 bp, Homo sapiens
gttgtatttaagaacatagtaaccacaagccttagaaatgctgcagttcactagcacacgcacctaaggcacagcagcaaacaggagctcaaggaacaacttgggcattagcctggtgcccatctctcctgctggaattcctgcacagctgggatggagagggtcagcgcccccacctgctgcttccaggatgggctctcccagtgtcagagccagtgagagcctgagcagtagcagactccctggacgcgtgtgttgaagagggagaccggaaggacagatagcacatgtgacatgtcatgtttaaatggtaggataattgtattttcaaatctttaattttgcttaaaacagatgtttgacggataaatgttgtagaatattttggctgaattgcatattttttaaaagaagggctgattttatgatgtaagaaatcttctaggaggggtgatccacacagcagcgcaggtgggtcctgggagtaaatgccctcagaagggatcaggaaggcagcagaggccgggagcggtggctcacatctgtaatctgagtacttttggaggccatggtggatgtattgcttgagcccaggagttcgagaccagcctgggcaacctggcaaaaccccatttctacaaaaaaatacaaaaaatcagctgggcttgatgggggcatctgtagttttagcgacttggaggctgaggcgaaggatccacccgggcttgggaggtcgaggctgcagtgagttgtgattgaaccacagcactccagcctgggtgacagtgcaaaaccatctcaaacaaaaa

SEQ ID NO: 196131 - DNA, 1022 bp, Homo sapiens
taaaaacagaagcatttccacagaatcaagccattttgggttcacttctgggataatcatacaacagatatctgagcagaatctgctgtaagcaaagttgtgagacttagcacaacctcccttgcattgagaaaggtagaacctttctaagcattcagaattctttcttccctgccccatgcagattaaagtaaaacctttcatacatactccttaagaaataagcaatagagcaatagtatgaagggcaagaaaaagtgaatggatgggtgtctcaggtgtttcagggaaacattaatacagaaaagcccctcaccagaatgaagaaggaaagagagacagcatacactacctcatcccagtgtaagaagaaagaacaggttctttctgctccaattagactgaataaaatgacaaaacccaaatccttctggtaaaatttgttttaaagagattacctaaagattaactcaaatgactgagcagagtgttaaagcccaggctagatattatggagagaaaacagatttgctgtaaaaatgctatctaagatatattcaagcacagctccctaacaactctgacacttagaaacacgctgattgcatttcagaagaggtaaagagatagggaccagaagtcagaatttaaaaaaagagtgggcaatgattggaggtagaagaggtgaagaagccacaaacacaggaaaagggggaagaggcaaaggaatgactatgttatgtacatgtatatatggaaagcacacactcacacacccctctaaagggcacttctcatcactcaaaactttttaaaaagactttacttactatgtggcttggtttgcatgtgtgatgatagacccaatattacatatataaatatataaccacatatataccacatacacacataaacacacatacacaaatctgtacaacacgtttatcaactacacaacataagcactgaccaatcaggatggagcagagtccttatggtcactgctggtttagttgcca

SEQ ID NO: 196132 - DNA, 146 bp, Homo sapiens
ggtggtgggtgggaagcggagcaagtaaatataacagatttactgagtaaggtttaaacttgatggccatgacaaaaactttcattcctatggagggaaaagtgtttcaaataacactctctagcccctaacactctcccctgctt

SEQ ID NO: 196133 - DNA, 793 bp, Homo sapiens
ggggaacctgctgctggtgtgtgtgtggtctggagaggcgtgtgcctgtgtaggggaaaaatctgggtgtatgtggaaaggttgtattgcagctgaaggaggctgggagggtcttctgtccctgggagacactgaataatccgtgttgtgtatctgcgtttcgactgtgaactctttcatgaggttaggggtggaattcctacttggagcgtcatgtcagtgttcaaaagctctgaatcttgcagcatttccgagtttggattttattgggtttgggatgctcaacctgtatctcactaatagtcaacacaagggattttatgtgtgtggaagacccactgtcagggtccaagagtatcattctcagggaggagaaacccagaaaccgggggcacagacaagtcatttggcaatttgacaaaattaccccagttcattccttcaacataacaaatacataacagtaagaaatcatcaagtggctatttcctgttagttactatgcttcatgttggtgatacaagaattaaaaagatactgtcacaaatcaaaacaaaaagcacaacacatatattaggatggctcaaattcaaaaaacggacaataccaagtgctgagaaggatgtgaggtaagagaaactatcgttgctggtgggagtacagcatggaatagccactttgcaagacagtttggcagtttcttacaaagttaacaagattaatcctatcatacaacccagcaatcatgttcctgcagatgtactcagttgatgtgaaacttatgtgcacacaa

SEQ ID NO: 196134 - DNA, 453 bp, Homo sapiens
gagcaatggtttttttaatgccaagtgtataattatatgtctgtaaagcccgtgaaagttgatgggaaaactatgacagacaatttagcaaagttacagatataagattgatatgcaaaaatcaatgttctttatatatataaacaaattccaactgaatgatgtaattaaagagaagacacctcttcagtagcaacaacaaagataacgtagaggttaaatgagtaaaatttacacaaggaatttaaaccctttaaaaaacacagaagtcgactcgaacagagccttttttgtcaactatgacatttttgaagaatcagctggccgggcgcggtggctctcgcctgtaatcccagcactttgggaggccagggtgggcagatcacgaggtcaggagatcgagaccaacctggctaacacagtgaaaccctgtctctacttaaaaaaaaaaaa

SEQ ID NO: 196135 - DNA, 230 bp, Homo sapiens
catccttccacctcagtctcccaaagtattaggattacaggagggagccaccattcctggcccagcctctgcttttaaagggctcttaggccacatgctggttttttgtgttttttttttaagcttactctattcaaagtggagatgaaggatcacaggacaactttagtgccttatgcctaggccaaaggaaacacgtagcttttcacaggtggtagataaggctctgg

SEQ ID NO: 196136 - DNA, 404 bp, Homo sapiens
tttggggacttagtcaaaaattctttgccaaggctgatgttgagaaaactatttcttaggttctcttctaggatttttctagtttgaggtcttatatttaaatctttaatccatcttgagataatttttgtatatggtgaaaggtaggggtccagtttaattcttctgcatatggctagccagttatcccagcaccatttattgaactggggagccctctccccattacttgtttttgttggccttattgaagatcagatcgtaagtgtgccactttatttctgaattttctattctgttccattgatctatgtgtctgtttttgtatgagtaccacactgttttgtttggtatagccttatagtttgaagtcagatagtgatgcctccagctttgttcttttt

SEQ ID NO: 196137 - DNA, 313 bp, Homo sapiens
cttttccatccactgattatcttaccaactttaacaatgaaaaaagcatcaacgtatatattgggaccgttatagaagtttacgccaaaaatgttaaagagatgttttatatatacttgacacagtcatattatagtgagcaggaaagaacctttctatttaatatttgttctcccaggtcatgtgtttgctgaaaagccatcagttaaagcgaggcggccaggtgcactctctaggtggagaaattaagagcctgttgctctctttacagtgattttagttttgtgaggtttcttgtttcttttaaaagaaa

SEQ ID NO: 196138 - DNA, 450 bp, Homo sapiens
ttctgttaaaccttttccatgacaggcaactagaatagtagaaagcataacatggatatgcctgatttttaataaaaaataagatcacactattgatttagtgtgaatctcttcctgacaagcattttgttgacttgttaatctttttggttgtccagtgtctactggtaacaatggactataatccaaggtttcttccctggatcaaaactatagttttcagatatagtttgaattactacccttcacaccatttcctcagaatgagctgacagctagatacccttatatatcaagataacttcctattaccatgccatagaatcagaaggtatttcattttcactaccttttttcatgtcctcccatggaaatgcatctgagaaactgcttcttgtaaaacatgagcaaatgagaatgagttgaatatctgttcaattcagttcaatt

SEQ ID NO: 196139 - DNA, 392 bp, Homo sapiens
aaaggaatgatttggccaacatactattcaggcagcagtacagaagatggatttaaagggataggactggcagaaggaagtccaattcggagacagttgtaattattctgacagaagatgataagggcctaaaataatgggatgaaagcggtagcaaatctggagaaaacagactacatttagattatgttgctggtccagagatcaaactttgacaaccactaacctacactggctagggtttggcaaattttttctatgaagagccaaagagtaaatatttcagactttgtgtgtcaaatacagtctctacagcatttcatgtttttgtttgttttttaaacaacccattaaatattaacaaccattcttagctactggaccttaccaaa

SEQ ID NO: 196140 - DNA, 357 bp, Homo sapiens
aaagaactagacaatctcaagtgttccttccagctctgctgtttatctgaaaattcacgacagacactcagtgatacagaaatgtgtgctccagaccatgtgaactggagaacagaatttggttctcttcagcttcaattcacatttgggttcatgtgttttgctgccttccttcttttctctacgtattgacacctaggaaaactcaagatgccagagatccctgacacctggctcatatggtaggctgcgtgatgatggagccgagagctgaaccgcccaaggacagagggcctcagcaggaactttgggaatcagcatattgatacctaagtggagacctctttccagacccag

SEQ ID NO: 196141 - DNA, 515 bp, Homo sapiens
gcctcagcctcccaaagtgctgggatcaaaggtgtgagccaccacgcccggccacctctttcatttctaatattagtaatttgtgtcctgtgtctttcttccttagttaacctgctagaagcttatcagttttattgatcacattgttcatagtatttctttctttctttttcttttttcttttttttttttttttttttcgagacagagtctcagtctgtcgcccaggccggagtgcagtggtgcgatcttggctcactgcaacctccgcctcctaggtacaagcgattctcctgcttcagcctcccaagtagctgaggttacaggtgctcgccaccatgcctgactaatttttgtatttttagtagaaacggggtttcaccatgttggccaggctggtcttgaactcttgacctcaggtgatccgcctgcctggacctcccaaagtgctgggattacagatgtgagccactgtacccggcctgtttatagtatttctttattatccttttaat

SEQ ID NO: 196142 - DNA, 505 bp, Homo sapiens
ttgagctaaaatttctctgtatgtaacttctccttattggttttctttatttccttggcagattcaaggaggtaatggccatttttttctgaagtcccagtcccagttaacctactaagtcctacatattggtcaggatgaaggtcagagcatctatattttgggtttcttcctaccttcagggagacctggtgtcagttcttagctgagtgagatggccagcacgcatcccccagggtttgtctggggatccatcttgttacttgtgccagctcctccacctggctaggataattccctctcctgtcctcactcaggtggggaagcccttctgtgccaccagctatcctgtttcttgtaagaggatttttaatgtgggaaatcatggcaagaaagaggtgccaggcagctttaaagcaccaagagaagaactccaaacccatgtcataaacactcaagaaaaatcagcactgttctacatgcatacatgtagaacatgactttc

SEQ ID NO: 196143 - DNA, 187 bp, Homo sapiens
gtgtcagggcaccagattcagaaaattgcaccacaatcagagtccagattctggtcagagccctgtctcttaccagctgcgcaatcttaggcaaggccgtctcttaacctctctgacttccagtttcctcactggataaaggaaacctctgctgccagcacgggctacctgccctacctactcagag

SEQ ID NO: 196144 - DNA, 123 bp, Homo sapiens
gtgttctgaaatcagtatcactgggctgtaaccaaggtaatacactccctctggaagctctaggagggaatctgttcctttcttcttccagcttctagtgagtaagcattctttggcttctgg

SEQ ID NO: 196145 - DNA, 755 bp, Homo sapiens
aggggggacgatggcgggacgggtggccgccggggttccagccctgcgcctgctccggagcaccgggcccctctcgctgaccccctcgtcccaggaccccgcaggcccgagtgcctgggctcgtcctctttcgcgcccgctgccaggtgccaggccgcgcagtgctgggcggaggacagaagtcggtcctaggccccccaggctctgaccttctttcccaggatgaggtggggccaccatttgcccagggcctcttggggctctggttttagaagagcactccagcgaccagatgatcgtatccccttcctgatccactggagttggccccttcaaggggagcgtccctttgggccccctagggcctttatacgccaccacggaagctcggtagatagcgctcccccacccgggaggcatggacggctgttccccagcgcctctgcaactgaagctatacatgctgtgcacctgtctggaacctggctgagtggttcagcctggctgccagggaggagcgccagtttggccaactttgccctagacacggtccacgttgacccttgtgatccgctgcagaggtaccccctgatgagctaacttcgcccatccgctgtgagctgggcactggatgcatcatggcaccccgaggcctgtggtccccctcattggttctttgttctacacgtctttaacccggattgccttgttggccggcccgggttgcagacacgcggtgctgtttggcccgtcgg

SEQ ID NO: 196146 - DNA, 582 bp, Homo sapiens
tgatccgcctgcctcggcctcccaaagtgctgagattacaggtgtgagcacctggcctactctttattttttcttatggtttgtgcttttaaagttttatttaagaagtccttatctttccttaggtcttagatatagtctcctgttttttctatacttttaggtcctttatttacctagagactactcttatatctgatattagaagggtatccaattttaattttctctgtataatgggtcactttccccaacaccttctttttttttcccctttgattcgtagtgactgcaaactcttcacctatattgtcacttccttcattatgccttgtctctaacattatagccccataactggccttcttgctgctatcctactgctctgtagtatcttctcactacagctagtatgattgtgtataagaagtcagatcagtccaggcacgatggctcatgactgtaatcccagcacagaggcaggcagatcacttgaggccaggagttccagactatcctggctaacacggcaaaacccgatctctactaaaaatacaaaaattagctacttgggaggctgag

SEQ ID NO: 196147 - DNA, 318 bp, Homo sapiens
gttttagcagagacagggtttcaccatcttggccaggctggttttgaactcctgaccttgtgatccacccacctcagcctcctgaagtgctgggattacaggcataagccaccgcacccagccaataaaacatttttatattttattttgctttatttgtctttgtatcttctatagtacccattttcaagaaatatatattgaggatctgttctgctcagaaatggaatagaatttgtatgttttaaccaggtcaaagtccattcataaacttaacatttattgtcttattgctgtatgagaatactgtgacagata

SEQ ID NO: 196148 - DNA, 216 bp, Homo sapiens
attattacatgagtagagatgctttgtaggcagagaaaggtggctgactgagtctaatactcacggggaagagcattctagtttgaccacttagaaaaggaactgctaatttggaagatcttgttagcataatttattttgtcacttttaagacagcccaccaagaggcagtatattgtggtacttaaagagtggctctgaggctgggcgcagtgg

SEQ ID NO: 196149 - DNA, 249 bp, Homo sapiens
ggggcccagcctgtccgtgggctgacactgactgtgtgtctgactcttctgagtgtccctcgctgtcactggcctggctaccactggaccctcggtttccactgtctccgactacagatgaatcttgtctgcgcccagtgcctgagtctgtggagctgtctgctgactgctggtggcgggatccatgtctttctcctggacttgaccttgcctgttcctgggatgatgcagcctgtccaccagaggaag

SEQ ID NO: 196150 - DNA, 128 bp, Homo sapiens
aggatctggccaggcgcagatgccggaattacaactgcgcactaccgcgcccagccaattttattgtagagacgaggtctccctatgttgtccaggctggtcttgaactcctgggctcaagtgatcct

SEQ ID NO: 196151 - DNA, 311 bp, Homo sapiens
cccttttgagaaaaagttagctgacccctgccctatattgcaagaggaattagtattagtattgggaccattgcaaggtagattgtaaggtttgttgtgtgggaaaaagatcgccctccaggaggcccagtaatcttcaggttcatgccagttggcagagagcctgactaagccatttcttggctgggtgtctggacatgctgtgaggtgacattttagaggcacacaaacaagggaatttcatgtcttttctttctcctgcccatcatcacaagaacagggaaatattcctaaagcagatacatatcaga

SEQ ID NO: 196152 - DNA, 310 bp, Homo sapiens
gtttttgtaacttcttgtgagtctaattttattttaaaataaaatgtttaaaagtatacatggtaacagactttctttggggaggggaggtagttctgcttagcagacatacctcctttatgacaccccttgattccttctggagaggaagagaataaaaattatcccactgtgaacaggcagacttgaggggattctaaatcaaggcgctttcgtatttccaagccaaatgcatccacagggtctatcacagacgacttcagcaagaatattcctctcatagccaaagtatagggatcggactcaagct

SEQ ID NO: 196153 - DNA, 290 bp, Homo sapiens
tataaaaacaagagtaatgggctttgaaatgagtttaaatattacttctgctacctcttatatttaaataagtcattttgagtttcagattctccatgtgaacaacaatttttccaggatattaaatagagtttaaaatatgaaagtattttgattagtctccaagagtccttaaaatcctaaaattccatgtgctttaattttagctatagaaaaatggggctggcagaaagaaataaaataatagaagaaaagaacaccaaggaaagcagagaagaaagtaatcagga

SEQ ID NO: 196154 - DNA, 294 bp, Homo sapiens
aggtgacatttgaacagtgatctagaggaagcagggccttgaggatatgtgagaaaacaattgctgaggcagtgggcctgcaaaggccctaaggcagagcatgcctggtttgttagaggaaggaggccagtatgactgggtagcagcaaggtagggagatcttggaaagagctcacatcagagaggttgtcggggactcaatcaggtccactataaagactttgatgtttactctgagtgagctgggaagctgttaaagggttttggtttttttgttttttgtttttttttttt

SEQ ID NO: 196155 - DNA, 294 bp, Homo sapiens
gaaagtatctgtcgttgggaacacacatgacctttcaggaggtaattgacctgcactgttggtaggagcatcttatgtagccatctgaagacagattggaacctccttactcagaagggttcgattgtttggccaaggaatgtcaactgttgctgcagaataagctgggtggttacctgctgaccccttttcattcttttctgctttattagaaccttgatatgagaataagttcagcaagagttggagaggagagtgaaatcattcccaggcttcgtgtggaggtctgtgctt

SEQ ID NO: 196156 - DNA, 263 bp, Homo sapiens
ccactgctggtagattcctgtttgtcacagtcagcctcctcctccgttcccatttaaaatggaaatgtcactggctgggaaagcacactctgtttctgacgtgggagcatggatgaactgatgggagtcctttcctcttgagcagaagaagatggacagtaaaagtgtcagtgactgaaggaagcatggatgtgagcacatgtggagcgtgagttggcggaggtggaactttctgacctctgtactttggccagcccagccct

SEQ ID NO: 196157 - DNA, 529 bp, Homo sapiens
tactcgggaggctgaggcaggaaaattgcttgaacctgggaggtggaagttgcagtgagccgagactgcgccactgcactccagactgggcaaaagagcaagactccatctcaacaacaacaaaaagagtattgaagtggctaaatattattggtgtattgtttatcttccctccaattactgcagtttttacttcatgtactttgaggctctgtttttcggtgcatataggcttacaaatgttatatcttcttgaaggattgacccttttatcattctataatgtccttctttgtctctagtaacattttttttgtcttaaagccaatttttttctgacattaatatagccactctagctctcttttggttactttctgcatggaatatttttgcatccttttactttcaacctatttgtgttttttaatccattctgccaatctgtgccttttagttagagactttaacccatttaatttaatgtaattaatcataaggatttacttctcccagtctatatgccatt

SEQ ID NO: 196158 - DNA, 646 bp, Homo sapiens
cgcctgcctcagcctcccaaagtgctgggattacagacatgagccatcacgcctgacagacagctaggttttctaatgcggatgataagggcatgaaagaggaatcaggcatgagcccaaggtttttgatcttagcagctgtaaccatggacgctgcatcagctgacatgaagttggtattgacataatattgactgtggatatcaagagtgttgttttggccatatgaagagtcagtgaccaataaatggtggcattaaatggataactagacatacaggatggggtatctgggagggtgttgatactggagacatccaatatttgaaagctaatgggtgaacttcagtaagttagttatgggtccatttaggaggacatgcttcagattttggtggtaaatcttttcaggggccaggaaggtgtgactacaggctgaggagtggatctcttacttacgtccctgagtgatgttattgggcttcctaaacacctgagagggtgtgagtgaacatcatggcaggatgtatcagacagtagagtttggaaggggacatagacatccgaggagagaatagatgagatagatgcatgcagaagcataggagtaaggaagatgacacttctgcctgagttggtgccaagt

SEQ ID NO: 196159 - DNA, 436 bp, Homo sapiens
catttagttaatctgagccagcattgatcagtttaaaactaatcaatatgattaatcagcaagctggagacagttctctttgaggtgctattgggaatacacaagtataaaaaatggtccctgccctcaagctagagataaaagatataaaccctatcaaccaaatggcaataaaagattgcaattgttcaaaacggaaagacaaggttggttcagggaatgcctgacacgcccttaaactcacagaaaactcaagaggaatccatgaagatctattttttcaaagacaattaggacaaccaaaacagaatggtgtctagggtgaaaggcagtattcaaaattaaccgcagaggtgtgcaggagcgccattagagactgggtggaggaatacattcgaacacggtggcaaatgttatgaaacaaatataaactgga

SEQ ID NO: 196160 - DNA, 594 bp, Homo sapiens
ctttcttagaagcccttagcagttgttcatgagctttgattttttaaaaactcctttggccttgcttttgatgccttgatgtgtttttttcatcacctttggttatatcagtaagcattgaagcaccctctctgctggtacttggtgtcttagcctgaagctccctttgacgttccctggaggtggaaagcactctttttattttgatgtcaccattttgtttttgctttgatggcatttgggcctggaatatagaccctctattggcaccggtagcctttatatgcctacgaggctcaaagccctgcctgtgcccaccgggcctgtctcataccaggaggctatttctctgtctgtcctggggaagccacagaaccagtgcaaaggagttgaggggtagtttttttattgttgctgttgttgggtgcccttctcaatcattgcctttctagatagccatctggatcaccttttcttcctaaaatgtgaaaaggcccacacccctatgcattttattgttcccaagtattatatgtttgtgtacatatatacatatgtatatatacacatatatatatgttttttttttaacca

SEQ ID NO: 196161 - DNA, 650 bp, Homo sapiens
taaggcagagacgaggaagttatgtactagggcagcagcactgaggatgaacggcagtgacaagttcagagaaacataccagaggagttctatctccagcaagggtggattgggtgactgaaactcactcttcttgcggaggacagctaggaaatatggacaaactactttttagaacacctgttgaaggcatcataaagctagcaggagagtgaagaatcattaggccgggatccaggggaaaatagaggccctggaggtgagcctgacatttggaacagctcctcccctaggggacatttgctgaatctggaggaagtggccaagaagctgaacagcactagaaagacatgagctagaggtcagggcctgccaggatgtgggggtctgtctggtgaatccccctcacttagaggtgagaccatgaaggacagcactctaagggtaaaagtggaccaaaagcagacagttcaccttcaaatcatcccaatactggaaattgaatttaagttaccccagattgctcatgcccagattgcaggtgcctatcagaagcaaacatgaatcctctctttaggaagataacatcagcagatgccacaaattatttctacaaactattttgcaaatgccgtgtctggcatacaata

SEQ ID NO: 196162 - DNA, 504 bp, Homo sapiens
cacttgggttgattccacctctttgctattgtgaatagtagcatgcatctctttggaataaggccagtctcctacataaccacataccattgtcacatctaaagaaatttgtaataattccatgatattatccagtattgactctatattcaaatgtccccagttatcatgaaatgtttgttatatttgtttcctcactaggccttaacctaggttcacacattactgttgcttgtatgtctttttaggctgttttatcatagaactgtatttccattcttcccatatgcctgtccccaaagatactgactgttttataagagtccagtgaccgggcgcagtggctcatgcctgtagtcccagtactttgggaggccaaggtgggcggatcacaaggtcttgaactcctgagctcaggcaatccacctgcctcggcctcccagagtgctaggttcacatgcgtgagccaccgtgcctggcctgagacaacacatattataacct

SEQ ID NO: 196163 - DNA, 578 bp, Homo sapiens
ccacctcagcctccagagtatttgggattacaggcacctgccatcatgcctggataatttttgtacttttgtagagacagggtctcgctctgttacttaggccggagtgcagtggtacaatcttggctcactgcaaccccaacctcctgggctcaagtgatcctcccatttcagcttcctgagtagctaggactacagatgcacaccaccacgcctggctaatttttgtagagacagcctcttgctatgtttcttagacttgtctcgaattcctgggctcaaatgatccaccagcctcagcctcccaaagtgctgggattgcaggcatgagccactgcgcctggtctaaaaacacccttttcattcagcactataggttttaaaaggcagtgttcccataagaaataatggcaaagaaaggaactcccagtcacattcagcaaacctgttttcccagctacattcatgcactggttgatgcaggtaagtgtacaggggaggttgatggagagataggagggtcctggaaacaaaggaagactgtgacattagatgactgcaatcgtggagactcagat

SEQ ID NO: 196164 - DNA, 252 bp, Homo sapiens
tcggcagggaacaaaagagggtgagatgcctagacagcccccacacacaaaagactgcaaacaatggggagggtgtactgctttcatgcctggccactgacactgttctctacagctaacaagcaaggcagggccggacccagcttagcaccggctcccgaagttccaaaaagtagctgtgtatctaactgcatgggcattttttgaaaaaaagcccatgcaagttcgggactaaccagccatgcaagtcgg

SEQ ID NO: 196165 - DNA, 704 bp, Homo sapiens
agggcttaaaacagtgtctggcacataacagctatgtaaccctttgttgctactattactggtagaagattcccagtaagaatttggagatatgccttatgttgttccgaagattaacctgaagacaaactaattaaattaagtgtattgtatataattaccaagaaaacaaagaaactgggtgaaagctttgggacagactcaccatgggcttggtaaggagcctgccatcccacagccagcgaaggaggttcagttacttcagtcaggtgctgccctcagactctctaactccctggctatgtaggtgctatgtcatgtctttttctcacaaagagatatggaaacttacgtgtgaataatttggttgtgaagagtttactgaagtaaatttatcattttttttttaacttgagacagggtcttgctatgttgcccaggctggtctcaaactcctggactcaagtgaccctcccgccttggcatcccaaagtgctgggattataggtatgagccaccacgctcagcctggaagtaaatttcatacggtttttccctcatggagacgttaagaaaaatctgaaagtaacagtttaggaagaacacggatagttgggatactaatgcaaatcttgttttcttcatttgcttctggtgtgattcattgctaaacatctttatttagtattaaattatactgattt

SEQ ID NO: 196166 - DNA, 246 bp, Homo sapiens
tggcttttacatatatttttatttctctaaggaaagtattttgtatgcttgacttctgaaatgccatatttatgcaaagcaagattggagttaatgggtccttgagctatatagtgcttcttgtactaaaattttgttagtacacgctcattgtagaaaaattaggaaatgcagagaaaaggggaaaaagaaagtcaccttgtatcttctcatttaagagttaatcactagttttcatagaaaaca

SEQ ID NO: 196167 - DNA, 1627 bp, Homo sapiens
taaagacacagtgcccctttttaatgagtctgattcaagatgaatgccagaccatgtttccttgtacagaggaatttgacctgcagagggaagaataaggcccagggtgtcaggactagcattaaggagcacctctgattttctggtggagtcgtgctaaagctggcccaaacccactcgggccgttgttcaccttttgcctcatctctgtgttcagtgacatcatgttggtggatgttgggggatgaacaccagtacaccactgtgtatgttgtgctctgggagccatagcttgggcacccattctagagcaaggatcagccaaccccagcctgagcctgtgcagcccattgcctgttcttgtaaataacgttttatccaaaggcagccatgccatgcccacgtatttacatgttgtctaaggctgctttgaccaaaaggccaaaagtgctcaatatctggctcttgaaggaaaaaatttgccagcctctcttctggagtttaccaggaatctggttctggacacatgaagatatcttgggttaaaaagagattaggggccaggcttatgtttgtaatcccagcactttgggaggctgaggcgggatcacttgagcccaggagtttttgtattttttatagagacagggtcccactcttatccaggcatagtggcatgcacctgtagtcccagctactggggaggctgaggtgggaggatcacttgatcccaggatttggaagctgcagtgtgccatgatcatgccattgcactccagactgagcgacagagtgagactctgtcttaaaaaatattattttaaaaaagagattagagtggttcaagttgtgaggaagcttcagcagctttcctatttccaagaaaaaaagcaatcaaataagggtgaggcccctttaccatatcctagttaaaattattgttatatcatagacatgcccgttgtcacgggacctgtgtcccaaatccaagatgtggtttctaaatggcccttctaggcatgtgccatttttctagcattgcaggaagtcagaagagcaggcttccccctccactgtgtttctgagccttccagagttcagctccatggaacctcttgggtagtgtgtgataagtttcctgtaaaggcagaagtggagtctggctggggctgaggctggggcaaggctaagggagccatctttacaaatggtttgcaggattcccaggtgcctgtccctgggtctccctcccaggagatggcctgaaaagctgtagctcttcccaggcccttactactcctgggactcccctgctccctctgctgtcctgctgcgagtctctgacctggcccaggctcttgctcagccatgtggttcctacctcctacctcatgccagcccagcctgtctgtggccctccctgcatgttgacgctcttctaacccccatcttggggagctggagctggagtggggcctggttagagcagcttgcctgagccgacgagggtccagcctggagcatcaggctctggaagccgagcttgtatgtaggttttcacactgtccgggagtcaagacacagtgggttatgaaatccatctagtaggtcaccagtcagcatttta

SEQ ID NO: 196168 - DNA, 416 bp, Homo sapiens
ctttctgttctttgtagcatttaatccttacaccagccttgtgaagtagatgttcttattaccttttacaggtgaatcaacccaggcttagagaagtgaagtattgtgcccaaggcgctaatatcagagatacaacctatacccaagtctgtgggacaccgaagtacgtgcctctaagacgtcaccaccttgccttttatgtggccttctctcaagaagaggacttagaggcttggggcgtccagtttctggaggcaggcagggcctcctgtggcctgatccattggctggagaggagtcagcaggggctggggtcatggcattgtcccagtgggaatggaaagtttgcctcctggaggcgccccctctgccccacgtctgattgcgggcagagtcttggacggggcagtggcaca

SEQ ID NO: 196169 - DNA, 473 bp, Homo sapiens
tatgaattcatcaagctaggagtaaacaagaaagaattccttcattgtgtggtggggtgaggagtcagcacactggaacaacttgtacatttaatgactccagattaatatttgcagattatatttcagtttggtatcattgaacaactgcttctattatatttcagtttagtatcattgaacaactgcttctatttgctgtttctgagttatttggctttcactgaatttcaagatctatctgggtgccatccaagtcacctagactttttgaaccttggttcccttatgaataatacccatctcccagggttggctgagaattaaacaaggtaatgtttgtgaaagtgaccagcacaggaactgccatgcatgaaatacttctgatgccttctcttcattccaattctataaatggcccttggctgttgatttcggtgctttcacatttcagctatggcaaaaggatattt

SEQ ID NO: 196170 - DNA, 608 bp, Homo sapiens
aggacttggatctcagacacttactgtttctataagagaggagctggatttgaacatgtaggccaaataaggagctgctgcccacccacacactggtcaggataaaaatctccacccagggccatgcacagtggctcacacctgtaatcctagcgctgggattacaggtgcttgccaccatgccaggctaattattttgtttgtttgtttgttgttgttgttagcagagacggggtttcactatgttggccaggctggtttcgaactcctgacctcaagtgatccgcctgcctcggcttcccaaagtgctaggattacaggtgtgagccaccatgcccagccctggctcttaatcctattttccaaaccactttctttctgtaattcttaagtgggctagttctccttcctcagaaaaattaatataaggctgttagcctgccactgacatctgaacatggatttatttagctaggttagattctgcagtggggggattaagtagcacactcctgatggtgactgtcttcatgaaaaaagaggcacagctatcagccagcagtaagaaggggagagaggctgtcggagatttgaggagagaggactgc

SEQ ID NO: 196171 - DNA, 650 bp, Homo sapiens
agtagtaggcctgtgtaaagaccagctatgactgaattcctcggctctgccaagttgtttattcctaatcttgtgatttcttgtttaacctcctaagttgtttttgtatactctttttatcactgcttctctctttttcacctcctctctctccttttcttcctgtgttaaaggagggtttatttcattccatttctagagccaagttatctttctgtctctccccgacacacaccataatgtcacttcttgcactggtctctaaggtgtccttagtgtttgttcttctgtgtctacacagaatgccctggtctcggagtgaatacagcccttcccatggctctactgccccactaactgtagttccatttccattgttctcatgcaaggtgaacttgaattcgtgggtgatttacgcccagtctttaattctactttctctgttctctttctagagtcccatagcctggttttcagtcctacccagaattcactgatgatttcccaattttcaaatcctgtggccgtttcctagtcatcaccttttttattgtttctgtggtatctgatactgttaacccttcagtggagcactctcttaatctttttccacctttctttctgtcatatagaaccctgctgatttcttt

SEQ ID NO: 196172 - DNA, 409 bp, Homo sapiens
aagaaaccaacatctgacccggcgcggtggctcgtacctgtaatcccagcactttggaaggccgaggtgggcagatcacttgaggctaggagtcaagagtagacagctgcaaggtctggcaatccataggtctggccaagaattaccacgaggcaagacaacatttggcaattacaagggcattccagtgaagtggagtgtcagattttgcaatagttctgcaaataaaatagatttttctggagcggctgggttcttggaaaaacacgcgttgatggcaaaaattaatctgggtcccacttttatagagatcacgcaagatataatctctgccagagtcaaataagaagtggtgatattaataaattttctgggccgggcgcagtggttcacacctgtaatcccagca

SEQ ID NO: 196173 - DNA, 235 bp, Homo sapiens
taatagttgactctgtgactagagagaggcgcttggcttttactccaagcaccaggagatgccacttgagcacttgtgaaggaacatgatctgacttggagctttaaaagctccccctgggccgggggcagtggctcacggctgtaatcccaatgctttgggcggctgaggcgggaggatcgcttgaggccaggagtttgaggccagcctgggcaacagtgagacccatctctta

SEQ ID NO: 196174 - DNA, 233 bp, Homo sapiens
tttatcagcagcgtgaaaattgactaatacaagtatgcattgagcaactagtatgttccaggcattgagccaggtgcttgagatacagtggtgaatgaaatagtcacagcatctgcctctagaactttcggactatggagaaagacaatcaaacaagtgattacataatacgtgaggagtgtttcgacagcgggtgtatcggagaacgcgtggactaaccagccatgcaagtt

SEQ ID NO: 196175 - DNA, 576 bp, Homo sapiens
ccatagtgattaaatcgaaagaacatctgatttacatttatcttttggccctgttgatcatcaagatgaaatgtttatggaatcaacatatacttattgacttttgactatgtttaagagctatgctaagtaattatatgtgaggttaagatgaagattttgattaatttattcagaatgtctttaaaacaatagagcaaatgtttgcccaaatgatttcagtcttgtaggtcatagaaattagtaaaggaaaaattcagaaagacattaagaaaagtcataagaggggccaggcgcagtggttcacaccggtaatcccagcactttgggagacccaggtgtgcggatcacgaggtcaggagatcgagaccatcttggctaacacggtgaaaccccgtctctactgaaaatacaaaaaattagctgggcgtggtggcatgcgcctatagccccagctactcaggaggctgaggcaggagaattgcttgaacccgggaggtggaggttgaagtgatcctagatcatgccactgcactccagcctgggcgacagagtgagactccgtctcaaaaaaaa

SEQ ID NO: 196176 - DNA, 772 bp, Homo sapiens
  misc_feature (108)..(108): n is a, c, g, or t
  misc_feature (129)..(129): n is a, c, g, or t
aaaggaatttggggggagccccccccccggcctttggaaatggggtcacagccccccccccatatgttaatgggcaccacagccttatgccggcctttgaaagttcangggtccttcttctgtactctntttttgagtgtgtaacacatttattttaagaaattagctcacacaatcatgggagttggcaagtctgaagtccacaggacaagccagttaggctggaggctcaggtaagaggtgacactaccgtcttaaagcctaaagcctggaaactcaggcagaattactaagttgcaaccttgaggcagaattccttcttcaggaaacttcggtgtttactcctcagaccttcaactgatcaggtgcggcccactcacattacctaggctcatctcctgtcctgaaagtcaactgtggttgttgacatgatctgaaaattacctttctagccaggtgcagtggctcacacctgtaatcccagcacttaggggggcagaggcgggaggattgcttgagcccatgagtttgagacctgcctgggcaatatagtgagaccccgttctcaacaaagaggaaaaaaagaaaaaagacaaaaaagtaaagaaatataaaatacttttctttctttctttctttcttttttgagacagagttttgctgttgttggccaagctagaatgcaatggtgcgatcttggctcattgcaacctcagcctcccaggttcaagcgattctcctgcctcaccctcccgagtagctgggattacag

SEQ ID NO: 196177 - DNA, 268 bp, Homo sapiens
agtagctgagattacaggcatgcactacgactgcccggctaatttttgtatttttagtagagacagggtttcaccatgttggccaggctggtcttgaactcctgacctcaaatgatcctcccacctcggcctcccaaagtgttgagattacaggcatgagccaccacgcctggccccgaatataaatgccataagcccagccttctcatacatgccaaagcacaggtcctcagagacctttttgggaagaggccaaaggaactcagag

SEQ ID NO: 196178 - DNA, 466 bp, Homo sapiens
atcgctcagagctccagcacccgggactgaggcagaagggctccgccaggaataacgttttttaaagcacaggattgctgtgtgtgtgtgtgtgtgtgtgtgtgtgagagagagagagagagagacagaggaaagaggaggaggaggagagattgattgattgatttttttcttttccttctcaacatgtcactttcctgcatgggaattcctgatattcctggcagcccggagagaggggagaggccccctggtgactttatgacccccgcaggagtaaccagagagcgcgcgcgagcgcccagcgcctggctcaagacgaagatttaaccgagaacaaaagaacgtttgccaatcagaaaacgctacccgagaacgaggataaccccgctttgtgttttgaaaactctttaattagcctggtttctaagacgcattaaaacattcctacgcagattctaaaaaa

SEQ ID NO: 196179 - DNA, 474 bp, Homo sapiens
tctatatctgtgggttctgcatctgtggattcaaccagtctcggcttgaaaatattcatacaaaaaaaggatagttgtgtctgtaataaacatgtacagacttttgtcttgtcattattccctaaccaatacaatataacaatcttttacataacatttacattgtattagatattataagtaatctagagataatttaaagtacaccggaagatgtccagaggttatgtgcaaatgtgatgccattttgtatcaggggcttgagcttctgtggattttggaatccatgagaaggtcttggaaccaatctctaacaggtactgagagacaactgtactctcctatcatcaacacagaagagaggtggcacagagaagaaatgcatgggcagaaaaattgcaaagcatagatgagtcatcttttagaaagtgattttgtgtagttatttggaagcataaataaaacataagtatt

SEQ ID NO: 196180 - DNA, 451 bp, Homo sapiens
attcctaggcaaataagggaggtatggtcaccttagctctgactctagaaaactgctagaagaatctgtatcagcaaagttacagtcccagagcaaactactgccagagattagaccttaagagttaccccagtcagtactattagatgtgactgctttatgaaactggccaagttttattcttattcatctgttttgcctgtgggaaatttttttaataacacctttttgaaatccatttcatacagcataaaattatctctgttaaaatatacaatttattgatttagaatattcacagaggtttacagtcatcaccactatctatttccagaacatttttatcactccaaaaaagaaacccattagatgtcattccctattctcccctcctctagcttctggcaactgctaatttattttctgtctgtatggatttgcctcttttgga

SEQ ID NO: 196181 - DNA, 587 bp, Homo sapiens
gaggcatcagggctgagggactctgagagcagcggacaggcgtgtgtggcgggggaggaacggcgcacacctgtgccccatccgcagcccctcttcttgtcaacatcagcttccccggggagaggcagtgatgttggtgggggaaggagggaagggcccaggccgggctgtggtggagacggttgctatggaggtttctctgggaaccaggtgaaggcagccagaagatgggggcagggtggctttcattatgagaactggaagcaaacacagccccttcctgcctcggcggacatctccacacccacatttcatggcatttctcacgcgctgggctgtttccagggcttcacctgttctcactcacttaactttcccccagcaatgtgacgaagcgaaactatcatggctcccatttataaatgagcaaactgagaaaggggagaggacttcagtcacctgcgtaaagtcccacaaccagtaagggctggcccaggtgtctggccccacagctgagctcctaaccgcaccgagcctctccaaaacatggtctttttttgctccccactgccaccaccatcaccgtc

SEQ ID NO: 196182 - DNA, 379 bp, Homo sapiens
gtctgtgtgtgtgttactggcacactgaatggggcctctgtgtgtaaatgcatttgcatctcagtgtgtgctttgtatatgagtgtctgtgcccttgtctaagatgctgtgtatgtgccacagtggattttgcccaatttttatatgacctaggaccccctagactttcttagattaaaactggatgtaggcagctttcagtttgggtatgtaggggggcaggatagggccagagctagggtagaaggtgagaggatgccttacatccctgcccctttctgcagatggcccaggcccttctctcctccggctgtggcctggccaggcccagagccctcttctgatctcataggcagggccaaacccgtatcttctggag

SEQ ID NO: 196183 - DNA, 512 bp, Homo sapiens
gctcagaacaaattatcactgtttcccttatgagatcctaatgaaagaaattcagttgatactactttttaaaatgggttttaagagtggcttgttgatataatagcgcatccacttgttctcaagtgattcaaaccttgagtaaaaaggagagtttctggagaatttagaagaatctttgttgacatttaatctagagaagtcttcaggagcaaaccacttcaagttcagtgtaaccaggtgccatgagtcagtcatgtgctacttgtggttttaaacgaaacatgattctgggatgagaagtgcgaggctacactcctaatataatcaaattgccaaagcactgttttgagtcctcggtatcccaattaaggagaaacatgaagacattggagaatcacttagcttagggcttttagtagggaataattaaacatgtagggaaggtgaaggagttagatgggaggtaagaaggctgaggagatttctagtaacaatgatccaaaagttct

SEQ ID NO: 196184 - DNA, 376 bp, Homo sapiens
acatacgtccctacagaagaagagaaagaaagcaggagtggttgctgccttccaagagtctatcctccgctacagaggcaccatgatcaaaccacccattaacttttatggctcctcactccttgtttctgtttcactgtgtttaactggctggtgtgggaagggttggggctataggcaccacatatgaaggagatagaatcttgattctggctgcctagtttttttcaggtgaactgtgagggaggagaaaaaatatttcagctaaagtcttattttagttgagtgatttatttttagtgaattataagattttacaaattttaggactccatttcatttacatttatactgataatttcattcatccatccac

SEQ ID NO: 196185 - DNA, 477 bp, Homo sapiens
agcctaatattgggagaagagctaatcattctcacgtgtttggagaggcacaagcaggcaaagatgagtaagaaaagcggtgctgagaaccacagtgtaggatgtttagacaaatgacccatatagacaggaacccaggcgagtccctcatgctcaaatggaaatatttttatcacccagctccttattttgtaaactactactaagccttttgtatggcagaaaaagggataactttattaggaccaacccctcaggttcttaagatactctggctgcttaggaccttatcaatccatttaaaggtttctgaggaaatcatatatgccaacaattagtctgtaatgcccttagacccaaacgcagctagaaagtcaaagaaataagtggttacagctaccagcttgccttttatattggaattgctttgtaggctttttagcagttgctggattaaaaaaaaaaaattacctaact

SEQ ID NO: 196186 - DNA, 405 bp, Homo sapiens
cataaatagattcataccattaccctgcagcacctttagatgtgacaaaacaattggaatttgctttattttcttgcttctggcagctagaaatatttatatttctgttatgaatggcttgctattggccacctacctgcatttctttatatatttctttagaacttaaggttaaggtccatgggagaaacttgctagagatgaggctagaaaggtaggtgttgccagattgtgagtgttattgccaaattgtttgaatttatcctcctaatagaataagccataaagtgtgttattttagtagagaagttgcagtatcagaaaagttatttttatcaagataactgatgagtatgaagggtgaattgaagaaaagatagactaaaggtaggacggtgaattttt

SEQ ID NO: 196187 - DNA, 495 bp, Homo sapiens
gcaaaaaacacaatgagaaatgcacatagagcttagcgctacttggggcattacagagaacctgccattgacatgtatggtctgcacgtgtgccattctattaccctttgtaggcgtgcttgcatcggggaatctgggtgtgtgaagacaagatatattgcagctgaaaaaggctgggagggtctttattcacttagggatgctgaataaactgtgttgtgtgcctgtgttttgactgtgactcatcacataaggtcaggtgtggaattttccacttgtgtgtggcatcatgttggtgctcaaaaagctttatattttgaagcttttggggttagaaatactcgacctatactatttcttcataatcacttgtgggatgtttacttgacatagattgagtggaggaaggttaatgagaccttgaaataattgtttctttttcttttctttcttctccatcccctaaatggtacattaaagtatacttttctcctg

SEQ ID NO: 196188 - DNA, 440 bp, Homo sapiens
ctaatttctattcagctggtcagagacacaggtgaaacaacctggggcttgctattggtatcagaagtgaggcgactgagccctcaacctgtgggatctgatgctaccaagtagatagtgtcagaattgagttggaggtcacctacctggtgtctactgtataattgattgcttgcttgttggtggggagaaatccccacatatttggtcacagaagtcttctgtgttaattgagtgcgagaatctgaatctgagtttttttcacttatctatagattcattcattcaacaaatatgtgttgtggaccctcctatgtggcaggcactgtttggtaggataggggacagccataaacgaaacaaaatcgctgcctcggcctcccaaagtgctaggattacaggtgtgagccactatgcccggcccgcaagatcttatctct

SEQ ID NO: 196189 - DNA, 594 bp, Homo sapiens
tgtgatgtggtgataatgactctaagtagtgaacgccaaagattttatattctgcctgcaaatcatgatgggttctaatgacacagcatataaaagttctcaagtattgctttgccacctccactgctcattaacttaacttggtaggagtttcttgatggaagacaatcaaacatttttatgaatgagtcacaaatactatcacactgattctttggcaaatataattcttattgttttataagaaaacagtcatcacctgcaatagactgatgtttgtgctctcctcacccccaaccaaatttatatgttgaaatgttgaaattctaacccctagtgtgtatcaggagatgggacctttggaaggaattaaggtcatgagggtggagccttcatgaatgggattaatgtccttacaaaaggggaccccagagagctctctggccctccttctgctatgcaagaatacagcaagaagatggctgtgtctgaaccaggaagtggaccctcagacaccgactttgctagagccttgctcttagactccccatcctccagaactatgagaaataaatctgttgttgaagccactca

SEQ ID NO: 196190 - DNA, 562 bp, Homo sapiens
tagagaagcagcgatgtctcccctccgggtttcccatgatgttacgttgccctctttgttaccacccctggtgcggtggacacagacattgcccaaacactaacggagagggaagaggtgcggggagctcagggcgttcggggtggtgttctggtggaggggacgctggtaaagagcaggtctggctcagtgcttatttcagggaaaactcttgtgatgaatgggccatccgggataaacagatgggacggagagtgcaatttacataacaattaagctagtttagtacatccggcaatgctgctgaaagcaggcctctccctgggcgggctttccgtgttattaatctactttatgacccagtttccccaaatggataatttcgccttggtagtgttaagatgtatttagcgactcaagtatctgcagcagcgagagggtgggtgtgggagtcggtgaattgtctcttacgccttcctttccgggttttcctggagaaggctgcctcactgggtctttgcagttggcgtgttccccggtgccattcgtatctgattcatgc

SEQ ID NO: 196191 - DNA, 478 bp, Homo sapiens
ttctatcccaaagtatcaattttattctctaagctcctgatttttcttcctaaagccctagggttctttttaagctcctcatacttctccactgactccgtttcctatctaaagttattgattgacatatatctacactctgcttgatttcctgacatcaataacacaggggagtcatgcagtccacaacatttcctaaagcatttcagaaaatcttagctctcttgtttctctatagactagaccaacaaggtgaactgtatgaaggaaaacaaaatgtcaagtcttgaaaacctaataaacaaaaaggtaataaaagcaatcacacataggtccttgagtttagaaagtcctttccagaatctcaagtgccatcttcattgttgcaaacaagcaaggcttaacaaccaaattatcttaattgctaaaaccaaaccaaacaggctgggcacagtggctcatgcctgtaatctcagca

SEQ ID NO: 196192 - DNA, 334 bp, Homo sapiens
acctggcatggtgccacatcactgtatttaaatccctcctttgaggctcccaaggccgtctaatgtcccacatctttaacaaactactggacaggtgtccccttctatagccactgccagccagcagactcaataaatatatgttaataatagccaggactagctacatagtttgcagagcccttgttcaaaaactattaagaatttcaaggctgcgtgcagtggctcatgcctgtaatcccaacactttaggaggcaaaggcgggaggatctcttcaggccaggaactcgagaccagcctgggcaacatagtgagaccctgtctctaaaaaat

SEQ ID NO: 196193 - DNA, 747 bp, Homo sapiens
tattgatttcaagctttgtactcgtaaggggtgggagggtcacaatatttgttcaattttcagcattaagaagtcctaaacattaaaccaaaatggatccttcatgatttgactgatgtttatgttaacaatgagctatcagattccattatccaacaaagtaaatatctatggaaataatatagaagtttaggctgaactcaagaaataataagatatgacctggatttcctttcatttattatattgcttttattattattttagagatgaggtctcactatgttacccaggctggtcttgaactcctgagctccagtgatacttctgcctcccaaagtgctgggattatggatttcctttgaaaataattttcctagtacaatgtgttctcacaaaatttgaatattctaaaacttaagtacagaggaaaagttttctgaaattacgtatctcaagagtcaaagcttgaaatcactttgttttctaggccttcttcaataaagaatttcggatgaagtacatgttattctgtatgacagtctgttgtttccaagagaataataacaagctgtccttgaaaagaatggctggtgatggaattagctctagagaatttaaggtagtatttgccaagaaagaaggtcagtctgatattgtgtcaaacatatcctttattaacctgaataagtaaatatatgaataagtaaatatacctaataaattacgagtgcttggtgagttacc

SEQ ID NO: 196194 - DNA, 478 bp, Homo sapiens
caggaaggaactgttgcaagccctggaggcccgtccataaccgtggatgagtcttctacacatgtggcctggccctgtccaaatgggctctgaaggaggggaagggccctcgtaggcccccggcatattcgcacctcccacccagtcccctgggcagcgcctcgccctgggtccacgtcggtccctttccctctccagagtcctgggcaagcctctttcctcttcctctgaaactccgacttcttccggagggcttcgctcgttccgagggtcctgcgactggaggaggcacatccctgagcagccactccctccccgcagcggcctgtcgccgagctcccgcgccctgcttgagctcgggagagatcgctgcggggcagtccggcccgggagcgagagaaagaacgaaaatgcacagctctctccgagtaaggcgaacagatggagaggaagacgaacaattaaacgaaacaaacag

SEQ ID NO: 196195 - DNA, 225 bp, Homo sapiens
agacccagccattgccagagaagccctacttcctcatcaaccaccagcaggcagcagcttcatgctgtagttctttttttcctttaatagaataaagattgtggccacactttaataattgccagaaatatgtgttcattaagctttttaagaaatgtgatcgaaaaatgctgatgatacattgtgtttaatagctttaataaaaaactgataaagcatctaata

SEQ ID NO: 196196 - DNA, 282 bp, Homo sapiens
cgttcctgcagctccttcgtaacgcgtctgctcaagcccctcacgccgaattcatcgggccatttgttttcttatctctgatttgtaggagttctcaggcctgctgatcattatatattcccccagaaagatgagcagagattgctggatacactgaagtcgccaataagccatcagaactggtgaggctttcagaagccagccacggcgtcagacatcaatcaaaactgacacagcttggaaaaatgccagtccttaagaacactgtgatatttttctttt

SEQ ID NO: 196197 - DNA, 648 bp, Homo sapiens
aaactgctgcccccaaaattggagcgacagacaggtgagtgcagagaatcacaacttacaggagcagaaggaacccatgagcagaaacctttatgggaaccaatgcccaggcaagggaaaactgaattgtaattgacaaattgctggaggctgtgtggacaagtgtgagacattaaaaactcccaggggacccagtcattaggggggctcccacacttttgtaagttttacttcctgaagctctaccaagttcttacggtgaatattgaagaaaaatcccctcatggttctggcaagagcagggaaaaaggaacaattctgatgtatgccaggcctgtccttgggagaaactaggtgactagagcctaacctgctgggattatcagagagaggctaactgatcttgggggaaggaaactccatctgcctctagccatgctgtcccacctaaggagggcaagaaaaaaacagcaacaacttagaagcatttgtgaaattaacagtccagggcaaaggctcactaaaagacggagacctctttgtaggactatagaatgcttcccctcttcccacatcttaccaccacatcactaaaagcctacttacagcagtttcttttacccagtacattatttccagctatcaaga

SEQ ID NO: 196198 - DNA, 538 bp, Homo sapiens
caatgaggcaggagaatcagttgagtccaggatgtcaaggctgcagtgagctatgattgtaccatcacactccaacctgggtgacaaagtgagtctctgtcttaaaaaataagtaaataaacaaataaataaataaataaacaaataaaattaagcagtgtaattcaccactcacaaactaaaaaaagggaaaatgtgattgtctctatagattttttttcttatctcaatagatttttttaaaaagtgtttggtaggccgggcacggtggcttatgcctgtaatcccagcactttgggagcccaaggtgggtcgatcacctgaggtcaggagttcaagaccagtctggctaacatggtgaaaccccatctctactaaaaatataaaattagccgggcatggtggtacacgcctgcaatccctgctactcgggaggctgaggcaggagaattgcttcaccccaggaggcagaggttgcggtgaaccgagatcacgccactgcactccagcctgagtgacagagcaagactccatctca

SEQ ID NO: 196199 - DNA, 363 bp, Homo sapiens
atttttaatcgaaccattagactgttggagagttagatagtctggttaagataaaagaatctctcaaccaatacactgcctctttatgcactattctgtaattttaaggcagagaaatataaagacccaaatagtctaatttgagtctgatttgatgatgcaacataataagggtgttgaatatgtagatttctttaggtgacacagacctgattctaccacttggtagtttgttatgacatggacaaactgatcttttgggcagtcatgtcttcatatgtaaaacaagaataattaaaaaataaaaaataaataaaacagggataatagagtgaaacttttccaatggtgacaatgggataa

SEQ ID NO: 196200 - DNA, 336 bp, Homo sapiens
tgcctgtcatcccagctactcaggaggctgagcccaagagatcaaggttgcagtgagttgtgattaccccaatgcactccagcctgggtgccagagtaagaccgcctcaaaaaaaaaaaaaaaaaaaaaagcagagaatagaagtgggagtctaaaacatacaggagaaaaacagttctaacagagacagcactgtaggaatttcctgaactcctgcaatttgccatggcataatttccctaaggaaaaaaaaatctagaactgtttggtgatcacatgcatggcagaattagtagaacaaagcctgaagcttctacaagtgcatcaaagaaagaa

SEQ ID NO: 196201 - DNA, 435 bp, Homo sapiens
aagaattattccagagagtagtcataaccaaccgttccttctagtatcagatttcttatagtgaagaataacttatgtataaaatatgctgccttttttgtaggaaaatatcactagtctttgcagtagcaaggtgagttattgttaagccacttcttttggagggaaaacaactggagatgatatgtatacatatttttaaaacagggaaaaacatttttgtaggactttgttcttgcataccataaaatgcattctttgttgaaaaatgaaatatttaattacatgtataatatttcctattaaaaaaataaatactacttaaatacagttcagttgttttgaatagtttctgtatttatgtaaaaatcatcttctaacaaatacaacaaaacatttcacatcttaaaataaaatgtccaaatccaagacatg

SEQ ID NO: 196202 - DNA, 508 bp, Homo sapiens
ccacttgcctcagcctcccaaagtgttgcgattacaggtatgagccatcgtgcccggaccttttaaaaaatgtagacaagaggcccacagggagatcttccagcacagcttgatctggtgacccagatgatgtctccatgactgttctctctcttcttctcttgactgcttcgtctgggttggctccaccctcaaatgagccctcattttgtggcaccagcctatgtcctataaggctcaagtgtagcagagagagagagagagagagagtctctcccagagtttctctctaattgagccaactcgggtcaattgtctgagtaatttgggctgggcatagtgtctcatgcctgtaatcccagacatttcgagatgccaaggcagaagaattgcttgaacccaggagaccagcctgggcaacatagcaaaacccctatctctacaaaaaaaaaaaaaaatttttgaaaattacctgagcattacaggtggcatgtgcctgtagtcctag

SEQ ID NO: 196203 - DNA, 249 bp, Homo sapiens
agcaatttacctacagaaataaagagaggaaccacattactgggacaaatacagtcactgcaaatatcagaagaatactagaacatattaatatattaatttttacccccaaaaaactgaaaatatttttagacagcaaaaatagcttcattatgcttttgattgcataatatatctctggaaagatgaaaaagaatcaggtaacacctatttcctccaggaaagaaaatgtggtggccagagaaaaga

SEQ ID NO: 196204 - DNA, 644 bp, Homo sapiens
ccatcacgcccggctaatttttgtatttcttttagtagagaccgggtttcatcatgttggccaggttggtcttgaactcctgacttcaggtaatccgccctccttggtctcccaaagtgctgggatacaggcatgagccactgcacccagctgtgacttttttttttttaagctcatcagctattgtattagtgtattttatgtgtagctcaagacaattcttccagtgtggaccaggaaagccaaaagattggacacccctgccctagagcatctgacgcctggatacaaaagagcctgtggctatgactatcaggattctggccatgaggaattccatgacatggagggaaaatggcaacttcaaatttgcacccccaggtatcatgtgggcaggtgctccatgtggctggtgatagttgtgagtgagccttgcacgggctttccccctatcggctgttccagagcgagaggctgcaggtgtccacttacgtacctgtggctaagatgcgcctgagcaagtgagggccagttagtatacataatttttacaaaatttggatcatattacataaatatcttgcttcatgcacttaatatgaaattttgcccatgatttattttttaccttatttttaagggcc

SEQ ID NO: 196205 - DNA, 160 bp, Homo sapiens
tgctgggattacaggtgtgagccaccacgcctcgtctaagtgaaatggagcatttctaagtaaaatgaaaaaccactttgtacagcagagacatagtataacgtgtattaaaagttcatcctaaaacaaaaagttcatcatagctgctgtgtagagaata

SEQ ID NO: 196206 - DNA, 688 bp, Homo sapiens
tgacaattctagcatccctaaacacttgtctttctctcactttccgcctaaccagcagcatcattagttattttacatctttttattgaagctgtcatggactgccagatgccttcctttttggcaagtagaaagaacactgcactctaaaggatttaattcactttctcctcccgagtctcctgatgaagctttaggcaaattgcctaacttatctttccttattcactttcattttttaaaagttattttgaaaaaatacattctgggccgggcatggtggctcatgcctgtaatcccagcactttgggaggctgaggcaggtggatcataaggtcaggagttcgagaccagcctggccaacgtagtgaaaccccgtctttgctaaaaatagaaaaattagcctggcgtcatggcatgcgcttgtaatcccagctacttgggaggctgaggcaggacaatcgcttgaacctgggaggcgcaggttatagtgagctgagattgtgccattgcactcgagcctgggcaacaagagcgaaactccatctttaaaaaaaaaaaaaaaaaagatacattctggctcttataaaattatgaaggtaagctaatttagtacttccagcactattagaaagttcattttcttggaataccatgctgacacccaaatccacgtgttgatctccag

SEQ ID NO: 196207 - DNA, 3048 bp, Homo sapiens
  misc_feature (347)..(347): n is a, c, g, or t
taaaagttcggaaaatttgcagcctgacaatgtgatagaaaagaaaaattcccattttctgaggagaaattcaagctggctgcagaaatttgcatgagtaacaggagccaaatgctaattcccaagacaatggggaaaatgtctccagggcatgtcagaggtctttatggcaacccctcccatcacaggtccagagatatcaggaaaaaatggttttgttggccaggcccggggtcctcatgctgtgtgcagcctagggacttggtgccctgcatcccagccactcccaaccatgactgacaggaggcaaggtagagcttgggctgtagcttcggggagtgcaagcnccaagccttgacagcttccatgtggtgttgagactgcgagtgcacagaagtcaagaactggggtttggaaaccttcgcctagattaaagaggatgtgcggaaatgcctggatggccaggcagaagtttgctgcaggggcagggccctcatggagatcctctgccagggcagtgcagaagggaaatgtggggtcagagaccccacacacagtccctactggggcaccacctagtggagctgtgagaagaggtcctccagaccccagaatggtagatccaccgacagcttgcaccgtgtacctggaaaagttgcagacactcaatgccagcccatgaaagcagctgagagggaggctgtaccctgcaaaggtacaggggcagagctgcccaagaccatgggaacccaccccttccatctgcatgacctggatgtgagatgtggagtcaagaggagatcattttggagctttaagatttgactgccccactggattttggactctcatgggcctgtagcctctttgttttgaccaatttatcccatttggaatggctgtatttacccaatgcctgtacccccattgtatctaggaagtaattaacttgctttggattttataggctcatagatggaaaggacttgccttgtctcagatgagacattagactgtggacttttgagttaatgctgaaatcatttaagactttgagggactgttgggatggtgtgattggttttgaaatgtgaggacatgaaatttgggaggggccatgggtggaatgatagggtttggttgtgtccccacccaaatctcatcctgaattcccatgcgttgtgggagggacccagtgggaggtaactgaatcatggggacaggtcttacccgtgctgttctcgtgatagtgataagtctaacaggatctgatggctctataagggggagtttctctgcacaagctgtctttgtctttgcctgccatccacgtaagacgtgacttgctcctcattgcctttcgccatgattgtgaggcctccccagccatgtggaactgtaagtccattaaacctctctttcttttgtaaattgcctagtctggggtttgtgaacagactaatacaatggcttttcaccttgcagaataaaatcctacgagatcctcatgctctagctcctggccaggccacctcctcaggagttagatcacttatccgtctctccctggcccacccttctctgtcacatggcttctttgctgaccgtgatacacaccacacttgtcttctctacctggaagttgtattccccatacccacatggctcacttcttcacttcattcaagtctctgctcagatattaacctcttcagagagcccttccttcacacactgtcttgcatagcagcctctcctacaagttgtcttctttctccttaacttttgtgatggttaattttaggtgtcagcttgactggattaaagaatacctagagaactggaaaggcattatttgttagtgtgtctgtgagggtatttccagaagagattgatatatgactgaatgggctaagagggaaccatccgccctcaacgtgcagttggcttggaacaaaaacggaagaaaggcaaattggtcttactctcttggagctggaatacacgcttccattcctgcccttggatttcaggatcccaggctgttgggtctcaggacgccaggacctacatcagcctttccgtcaccgctggggttctaaggcctttgggctaagaattatatcatcagctttcctgattctgagactttgggacttggactgagccatgctaccagtatccctgggtctccagcttgcagacaatctgttgtgggacttctcagcctctgtaatcatgtgagccctttctaactcataaaccctctcttatatatctatgtatcgattggctgtgtctctctggggaaccctgactacgtatacttttgtttgaattcaaagtatttatccctacctgatattacatcctatatctgtttgttttctgttttttccattagaatacaagtttcatggggacagggactttatgcatttgtttactgctgtatcttaggctcaaagttggcactcaataaatattggttaaataagtgaattacaagcaggttggattattaggtaatatggttcgcagtgtgggactcctgaactccaagatgtctttgaaagtagccatttttttttaatttctaatggtttagtcagactacggattacttaataacagggactatagttcattcatggatatatccccagaatcaggaacagtttctagaatacgcttgagtgctcaatagacatagctattatagttaattgaaatggaattggcaatgtgggaaataagaaatcacatttttggccaggcacagtggctcacacctgtaatcccagcactttggaaggccgaggcaggaggatcacttgaggtcaggagttcgggaccatcctggccaacatggtgaaaccccatttctactaaaaatacaaaaagtagctaggtgtggtggcgtgtgcctgtgatcccagctacacgggaggcagaggtgggagaatcgcttgaacatggtagaggttgcagtgagccaaaatcataacactgcactccaggttgggcaacagagcaagactccatctc

SEQ ID NO: 196208 - DNA, 492 bp, Homo sapiens
ctggattcatacagaaaatatgatatacatatgcaatgggatattattcaaccatcaaaaagaatgaaattctgccatctgtgacaacatggatgaaccttgagggcattatgctaggcgaaataagtcagaaagagaaatgcaaatactatatgatctcatttctatgtggaattttaaaagtcaaacccatggaacatagaatagaatggtgattaccagagcctgcagggtgaggacatttgagagatgttgatcgaggaaacaaacgttccgttgtaagatgaataacccctggaaatctaatgtgcaagaataattttgctttccaagattatacaaaatatttcttgtatttcattaaaaattcatagtttttaactcttgttgcaactactttatttttttccggatttattgatgtacaattgacagataatattgtacacatttaagatgaacactatgatgcttagatatatgtatatattg

SEQ ID NO: 196209 - DNA, 421 bp, Homo sapiens
tgtctggagctctctgcagagtgcccatgactggctctatcttcttgatgggacctggggttcctggagccatgtcttgactgctcccgagcagatccataatggtttctggaagccgactcagaccgcctctcagagtcttctgagtgtccctcactgtccctgtcctgactaacactggatccctggcgcctgcttgtcttggaccccgctgattctccctggcccacctgtgagtgtctagagctgccggcccgagtggaaggttcatggtgacgtgaccctgagtgcctggagccgtctcctgattgttcctcatttcttgtttgcctgcttgcacttctgggtcctgactgcccatgggaggcatcagaccttccctggggtgtggtgtggctgtgatggtaccctgagtgtccag

SEQ ID NO: 196210 - DNA, 744 bp, Homo sapiens
gcaaaagatccacagagaggataagccctaaaatatgactatagaatttgtccagactaccactaccctacacaagctcaagctcagcagagaatatcagggagttaggctaaaaaggagaagctagaaaccaagaaactgagcagaaacattagctgctgcaggtatgacagatttcacagtttaagtaaattaactgcttactagtgccaaaaaaattaacaattctcagaaaaacaaaacagattccaaagtcactacaacatattaccttcaaccaaaacttgctagacatgtaaagaaacaagacgatgtgaccaatgttcaagataaaaagcagccaatagatactaactccaagtggatccagattacacatttaacaaagacttgaaagtaaccattacaaatatattcaaaaaagtgaaggaaagcatgatacaagtgaaaagagaatcccaacaaagaaatggaaacttttaaaaaacaacaaaatagaaatccaaagactgaaaactacagtaacggaaataaaaattttactaggtgggcttaacaggagtttgagtgcagcctgagagcaacgtaacaagaccccatcttgaaaacccaatttttttaaatcaattgtctttctataagctagcaacggacatatgaacatcaaatgtttaaatacactacttacaatcactcacaaaatgaaatacatagaagtctaacaaaacatgtatataggacttg

SEQ ID NO: 196211 - DNA, 556 bp, Homo sapiens
cgcctgcgactagccggctctgacttggaaacacctgcgggaaaaagttcagtcaatgcactggtatatacaattggagcaatgacctctctcacccaccctgtctatccacccccttgaacttctaggctagattctagtgtatcaaaatgaacaaaacagggttctgcataaggtctcagttggggtgggggatcaggcaaataagcaaatgatgccaatagcatgtgtggaaagggctgtgagagaagcaagcatgggacactctggaaccacaaacacagtggtcataacccatttaaaatgttcttacacagctgaggagaatgtaaattagtacaacctctatggaaaatgaactagaaaaactcaaaatagaactacttatcaaagaactcaaaatagaactaccattcgatccagcaatcccatgactgcatatacgcccaaaggaaaacaaatcattgtatcaaaaagatacctgcactgctatgtttatcatggcactactcccaatatccaagatacagaatcaacctaagtgtccatcaatgaa

SEQ ID NO: 196212 - DNA, 227 bp, Homo sapiens
  misc_feature (25)..(25): n is a, c, g, or t
tcttagaggatccccacactgtatncatgagtaccatgagatcttatgtgctgagagctaaggagagctttaaggatgatgtagttcatacccccactttgcagatgggaaagtttagacaggctgagcaacctgaccaatgcgactgagttagtcaagtattaaagcttggaatataattcaggtctcttgatgccgacaatttaaaaaacagccaatgatctcat

SEQ ID NO: 196213 - DNA, 412 bp, Homo sapiens
gttttcactgcctgcatccatactcgttacttccttcactttaagtgaagatattttctcgtctctctaaaatgagcctctctgggtatgttcttaagattaatcctgtcacctcacaactatctaagaatctattattattatgaatacagacagtattaataattagtaattaataattactaatactgacagtattattactaatacagacagtaatctattactgtctgtatcttcaacttctctactgattctttttttctcaagcaagacatgctcacctcttattcatcttgaaaaaaactctctcttgctacaatgcactgtttttatcctaaaatctcctctcatcccttcccctttaaaaccaaacaatgtgtacctcatcattcaaaatttctcactcttg

SEQ ID NO: 196214 - DNA, 485 bp, Homo sapiens
tatttgacaatagtgccaaaccattcaaagtgaaaccacttcctctggggcaatacctgtagttagttgtctcgcgccgatgattaacaacatggacacacacgtggagtgggttaaggagcagaaagtttaacagacaaaaaggaagagagatagaataagcttcctcatgctgagaaagcgggtcacctgagagagggtttctgggttaggtgcagaacgtgatcaattttgtacaaaggcttgaggaggcggtgattgatttacatagagcccaggggattggtttgaccaggtgctccatttacacagtccatgaaaagactggccctccaaccctaatcttttattatgcaattatggcttctatctgactgtcaccatgacacctgcacatgtgactttacctggctagtgccatgacacccgcacacgtggccacaaagaaaagggagcgagaatcgccatattgaatgtacctggct

SEQ ID NO: 196215 - DNA, 293 bp, Homo sapiens
aaacctgaaatgaaatggcagctttgagggtttctcagacacaccagctactactggacaccaaacttttctttgattgcttaacttctacatgccctacttaaggctcaagtgaggctcttacctcaggctccccagtagctgggactgtaggaatgtgccactgtgcccagctaattttttttttttttgagagtctcgctctgtcacccaggctggagtgcagtggtgcagtcttggctcaccgcaagctccacctccctggttcatgccattcttctgccgcagcctcc

SEQ ID NO: 196216 - DNA, 177 bp, Homo sapiens
atctcaggaagcaaaacaaggacaaaagtatgaagccgtagagaaaagaaattttattctagcagatctgccaaagaacagaaaccattctaataatttcatagatctatcaaaagacaaaacaggaatgtaacctctccttaagtgaatccaccaaaccatatggagattgaagac

SEQ ID NO: 196217 - DNA, 520 bp, Homo sapiens
attatggctttatctgtaacttcaagctaaattgatatagaacatagatctataagttatatagaatataattctagctgatataagaagtttctttaataaagtgatatttaaggtaagagtataagggtaaatagagaaaaatgtaagacttacatgcatattttagaaatcaaggtttattgagaaaaaagggacaaagtaaatgactcaagaatcaaaacaagaatttttaaaaataaggaaaataagaggaatgaattaaaaatataaaagcaaaaattgattaaatagaataaaaccacataatatttgaccaattaaacaaaaagtgatttctttgaaaaagccaaggatattttaggttctatatataattgatgtaggagacatgcacctttcatttggctccctctaaaaatgcactaagaaaacatgaacatatattttcagaaacataaacttaataaggatgaagagaataatgtagaagacaacagggaaaactcttagaagctgg

SEQ ID NO: 196218 - DNA, 511 bp, Homo sapiens
tctcagtctgcagatggctgcacctttcccctaatatcaagttcaattattgttccactttagcttgctttttttttcaacagacgcagaatgattttatttccctttggaactcaggatttctttttgagttcattaagtcttgggtaaagaatgtttgggatgcaaatgatgctgccgtggccaaggactatgatgtttttttctcccttgggtctgggctggtgagaactatgagctgtcttggctttgccctggaccttgatatcaggatcagttgtgtgaccttgagcaagttcataacctctctgagtttcactgtcttcatttgcaaaattaaagaggtgggtgaggagatctttaattactttctgagctgagagtctttgatttgattatttggatctaatttatccagaaatgctgtgcaaatgtccctgccctccccactcaccaccagggtatctaatcctcttatttcctaaacaaaataaaatgatcaaacaaaaga

SEQ ID NO: 196219 - DNA, 236 bp, Homo sapiens
gcggccggaagtagctgtactggaaatatttaagtcatttaacacgagaatgctctaaataaaggtctaaaagcattgattaaaacaaacactttacctgttttggtcctggcttttaaattataaatctgatcttttgcaccactagtctgcctttcccctctgttcatatattgctttgccccagtgatgtcaaatttagcagtaacagctacctttcccgtccgcttgtacct

SEQ ID NO: 196220 - DNA, 635 bp, Homo sapiens
gtgtgggccccgcaccagaccctgacgccctcaggggagggcttcgggagcacccaccggccaccgtcacctgcagccagggaccaagctgctgcagtgagatgaccaggctgtgaggatggtggtctctgggacccaggtatccctgggtctttgttgcctgcaggaagagctgcctcctgtgcccagggctgagtgccttcatggctcaggcctcatcaggctgccgccaccccagggcaccccacggggccactcgattcggtttgcaggctcctgaggacagtgttcctgctcccacagcctctgagcatgcccatgaacttgacctgccccaggcaccatgccactagggtgcccgtgaacccccagggccgacgctcatccatgtgctgtagatgcacctgccacggctgggcatgactcatatttggagcctcagggcaacagcatggtgcaggtgtcccagcagggcagggcggtacctgtgtgtggcaggtttataagaaagcagtccccttaaaaagaaagatggtggggccttgtacggtacaaggcccgcaggatggagctgggtcatggaccagggagcctgactcccagaggctgccacggggagaagcaggggcctccat

SEQ ID NO: 196221 - DNA, 288 bp, Homo sapiens
catctagaatagcaatacacaatttccttgtcagaggaagaatatagccattcagaattacaagtgctcctgtttaattagataggttggtgcataccaagaaagctaaggtgacattcactatgtaaaaataacctaagcagagttggctgcacctgccctaacgtgctaccataacaggaaatggtgctttttattgtccaataacattttcttcaagaaaaatgtatttcaattatgttagatgtcttattttttcatcagattataatgaaaggggttttttta

SEQ ID NO: 196222 - DNA, 437 bp, Homo sapiens
ccccaacccactgtccatggaaaaattgtcttccacgaaagtggcccctggtgtcaaaaaggttggggactgctgttatacagtgaacaaactacctctacatgcaaaaacatggaacattacaaacataatgttgaatgaaaaaagatagtcaccaaagagcacaaaagttcaactacatttatataaagttcaaatacaggaaaaactaattcataatgttaaaaattatgatagtgcttactattggggtgaagtggatagtgactggaaaaagcacaagaggtgtgtctgaagtgctggtgatgttctattttttttatcttggtgctggctacaagagtgtgttcgctttatgaaaattcctcaaatgtacacttattatttggtacatttgtctgcatttatgttatatgtcaataaaaaatgtaccctgt

SEQ ID NO: 196223 - DNA, 418 bp, Homo sapiens
cttggagaagtcttttttacagaggtaggtaggattgaaccccaataatttggaggaaaggacagagacaatggggcatggaaatttatgtcatatttttaaggatggtgggaaagtccactgcgcttgtctcaagacaatcaagtgatacttatcttgggttcttatacagtttcatagattttcatttctatgtagcgaagagctaataacataaggcaaaatgtgtaatcggtgtaccaaaggctgctataggatcatagagaataagcaccgagaaaaaaggcatctgattcagccctcagcaatggttggaggtattaggaaaggtttccatgaagaaacctgaactgaattcctattaaataataggaatatttgtcaagtaactagatggagaacaataaatggaccatga

SEQ ID NO: 196224 - DNA, 494 bp, Homo sapiens
tgtgacagccctgggaacttcaagtgaaggtaattttattgttattattggtaccattattatccccatccaaaagatgaacctgaggctcagtgagccctgactcctcatctctgtcccctagtttcccagctgatgaaaatcacctttgctaggctgaaatccaagttcaccaggtagccccttgagaaggagcccagatgaggccagatctggtaggaggcagagcacagagcactcaaagatcgagacttacaagagagcgtgggaaggcacggctgtgaggctggggagaaaagggccgtagcatcttgtaaccttacctgagctctggccagagattaacatctccttggttatgcgcagagtttggggtccaaagtgtgatcatttggccggggggtcccagcagtaaccaggcctggagggagaggaagggatggttgctctcacacacctatgtgcacacaagaatgcttttctcggtgaattgg

SEQ ID NO: 196225 - DNA, 894 bp, Homo sapiens
aggagtgattcaggggttatctttagctactttggctattgctcctgcaagatgtagagaccttaggtttctctttaactgcattctaatagccatcagtagctttgtgggtgttgaagggtgtctggatccatagatagcagtttgcgatatgttttcttgtagtcaacctgtagtggcctcctaattgctcatctcccctatggtggcagaggtagcagctcacatggaaggctaattccaggtctgggaatcgcctggaggcccagcctatggccatgttccccaggctttccagtgcttttgtaagcacctaatttacctgtgttgaatccttttccacttaaaattggtagaggagtattgtttcctgcagttactgaatcctggctaatatagtatttggttccaaaagtggttactagtaacaggccctcaaagatgggcttcttagattagttatgactaagctgcatttgaatgaaatgtagatctagtcaccattggaaaatgataaactggtaggcaaattgcttacacctgtggtcacctgaaatgaaatgtcttttggagaaaagacgttggcacctcaaagggctgccatgatagatcatcatgtaagaaatggggacaaatgatggtgactacactagaggggttaaaggaaaaagacaaaaagctcaaaagtttgacatttgcagctcaaggcatagtatgggagagacccaaaagaattttatcttttgtagccgcaaggctcatgtacatcaaaatcaaagggagattctggatcactgaattacatacaacataagttgaattcgtagctttaccaggcctcttatgtgaaaatggggctctgaaatgagcaatggggacccttgagtggatttg

SEQ ID NO: 196226 - DNA, 685 bp, Homo sapiens
tccttttgcgggtggcggcgaacgcggagagcacgccatgaaggcctcgggcacgctacgagagtacaaggtagtgggtcgctgcctgcccacccccaaatgccacacgccgcccctctaccgcatgcgaatctttgggcgctattatcactagtgctgctgctcgaacgtgctcgcctccttgcgttgagctacgtagtcttactcagatcgacagatgaataacgtcttccctgcgagactgagactagctgtgcgtggcagggggcagggggtaaggacgaaagctcctcccccctgcgggtgaagaacttcgggatcttgctgcgctatgactcccggagcggcacccacaacatgtaccgggaataccgggacctgaccaccgcaggcgctgtcacccagtgctaccgagacatgggtgcccggcaccgcgcccgagcccactccattcagatcatgaaggtggaggagatcgcggccagcaagtgccgccggccggctgtcaagcagttccacgactccaagatcaagttcccgctgccccaccgggtcctgcgccgtcagcacaagccacgcttcaccaccaagaggcccaacaccttcttctaggtgcagggccctcgtccgggtgtgccccaaataaactcaggaacgccccggtgaaaaaaaaaaaaaaaaaaaa

SEQ ID NO: 196227 - DNA, 641 bp, Homo sapiens
tccttttgcgggtggcggcgaacgcggagagcacgccatgaaggcctcgggcacgctacgagagtacaaggtagtgggtcgctgcctgcccacccccaaatgccacacgccgcccctctaccgcatgcgaatctttgcgcctaatcatgtcgtcgccaagtcccgcttctggtactttgtatctcagttaaagaagatgaagaagtcttcaggggagattgtctactgtgggcaggtgtttgagaagtcccccctgcgggtgaagaacttcgggatcttgctgcgctatgactcccggagcggcacccacaacatgtaccgggaataccgggacctgaccaccgcaggcgctgtcacccagtgctaccgagacatgggtgcccggcaccgcgcccgagcccactccattcagatcatgaaggtggaggagatcgcggccagcaagtgccgccggccggctgtcaagcagttccacgactccaagatcaagttcccgctgccccaccgggtcctgcgccgtcagcacaagccacgcttcaccaccaagaggcccaacaccttcttctaggtgcagggccctcgtccgggtgtgccccaaataaactcaggaacgccccggtgaaaaaaaaaaaaaaaaaaaa

SEQ ID NO: 196228 - DNA, 1275 bp, Homo sapiens
tccttttgcgggtggcggcgaacgcggagagcacgccatgaaggcctcgggcacgctacgagagtacaaggtagtgggtcgctgcctgcccacccccaaatgccacacgccgcccctctaccgcatgcgaatctttgcgcctaatcatgtcgtcgccaagtcccgcttctggtactttgtatctcagttaaagaagatgaagaagtcttcaggggagattgtctactgtgggcaggtgtttgagaagtcccccctgcgggtgaagaacttcgggatcttgctgcgctatgactcccggagcggcacccacaacatgtaccgggaataccgggacctgaccaccgcaggcgctgtcacccagtgctaccgagacatgggtgcccggcaccgcgcccgagcccactccattcagatcatgaaggtggaggagatcgcggccagcaagtgccgccggccggctgtcaagcagttccacgactccaagatcaagttcccgctgccccaccgggtcctgcgccgtcagcacaagccacgcttcaccaccaagaggcccaacaccttcttctaggtgcagggccctcgtccgggtgtgccccaaataaactcaggaacgccccggtgaaaaaaaaaaaaaaaaaaaaaaaaaaaaaaatttgtgtgtgggccgctctctggccccccgagaaaaaagcttttctaaacacaatctgtgtgttgtggggcggggggccccagtagggtaaggggaccagggtggccaatacggcgggggtccccaagagaaacaccggggccaatggcaaatgggggggtgtggtcttctcccccaagtaaaaaaagcgcccgggggcataccggagcgggttctggaaaccaaaacccagggggggagttccgggagggccacatatagggggatcctaccaacacgaggggggccacagggaagccccgatatcaaaatataggccccccgctcttggggaaacacgtacggagcaacacaacagccacccaagcgcgacacgagagccaaagcaaggaaaaacagcacaagggcgcggccaagaacaaacaggacgaagcagcaccaagccacgcaaacggccagagatagaaaccagcaccaaagacagaaccaacgagacacacgacgcagacagacagacacgccgcaacagacagagagaacatcaaaacacaaagaaaaacacacaggacccccagaaacacgagaaagcagacagaaccaaacagaaatgacccaggaagccg

SEQ ID NO: 196229 - DNA, 742 bp, Homo sapiens
  misc_feature (72)..(72): n is a, c, g, or t
  misc_feature (94)..(94): n is a, c, g, or t
  misc_feature (99)..(99): n is a, c, g, or t
  misc_feature (132)..(132): n is a, c, g, or t
aacaacttatatagtgtgtaaggaactcaagagaaaccagtgagcgagcctttatgtgaaccactgaaacantctcttaaaaataaggcaattnttttntaagtcaaattcatctcgtgccgaattcggcanagggccatgaaggcctcgggcacgctacgagagtacaaggtagtgggtcgctgcctgcccacccccaaatgccacacgccgcccctctaccgcatgcgaatctttgcgcctaatcatgtcgtcgccaagtcccgcttctggtactttgtatctcagttaaagaagatgaagaagtcttcaggggagattgtctactgtgggcaggtgtttgagaagtcccccctgcgggtgaagaacttcgggatcttgctgcgctatgactcccggagcggcacccacaacatgtaccgggaataccgggacctgaccaccgcaggcgctgtcacccagtgctaccgagacatgggtgcccggcaccgcgcccgagcccactccattcagatcatgaaggtggaggagatcgcggccagcaagtgccgccggccggctgtcaagcagttccacgactccaagatcaagttcccgctgccccaccgggtcctgcgccgtcagcacaagccacgcttcaccaccaagaggcccaacaccttcttctaggtgcagggccctcgtccgggtgtgccccaaataaactcaggaacgccccggtgaaaaaaaaaaaaaaaaaaaa

SEQ ID NO: 196230 - DNA, 490 bp, Homo sapiens
acttactagaaagtcacccaatctctctctatctctgagtagcgttatgaaacataaaccctaaaagcccctgagcacagacagcaccagcacaaagacttgtgtcctaacagtatggcaaaactggacaatatcagcacacgtcatctccactgaggaggctgtccctccacacacggactgcctggtgctgttaccagctctcccggcccagcagcactgacacaggccggtggtcactgagcctgagaaaagcccatgatgtcagtcagaactgtcacagcagacaggtgcccttgtgctgcactaggcacgtgcgctaaacacctccaaagagccgcagaggggccgggcgcggtggctcacgcctgtaatcctagcactttgggagagtgaggtgggtggatcacctgaggtcaagagttcaagatgagcctggccaacatggcgaaaccacatctctactaaaaatacaaaaatcagctgggtg

SEQ ID NO: 196231 - DNA, 438 bp, Homo sapiens
tcttgtaatgcaagcggagggaccctttcccttgggttttatatttttcactggctccctcatcccatgctcagtgccttcccggtcttcactcaagaaccagaatggcatcaaacccctctactaacctctggtcatactagcgatgggtgattagggattaaaaaacaattaaaattgagtgagtttaaatcatgtattcttaccaggcacagtgtaatcacacctgtaaacccagcactttgggagagtgaggtgggtggatcacctgaggtcaagagttcaagatgagcctggccaacatggcgaaaccacatctctactaaaaatacaaaaatcagctgggtgtggtggcgggcacttctaatctcagctacttgggaggctgaggcaggagaattgcttaaacccaggaggcggaggttgcaatgagccaag

SEQ ID NO: 196232 - DNA, 244 bp, Homo sapiens
tataagcaacttcataatagcctatgtacaaagaaaaccatttcttcctattttaatgataattctgaaaatttttaagttttgtgaaaagttctttatactttaacaatttactaggccaaaatattaagaattcatatatcttacaaaataaaaagcaaaataaattcactgtaataaaattcatcaagtgcctactacataaaaggtattaaatgctatgctaactataatgtatttcggt

SEQ ID NO: 196233 - DNA, 596 bp, Homo sapiens
cccagtatcaaggctaaatgaagcagtgtaagacagagtagctgacaaccatttcagccattctcaaatgccagtggtacccagagggggctgagcttccattccccacctggcatcaactcaggggaagtggtatgaggtaaggagctttttcttcaccctgcagcatcagtgcagtgtgagatagcctccctacttctctcttgctgaggcagcatggcccgtcagaaagttcatcttatacccctactcagaggcaacaaggtggcataaaatggtgcccaacttttgttaggaagatgtgagggtaagggaggaattgaacttccatcccaccagtctgcattaaggccatatgacttagtgccccactttttccacagtaattatcagcaggacccagcaagaagctgaatgaacacacccacctaacccttgcactacacttcaacaagggaactgcctagtataaaaaagaataggccaggtgctgtggtgcacacctgtgactcctgctactcaagaggctgaagcagcggattacttaagtcctagagttcaagaccaacctgggcaacagagcaagaccctatctc

SEQ ID NO: 196234 - DNA, 440 bp, Homo sapiens
aattggatggcatctatttcggcttttcatgtctttctgcattttatactcttaagagtccagatgtttttttgtgtccttgcctttgcaagtcagggcagtcagaactgtgtgtagtgtagaaacactgtaactgcccaaagtagtaatatcatggctttattattgccatcagtaatttttaatcacattcttgcaccctgagtttaaaaagatctctacaacatctgtcaataaactggttttcatttacttagctatatatgtgattattcatttttattcctactgtttgtattaattttttatgtgctcaccaattgtttttaagaagtcttaaaaggcagcttatatgtggtttgttcttaccataaaataattctttctatttttccacaatatgagtgctatcattttataagagagctacaaataataac

SEQ ID NO: 196235 - DNA, 662 bp, Homo sapiens
agagtccaggaatcactctagcttctgaagcattagcctcttttacaaccaagaaaacaaaacctatctgctggaaggaagagcctcagaaacacactcttattaccctcacttcctccccaactctgtgaaatgaatccattcgatgttggaaagaatatcaacttatttcccagttgttctactgttggttctgggtgacattccactccaggcacaagagaaaggtgccaccttaggtgcaattcatcccaacttgcagtctattagcttcacccactactaagatctttgcaggctgttactttcagtctgaggggaatatgtatgcgttaccacagtgttttcctttcaaggatttttcagatgacagtactaaaagttataacaccatcagtagtttcctttgtcggttctgacacgtattgggaggatgactttgttggcattttctgttaaaaaatacttatatgacatttttttttgtctgtggatttttaggtgttgaaattatcctcacaccagaagacaccatatatgggaaactccacttgcctgcgtattcattagcaggattataattgctccactgctaaaatgagctaacaacccatttacagctttaagccaatgggaaattctctgcctgcctactgcctctc

SEQ ID NO: 196236 - DNA, 1457 bp, Homo sapiens
  misc_feature (812)..(812): n is a, c, g, or t
  misc_feature (861)..(861): n is a, c, g, or t
ggctcaggacccccgtggcgaggatgcacctcccagccctcggcccagccacacggaccacagggctcccgagtctcagcaacaccagctaaggggcatcatgcctctcctgccacacccagggcccgtgccttgctgtccctgcagcccccagacccaggcagacagggacagcccttctgaccaccgcacacactcgccaccgcaaagatccccggggatgcccctcgcctgtgtgtgtccctcatggctgtcacagcaaatctccaggagcccggaggtgcccatggaaaacacccccagcttccggaacgttctttcggacagggccataccggagcaagactcagctttctggtagcgggtggctgggcactgcctgtgagattctgtcacactcgctccagattcaaggggtccaaaaagtgtaaacaagtcaagtgcccatccagggatgaacgaacacagcccggcccggccacaccatggagcaggactcggccatgaacaggaaccaggctctgacaccggccacggcgcagatgcccctggaggagtccaccctcagcaagagacacacagacaccgacacggcgtgcaatcccatttgtgtgaatgtccaggacaggccgattcagagacaggaaggggacacgtgggtgccagtgactggggattatggggactgggggaaatggctaaagggcacccacaaaagttaatgataatgttccacagttttttttttgagatggagtctcactcttgtcacccaggctggagtgcaatggtgtgatctctgctcactgcangctctgcctcctgggttcacgccattctccctcctcagcctcccaagtngctgagattacaggcatatgccaccacccccagtagagacggggtttcaccatgttagccaggctggtcacgaactcctgacctcaagtgatcccccacctcggcctcccaaagtgctgggattacaggcatgagccaccgtgcctcaccagaattgtgtacttttttttcttcttcttcttcggcatggagtttcgctcttgttgcccaggctggagtgcaatggtgcaaacttggctcaccgcaacctcctcctcccgggttcaatagattctccagcctcagcctgctgagtagctgagattacgggcgcccgccaccacacccagctaatctttgtacttttagtagagacagggtttcaccatgttggccacgggcaaaagaattttgttgagggcaaataatatgagaccacaaaactgccttccctgctcagttttaattttcacagttttaatttttagccttctctggttaccaaaataaccacgctcacggccgttcatttgaagatatttccagttaacgtgtgtgaagtgggttttttgagatgtaatttacaagcaataaaatgctcctgtctctgctgtcct

SEQ ID NO: 196237 - DNA, 244 bp, Homo sapiens
acagagctgacccacagcaggtgcttgagatgtgggaagtgaaaagaaaagcaaaaagcaccccaagtggtagaaacctggtacaaaagcagctctgcacgaacccagcaaaacacagaggagcaactccaacctctgacttagatacatctcctggcaattaactcagtaagctctctcttccacatcacgtctgctcagctttgttcctcacctgaacactaaaattgagatcttccgcctc

SEQ ID NO: 196238 - DNA, 525 bp, Homo sapiens
agtaggtgtctctcaacacaatgctcttctctgtctccctctcttcctgctgcctccctaactccatcctttatacccaattgcctgacggagataatctttttttatttttatatttttttgagacagagtctcactctgtcacccaggctggagtgcaggggcacaatcatggctcactgcaaccttgacctccccaagttcaggtgatcctcccccctcagcctccctagtacctgggactacaggtgcccaccattacacctggctaatttttttattttttgtagagatggggtttcgtcatgttccccaggctggtctgtatttatccaccagtgtttgcgctaatcctttcttggagggcgtctgtagggcaagatcgtgctattgttgaaagcagctgcgttataataataggtgatgagtctttcaagtactggatatgggtgagcaatgagtccctgtcgagaggcagtggatagtctgtggggagcgtcataatatgaggtcggcatcttcatt

SEQ ID NO: 196239 - DNA, 524 bp, Homo sapiens
gagtgacccctgaacacctggtggaaaccagccgggcttacactgggcaaagctgggttgtcagggaccctggtgagaccctgtcttccccccattcctctctgccagtcttggggccctgggctcccacacagaccggctttctgcgtgggataggattatcagaccctttcctgaaatcgcgggtgggaaacaggtgaggtcatgaaggcagcctgggagggaggaagggacaggatgtggaggggagagggaacacagcaaaggaggcttactggtccaggtcctctgcgtacatcatctcactgcctcaaaatgtttggggaatgaggcacggtataaactttcttcacttttccttcactacagtcttctgcaggtattattgtccccattttacagacaacgaagctgaggctccaagggattggtaaccttacaaagatttactaagtttttaggtgtaaaactgagatactaacccagatctgtgtctctggggccaggctctctggggaaatcag

SEQ ID NO: 196240 - DNA, 1212 bp, Homo sapiens
ctcggcagaggccgagcctgggagacgccggaggcggcggctgcggcgcggggacctgatcggcgccccgagaggagctccccgctctctggacgcggccctcaagctggcggggctaaggaagagcgcccgggaggcccgggagccactggggtccgtttcagcaggaagacgggcacgcaccgagaggatggcagtgcccagaagaactcgagtcgggggcacggtggggagaaggggcggatcccctgctggcgaccgggcagagccacccacttcctctaagggcgcgggactagaggtgggatttagggagggggaagggaggagcgtgggctggacgactcttgcggccagaaccgcgttcagagccacagagccgggcactgcggccggccctggtcccggccccggccctggcccagcccttgccctggctcgcctgccgccgctttttccttccagatgcggaggctgcggctggagcttggggtttgcggattaggcttgcagttattcagccctccctcttttacacggaagcgggggcggtggagacttcttttgctgaaaggcagagtgcagcgctttgatgctaaatgcagtacacaagtcatgtaaatctggttttacggttcttaaccccttactgagactacctctttcgcaacttttcggaggaatgttagaggaaagaggcacagtttggctttggggtcattgcatccttccagcgccccttgctccagctggagagagatcaaccttttgcagtggaaggggagagtcccccagcctttgtttcatcagacggctgctgtagtacagggattcaggccagggcccgcatggccggacttcttggttcaaatcctgcactgccactcaacggatgtgtgagcttgggctagtgactgaacctcccagcctaggtgactctgtgcctcggtgtcctcatctgtgagaaccgacctaagaagtgtctgtctgataaagctgttgtgatgagttagtgaattcgtacacatagaacctttagaactgtctttgacatgtagtaagtcagctgtgtagatggtgggtttctccagtgtcaggtccctgcccacagcaggaagatgacctgtgctagaagatgggggctagggtgttggggaagacttcagggacttgggagagaaaaggagaaatattcagagatgagaaaagtag

SEQ ID NO: 196241 - DNA, 253 bp, Homo sapiens
aggtcacctcttgaaggtggtagggctttcactttttactttctatgttgtttttattttctttggtgcttttctataatatattttctacttcttaaaatgatgaagatggttcatttctcttatcagaacacaaaattttaatttaaaaagcttcatatctacttggaaaaccatataaaaattctttatattgtatttccagagaagaaataacaaaaatctcctagaatcgttgagagggctgtcagcg

SEQ ID NO: 196242 - DNA, 377 bp, Homo sapiens
tcgagggctcattatagcattataactggactccatttaggcgttgctaatggtaggaaacttaggcttgctaatttgatacaatgcagtccctttaggtttaaaaatacttttatctaattgctctgttcatttggcaactctcctatttcctcttttcctttccttctccttgggggaggcctgaggttcctgggaagtgttctgacactgggggaggaatgcccgtgcaggggctggcctctgcccctgcacctctctcttgagcttggccatgcactgtgtcgaccctgctcccttgctgacatcttcagctccacatggcttatagtcagctggtccaccgatgttgcttcccctttgtcccagtcatagac

SEQ ID NO: 196243 - DNA, 155 bp, Homo sapiens
atagggatggcattaatgtggtgaatgcatgaggaggagcacactggaagcaaggtaatgagtgtgacatgttgagtttgaagtcctgttacacagctgggtggagaggtccagcaataagcagttaagaaaactgggccagtgcctaggaggag

SEQ ID NO: 196244 - DNA, 372 bp, Homo sapiens
cctgaagcctccccagccatgcttcctatgatagagcctgcaggcgtgagccaattaaacctcttttctttataaatgacccagtcttggttatttctctatagcagtgtgagaatggactaatacagatggcattttccttttgtgatgactgccaagaatatcagtcctgggtgcggctcaatttcaacagccttaaaatctactatccacacatacaagcttcacaaatcatttttggtgctgatctgccacactaactatattttacaggacaatgtctatttccacattcccattttaaagtatgaatcctggctgggcgcggtggctcatgcctgtaatcccagcactttgggaggctgaggcagg

SEQ ID NO: 196245 - DNA, 650 bp, Homo sapiens
acccaagatgccgaaaggaaagaaggccaagggaacgaaggtggctccggcccctgctgtcgtgaagaagcaggaggctaagaaagtggtgaatcccgtttgtgaaaaggcctaagaattttggcactggacaggacatccagcccaaaagagacctcacccgctttgtgaaacggccccgctatatcaggttgcagcggcagagagccatcctctataagcggctgaaagtgcctcctgcgattaaccagttcacccaggccctggaccgccaaacagctactcagctgcttaagctggcccacaagtacagaccagagtcaaggcaagagaagaagcagaggctgttggcctgggccaagaagaaagctgctggcagaggggacgtccccaccaagagaccacctgtccttcgaacaggagttaacaccgtcaccaccttggtggagaacaagaaagctcagctggtggtgattgcacacaacgcggatcccatcaagctggctgtcttcttgcctgccctgtgtcgtaaaatgggggtcccttactgcattaccaaggggaaggcaagactgggacgtctagtccacaggaagacctgcaccactgtcgccttcacacaggtgaactcggaagacaaaggcactttg

SEQ ID NO: 196246 - DNA, 284 bp, Homo sapiens
tacctatctcctactactaaactttctgcttttttgaaaaagcagaaactttgttttgttcccagttgaatccccaggatctagaacagtgtctagcctatagtaggtgctcaaatatatatgttggggaaataaatgaatcaagatctgaataatgagcaggcattgtatgaccttcattgtttctttcttgaatattaagacactatcacaaaaaggacaactctacaaatatatataaaattcataaaattcctattatatcccagcagctggggcaaaga

SEQ ID NO: 196247 - DNA, 231 bp, Homo sapiens
aaaggaaaatattgcaataaagttaaaataaggagagaaagaactaattttaatagagatagaaatgtaacaggcaacgtttatttttttaaaaaagctatagaaatacagtaatatgtggtatgatgatgttttggccagccacagaccatgttaagtagggatcccttaaggttataatcaagctgagaaatttatatctcctagtgacatctttgctgtcataacatt

SEQ ID NO: 196248 - DNA, 363 bp, Homo sapiens
ctgcctcagctgccctccctctgcagggctctaaccagctgcaggccaccaaccactagggactgggagctgctgctgaccctgccctctctggggaggggcctcaaacagaatgcaagttggcaatcagatgtccagcctaggaggaaaagaaccaagcgaagacagtagggagtgaccttgtggctcaaggggacaaactgcagccgggattattggggaagaaagaggagcccattccagggaaaccagctgtccagcagcctggcctcctggaagcctccagagcctgtcctctggggtgtggtcctgctctcagcaggaaataacagattcccacttcatgccctgagggcaccaaag

SEQ ID NO: 196249 - DNA, 407 bp, Homo sapiens
ttattttatttttgagacagtcaaagtctgtcaccaaggctggagtgcagtggcgtgatcatggctcactgtaacctcagcctcccaggttcatgtgattctcgtggctcagtctcctgagtagctggaattacaggcatgtgccaccacacccagctaatttttctatttttagcagagatgtggttttgccatgttgaccaggctggtctcgaactcctggccttaagtgatcctcctgcctcagcctcccaaagtgttgggattacaggtgtaagtcactgtacccggccgatacccattttatagatgaggaaatagaggcattgaggagtgaagcaagtcagtgcttctcaaatttaaacgtattcatgaaatgcctaggaattttgttaagatgtagcagt

SEQ ID NO: 196250 - DNA, 602 bp, Homo sapiens
gggtgaaaccgtcctgcagctgtgggatctacgaagcgtaggtggcagtaacgctggactccactgctttggagcctgcccagtcgaatttggaagcctgcgagggagctgaccacagtacactggcaaccagaagatgcccaaagatagggaggcaacggatactgcttaagttcagaagatcctctggccgttgctggcccaagtttcccccagagacatccaaagcctcagttttctcatctataaaagatgtgattgttatgaagcttccataaggtaagtgagtaaaaaccatggcaagatgcttgtaacttaaaagagagggttcctatgaggcttctataaggtaagtgtgtaaaaatctggtcataatacctaaaattttttagtgttcagtatatggagaaggaggattatttttttcatctaatttttaaaatgagtttataagattggtgatactcatgtatctttgacaatcaaaccaatgatcagaaaaaaataaatagatcaccaaagtcacaaagcagttcccaatgcattcactgggtaatttctagttaaaagtagcaatgatgatcacattgaaaattctgtat

SEQ ID NO: 196251 - DNA, 271 bp, Homo sapiens
ttggttaatttcttaattctaactccaaatatttggggaaagaggttgggtatttttttaagtaaaatttaatatttttatgcttcaaaatactaattcctttagtactgtccaaaaaaggacaaatgtcaaatttaatcaaatgatttaagctttatagggaattaccaacagtttaaatgctttttaaatttttaaaaattgcctcagttgctatgatactgtcaggtattaaatagtgaatcacattttaattttttaactttgcagc

SEQ ID NO: 196252 - DNA, 452 bp, Homo sapiens
aagccggatgcctcgcctggcacccgccccagcccagacctgtccccgcccgcaacttcccaaactcagaaaatgacaactcctttcctcccttttctccccacgcaaactttacacttgtccctgactcccctctttctctccagtctcacgtttattccgtcagaaaatcccatggctctcccttccagacatggccagaacccggcctcccgggctaagccaaggcaagctgcctttgctcttcctgatggtcacggctgcaccttccctgggctccctgcccctggtgtggccaccataagtccccacccatcatcctttctgaacctaagtcaaatcacatcattcttctgccaaaaccctccaaagactctcagcttgctcagcgcacagcccggtgctcctggagcccacagaaggggcactgccctggcttccccttctgccgc

SEQ ID NO: 196253 - DNA, 360 bp, Homo sapiens
ggctctgtggattggaagcaccattgctctgggctgtccactcggatacggagagtgctgttggaaatgcagcaccttgaaagtgtctttgtagttgagattttttcctggaaacatttacagcttggaactgttctatctggccaaatatgaggaggctagagttgccccaaaagtggcagcaagggagttgcctcaaaagacttccccaaacagtcccgcgatggaattggttgggattccaaggaaagaagctctaaacgccagggtgatcagtccagagcatttcttccggaaattttcacatggagcttcagctttcttgggatcgatgatgaggcaagggatgctccacccagg

SEQ ID NO: 196254 - DNA, 101 bp, Homo sapiens
aaaggagggagtcaagagcgcagactagagaaagagcctgacggccgcagagctgaggaaagaggcaggcagtgggcgcttcgccgctgctgcccccgggc

SEQ ID NO: 196255 - DNA, 645 bp, Homo sapiens
acgtcagtgtgtgagctttaactcacttgctttttttctcctccatgctaacacgttcagctgggatggtaatgtcatttttaaacattatttttctgataatctgacttagaaaaagctattacttttttgagtttgagcaactacagacattggcataatgacagtacatgggcagaggaaagcaccctcttctggacattttaaaaagtagaggccagacatggtggctcactcctgtaatcccagcactttgggaggccaagatgggtggatcatctgaggtcaggagttcgagaccagcctggccaacatggtgaaaccccatctctactaaaaaatacaaaaattagctgggtgtagtggcacataccctagtctcagctactcgggaggctgaggcaggagaattgctggaacccaggaggtggaggctgcagtgagccaagatcatgccactaccctctagcctgggccacagagcgagactccatctcaaaaaaaaaaaagtagaaaaaaattgaaacgattagagaaatgaatgtctgaataattaagcagaacaggagggactcatgggaaccgattttcagagaaaacttgagatcttttctgtggagcctccagattcctatagaatggaga

SEQ ID NO: 196256 - DNA, 544 bp, Homo sapiens
gaagattaagttaaataatctatgttaaaagccctacttgaactgtaaagcccttaaatttttagctattatcagtgggcaacagttgatcatgtttaaaccttctacatactgacagtctggatttaagctgaaaagtatttttaatctaaaagaaaattacctaagaattctttttgaccttctaagaaagtgtgtttcactattctagagaattagaaactggcgcagtgaaggggggtgttgtatgcctattagcttcctaactttgatgctgtggtttcttagattattacagttgcaaggtcaaatccaaagaattagaacaaaacattgttatcctggaacactcaaaaattatagctttaagcttagattaaaagccaaaatgactggtttgaaagttcccggaaatcaagctttgtattaaaaagcaaattaagaagtcacatgtcagcattttgtttgtttgttttgagatggagtctcgctctggtgctatctcagctcactgcaagctccgtctcctgggttcataccattc

SEQ ID NO: 196257 - DNA, 367 bp, Homo sapiens
ctctgtttgtctctctgtttcttggtgctcgtctctgggcctcgctttgcttgtctctatctgtctgtttctcattctctagctccctcagtttctgcttgggtctcctggtgtctcgccctctcccatttctttctctgtgtcctctctctgtgtcttgttttctgtctccccctttctctgtctgctccctagtgtctctctctgtctcctcccaccctgttctgggaccccacccctaacacccttctttctgtttctctccttcctgctccttcatctgcccacagagatcacctgcccagaaaacagccactatgaggtctgtgtcgacgcggccgcgaatttagtagtagtaggcggccgc

SEQ ID NO: 196258 - DNA, 428 bp, Homo sapiens
cccactgtgttgggacgaatgtcgggggtcctgcccaacgtgccctgaggaccggttggagcagtacgagggccctggcttctgcggacccctggcccccggcacagggggccctttcaccacctgccatgctcatgtgccacctgagagcttcttcaagggctgtgttctggacgtctgcatgggtggtggggaccgtgacattctttgcaaggctctggcttcctatgtggccgcctgccaggctgctggggttgtcatcgaagactggcgggcacaggttggctgtgagatcacctgcccagaaaacagccactatgaggtctgtggcccaccctgcccggccagctgtccgtcccctgcaccccttacgacgccagccgtatgtgagggcccctgtgtggagggctgccagtgcgacgcgggtt

SEQ ID NO: 196259 - DNA, 483 bp, Homo sapiens
cctcacacctagtcaaagctaggtgagaccaggtcaccctccaagcccgggttaccagtagggggtaggtgccaaactggagagtagactgtgatgaatgggtagcagagatggcagaggacatggctcatcacctggggtcggggaccccgctctcagcagctcccttccctgagtgccctggcattggtgtgtctgtgtgttcgcgagccctggcatgccactgcggcttcacagtagcctcctgggcagcggctcatcagcttccagcacagcctttgttgttctataaatctgttaatgtttgtgctacctagaataagaaggaaggagtcattctacagagaggatttattcttccaggcgccaaaaccttgttccttacgattatgtcctgttctttaatggggtcccctgtactccacagtgtcattcgcctccacactagatgtccacacaatgctgtgtattttcactgatttt

SEQ ID NO: 196260 - DNA, 343 bp, Homo sapiens
aactaaaaaaagattttttaattgcttaaattaattgaatcttaaatgcattctgaaacagaaatatgcttaattttaattatcctaagtgtaatattagattccttcgtaagtaaattttccatggaactgacactcatgtgccaacattttgtttaatttgggattttttttttcattatactttaagttctgggatacatacgcagaacatgtaggtttgttacataggtatacacgtgccatggtggtttgctgtcatctacattaggtatttctcctaatgctatccctcccctagtcccccaccccctgacagtccccattgtgtgattgtccccct

SEQ ID NO: 196261 - DNA, 2452 bp, Homo sapiens
catggctgataatggagggcaggcaccttccacctcctccttgggatctggagcctgagcaggtggtgggcagggatgtgtgggtgctgctgccagccaaggagccaagcagatcggggtgtccttgcttgtcaccacccagcatgtagagatgagttagggtgtggcttaaggagaggatgggtctggcctcccaggtaaggcctaggaatgatagctggacacaggaacatggggccagggctggctggtgagacctaagtggaggcctcctgggccaggctagacagcccacaacggctggaggagggacctgcctgagttactagagtgtatcctgctgaatcaagaaggtgatatctgaagaacccagggataggagcaggcgaagttcctgcaggtggggtctcgggtgagctacagccatcagctcaggcctagggatgcagtgccggccctcaggtgagatcagaagagtcccgtctggtaggggtatgtagaagaggtaattcttggtccgccagggccagttttgcggcagccatgggtgtcgggatcaggcaggggtgtggtgggaaaccatggggtctctcagggctcggccagggtcagcgcacgccacagggccagttttggctggagaggcctgaagcagagccagagcaggtccaggtgagttctgaagaggagccaggacaggagagggacccataggtctgtgaattccagaggagaggcaggtatttagaggtggttctgtcaggtgaagtctgaggagccaaagctatgtatgtgcatatgtcagccgggctctgtgggaggtggtgtagacctatggcatgggacaggtgtgcacgctgggatctctggccggttccgaaaagtgaggatcaggtagtgggtggctgattgcacaagtttagaacccaggattagggacacacaggtcagcacctgcttctcagcatcctgactgggtgtgatgggcagagctcagggcgtcagaggcctctgagaatttgtgactgaagtccaagtctgtggcatcagggtctgcagagcccagatgcgggagaggtaggaatgtacctggtgatatgaggcaaggacaggggagctggggcaggtgaggcaggcaggtggcatgaggagctgtgctgggtgggtgcggtctgagtggctcaggttgggtaaagggccagagacctgggtctacagggcagacatcaaggctgagccagtcagacagtgtttgtcaacactgggctctcaccaggctccctcaggccgaggtcagcagccagggatctgtcatgtgtgaggaaagtgtctgttcagagttaggtgtgtataatagcagcctttcagagccgcgtctgtctgaggtcctaggagctggaatcagacaggtttgtatggctgggtttctaggggaggcctgaggagccaagactgtactcaggtaggcagaactggaccagtctggtaaggacgttggagctaaagataggcagacaggtcgagctgggtctgacaagtgagggctgaaaatctgtgattgggtccaggttggagctgtgtccttgggcgatgtctgagcagctctggtgggtgagcctgggtcccctgggaagagaccagacaaagggatggggtcagacaaagggatgacgaaccgcatccatcagaaaggtggatgaagcctgggtctggtcgaggtacgtagagcagatctagcaggcgaggtttcaggggttaaggtgagacacaggtatgtatttttgggtctcacaggttaaggtctgagccactgaggtcaggctctggtttgtatcccaagaccgagaagctgtgttaagcatggtgggtagagtttgtcaggtgacatctatgaaaccaggagcatgcaaagataggttgaccggaacagccatggtcaaaccaattaaactgtcctgcagttgaggtcaggcacaggtagaacggatctatcaggtgaggcccaaggagtccggattaggctcatctagaaagacctggatgtggtagatgacctctgaggatatgaagtgaaggcaggtggatagagccaggtctctcaggaggtctgaggagctgggatctggcacagtgagcaggtctggatttcccaggtggtgtcaagacagatgggtaggccaggcacagtggctcacacctataatcccagcaatttggaaggccaaggcaggcagatcagttgaagtcaagagctcgagaccagcctggccagcatagcgaaaccccgtctctactaaaactacaaaaattagccaggcatggtggtgcatgcctacagtcctagctacttgggaggctgaggcaccagaattgcttgaactggggaggcagagtgagccaagatggtgctactgcactccagcctgggtgacagtgagactatctccaaaaa

SEQ ID NO: 196262 - DNA, 883 bp, Homo sapiens
catggctgataatggagggcaggcaccttccacctcctccttgggatctggagcctgagcaggtggtgggcagggatgtgtgggtgctgctgccagccaaggagccaagcagatcggggtgtccttgcttgtcaccacccagcatgtagagatgagttagggtgtggcttaaggagaggatgggtctggcctcccaggtaaggcctaggaatgatagctggacacaggaacatggggccagggctggctggtgagacctaagtggaggcctcctgggccaggctagacagcccacaacggctggaggagggacctgcctgagttactagagtgtatcctgctgaatcaagaaggtgatatctgaagaacccagggataggagcaggcgaagttcctgcaggtggggtctcgggtgagctacagccatcagctcaggcctagggatgcagtgccggccctcaggtgagatcagaagagtcccgtctggtaggggtatgtagaagaggtaattcttggtccgccagggccagttttgcggcagccatgggtgtcgggatcaggcaggggtgtggtgggaaaccatggggtctctcagggctcggccagggtcagcgcacgccacagggccagttttggctggagaggcctgaagcagagccagagcaggtccaggtgagttctgaagaggagccaggacaggagagggacccataggtctgtgaattccagaggagagacggggtttcaccgtgttagccaggatggtcttgatctcctgacctcatgatccgcctgctttggcctcccaaagtgctgggattacaggcgtgagtcaccgcgcccggctcattttaaaatttttgtagatcagtgtactgttgta

SEQ ID NO: 196263 - DNA, 443 bp, Homo sapiens
aggatctggagaaggatcccttgtgatgtggaaaatgtgtgtgtgcacacgtgcatgcacaggcacatgcacgttgttcaatatggcagccactagccacatgtgactatgtggctactgggtacttgaaatgtgactactgtgactaaggaacttaattttaaatttttttttaattttaattcatttaaattcaaatgtaaataatcagcctatacaatcagggtcaattgctttttgacaagacaattcaatgggaaaagaatagtctttttcataaaggattctaggactactggatttccacatacaagagaatgaagttggaccctgctatggtctgaatgtttatcccccctgtcccctgacacacatatattgacagtccccagtgcagtggtcttgggaggtggggcatctgggaggtgattaggttatgaggg

SEQ ID NO: 196264 - DNA, 707 bp, Homo sapiens
gaagaatacaggttgtctactgtgtttttcttattttttttgtggaggttatttgatcatgtttatttgaaaattgacccctatatgacaacccattctgttgagtttattgttaaaagagcaggaatgattaatgactatagtgaaattatggattcctattgttgctaagctaatattgtaagaaccagctaaatcttataatgtatgatacatttacgtgtggcattctttggtatagaaatgattgtgtaaatgctgacgctatggggtttaccttctgcctaaatcaacatcagtgctaaaaatacatataaataaggtgaatattttgaatttatttaaggcccttctccaaaaaagaataataatttaaatttttttgtagaactatgagaaaagctaactaatttgcataaactgaggagcacaattggaaatagagcaaaattatttattatttttaagtgaatgcaagtttattaagaaagtaaaggaataaaagaatggctactccataggcagagcagcaaaaattattgaatttttaagtgaatataatcatattgctttgacttattgtcatctatttataagaaatagctattccacaatcttcttaatgtttaaatattttgtaataaacatattaatattgtatattatatgttattcatatatattaataataactaataaatatatat

SEQ ID NO: 196265 - DNA, 351 bp, Homo sapiens
cagtgccttaatcccagctacttgggaggcagaggcaggagaatcatttgaacccgggaggtggaggttgcagtgagcctagatcgagccattgcactcaagcctgggggacaagagcgagacttctctcaaaaaaaaaaaaaaaaaaaagaaagaaattgactgtgcaagtagactaaaatgactggctttttacatcatatatatgtgatgtcatatggccgaaagaccacctcactagaatatagctgaaagactgcctcactagaaatcaagagactaaggcttctctcttccatacccttacctctcttccatacctctcttccatgaccttagctaagccgttta

SEQ ID NO: 196266 - DNA, 210 bp, Homo sapiens
ctatctcccctagtgcccaggacagtgcttcatgcatagtaaatcctcagttaatgtttggtgaattaataaatgtgacccttaagaaattatactggaaatattttccatcagtgggtattaaattgttatttatgcaatggtgatgaagtcatctttctgataaaaactacattcaattgattaagtgttaaatctttggttctccat

SEQ ID NO: 196267 - DNA, 664 bp, Homo sapiens
aaggctcatcactatccttggcaatgagaactactggggtctccggctattgtcaaaccccgacatgtgcaaaaaacatcagattaaaccaagaataaatccatctgcaatattacagattcctttaaaaaacatgcataattaaaaattttcttcttggtgaaaagtaagatgctcctggaatctttgttcatgctcagaataagatttgattatctagcttatggggactcctgggctgaagacaggtgggtgtgtgtatgttggggaggagtaggaagggggagagaaagtatcttccaaactcaaagcaactggcagggaccgcaacagcgagcaggtcaagagcataaggaaactccctcgttaagcaccagggtgccctggaaacagccatttcaattagtgccagactgagctgaaatgaagattaagaggtcatttcaaacaatagctcaaggataatttgcttagcatacagatctctactaccatatacttctgctctgcaatgcagcattaacctcatttactgtttagttctacagggcacatattactagtcagaaagcccccttgtttctcatatagaaaactctactgaaagtctcacgtgcacatgtcattctcagtggaggccactgatgatgttgtcccacatgct

SEQ ID NO: 196268 - DNA, 426 bp, Homo sapiens
aatgattacttcaacaatggacggggtgataaaaacaggatcaaagttcccaggttctagtgtaagctttatctgtgactttactcaagacacgccctcagctaggtcctgaaattgtcgtgctgttctatggaacacagatggggagctgatttttcatagtcccttgagatgtgccataatgctaaggtctacaactcagaagccatgatgggagccactatggccaagcaattgaggtcttgttaattcatacaaaagtggtgtcttggttctagcttctgggcctcttgttttctagaattatttgatacaagaaagttctggcacaaccacaggcactttgtcatcccatggaatgtcaccatcatggatgtgactggtatcaaaccagtctcttggtccaagtgtacacaagtagtcaat

SEQ ID NO: 196269 - DNA, 143 bp, Homo sapiens
caaatacccattcaacagaattcatacagcggaaagctaaagacctacatgcatcagcaagaatgaatcttgtaaacatcgtgaggatgaaggaagcaattacaaaggcatatagccaatacaagcttgaaatggtcgccaat

SEQ ID NO: 196270 - DNA, 361 bp, Homo sapiens
acatttggtatccaagatggtatttgacgattttctctctaaagattctctgctcagacattctgtctccttacaaagtacatgggagtccattgagaacaggaataaaatagcaagtcaattggagaatctgattagaattagattgtatatcatttcatgggcacttttattatgacatggctctgaagtgtagtcatttgtttgcctgtatcttgagctcccctaaaagagagaacatgttctattcaacattgtagttgtagtacaaggcactcgaccaatgcaaatatatgaatttgcatgaattcactgatagtaaatcaatgacactgtttttacctagaactaaaaaaaaaaa

SEQ ID NO: 196271 - DNA, 534 bp, Homo sapiens
gaagtagctcaccgtgacaaagctgcctttgcctttattgatttgcaaatcaaagaagagagacatgttgggaacaggccccccaaaatctggccataaactggccccaaaactggccataaactaaatctctgcagcactgtgacatgttcatgatggccataacacccatgctggaaggctgtcggtttaccggaatgagggcaaggaatacctggcccacccagggtggaagaccacttaaaggcattcttaaaccataaacaatagcaggagccatctgtgccttaaggacatgctcctgctgcagataactagcccaacccatccctttattttggcccatccctccatttcccataagggatacttttagttaatcttttatagaaacaatgctaatgactggcttgctgttaataaatatgtgggtaaatctctgttcggggctctcagctccaaaccttttctgatttcccacttcacacctctatatttctgtgtgtgtgtgtctttaattcctctagcaccgtt

SEQ ID NO: 196272 - DNA, 337 bp, Homo sapiens
aaaattcgagacacctaggagtttgtggtctgcaagcctggggccctggatttctctttatcttactttctggcctgctctgagtctcctctttctcttggttcttccacatgttcatgctgtctctgactcactgccccaatgagccggcgcattgaggggctcttggtgggctcttagcgtggcgcatcggggggcgcttggagggcagataatttcatctgttaaatccaacacacatttctttcagggaaaaacaatgtcaccaaattttcagagttctaaactcctttccttcaagccggaattttccttttttcagcaccagcacaaagag

SEQ ID NO: 196273 - DNA, 478 bp, Homo sapiens
aagttcaaccttaccaggacgttttccctgagccattagaagtatttccactcctagtcttctacctcaaactttcctttttgtactacacttacattcaactttccctcaaaaacatcctcccacttcagaggtgttaagttattaagtcagccctaaatgtaaatagttttcatttctctaaccccaaaaacctcccttcccgccagcatgctttggtcttgtcacccagaacatcaaagccattgttttccgtaaaagcgttctgatcacttgggtgacttgtgcagataaacaccacccaccacatgccaggctgtgcagcaccttcctggtgccctgtcaggaggtgaacgcgccaggaaaaaatgccgaactctactggcaaatgctttgcacatggtcacatgccctgcacctctctccaagctctttgggtagccttggccagtcccttccccacaagggccctcttgca

SEQ ID NO: 196274 - DNA, 263 bp, Homo sapiens
taacatcacacagagtaaagtataagagagctgaagtcaggtctgacttcaaagccctcattctttccagaacgacagaatactcccacacttttagcaaaactcagtgtctgcttgagaatgacaaaagcagtgattttctagttcatgggtccctcagagacatataagaaacactaccaaaaaaatgagcaaaattgaggcaccatagaatatctaggacaaatacacacacacacacacacacacacacacacacacac

SEQ ID NO: 196275 - DNA, 401 bp, Homo sapiens
ttaaaactcagaaaatttgacaatttgttggttggccaaattggttatccaccggttgatttttggcgagctgacctgtttcaagatggcaggtgtggatgggactctgtccagggctggccccacacacccacattctgatgacgcagaggtcatgggactgtgccagggcccccagactacatccactggtccccaaataactggtttcactggcttcaacacatggaggctgcttgatgtggtgggggtagggaggtgttgctgtcacttgaggcagagagagaaggaagcctggccacgctggcacagtgtgccaatcaaaccacgtggcctcatgcaatagagtgcaagggtatccgaggtcaatggctgtttgtatttaaggatctgattcttta

SEQ ID NO: 196276 - DNA, 238 bp, Homo sapiens
caaattcaaaagcttcctatgatgctgggttccactgctacaaaggtcaagtacattaacagcgtatgtggcatcaacttctgaatcatggggccaggtgtggtggctcacgcctgtaatcccactacttgggaggctgaggcaggagaatcgcttgaactcaggaggcggaggttgcagtgagccgagattggcgccattgcactccagcctgggaaaacaaacaaacaaacaaaca

SEQ ID NO: 196277 - DNA, 354 bp, Homo sapiens
gacaggatcagtacggccgtttcacagaaaaggagacagaagccaagaatgacaaaataataatgcctccatcatacagccagcatgaacaggagttgggaatgaaactcaggactttgggctccctgccctgcgttcctcagcctgtggagggagagggatgacacagagatgctccagggaacaagagcatagctgaaccagggcgacctctaaaaaccccaggagggccagagcccccaccttccctgcagccctcacaggaagtgctcaaggaatgatcatcagctgactccagcacttcagtaacacaaaccaatcagaagacatggttctcggtctcagggaatccaa

SEQ ID NO: 196278 - DNA, 343 bp, Homo sapiens
ggtctctatcatttcacggcaccaatgacagataaaacagaggtacctaaagaccttcagctggtataacataaagctcattattaagggcaaaaccctgtgtttatgcaatatcacaacagctaaatttaaatttgccagcaggggcccaggaagtgtaaatgtgtgacattggtaggagcatttgcctaccgcaaacttccttgcttttgaatacatcgcactgtattattggtcctctgcatgaaagtaccataatctttaaagtaaacagacaagaagaccaactgccatctgtcccagtgggaacatgaattgccgcttctggcatatcctattaggt

SEQ ID NO: 196279 - DNA, 287 bp, Homo sapiens
ttgcggtgagccgagattgcacctgggcaacaagagtgaaactccgtaaaaagactgtataaaactgtggttaattctttaaatgttgggtagatttgtccagtgaaatcatctggacttgaaattttctctattggataaacttttcaattactatatcaataattttaatagttactaggctattctaactgtttcattttgagtgagttttgggagtctgcattttttgaggaattgattcacgtctcaagctgtcaaattcatttgtattcatagtaattccc

SEQ ID NO: 196280 - DNA, 353 bp, Homo sapiens
agtcaaatatctgtttaactagcaacatagttactcgtgcatatttaaaatactacatgagtatggcctggcacagtggctcatgcctgtaatcctagcactctgggaggccgaggtgagcatattgcctgagttcagtttgagaccactttggacaacatggtgaaaccctgactctataaaaatacaaaaatgtagccaggtgtggtggtgcgtgcctgtagtcccggctacttgggaagctgaggtgcaagaattgcctgaacctgagaggcagaggttgcagtgacctgagattgtgtcactgcactccagcctaggtgacagagcaagactacatctcaaaaaataaa

SEQ ID NO: 196281 - DNA, 715 bp, Homo sapiens
aaatgagaggtcaaaaagggcagctggcagggcaatcccatggctgtgccaccaggcaggggagggagtgagttctccaagtttcaggtcctcctcttctatcctgggttagggtctctcctgccttttgtagcttcttagttaattacccagcaatcggctgcaggtgaataggtgaagtgatgaagtgagaggctgaaatcctgcctaagactcttagagtgtgagcataggcccaagcacttaggacttcttaggccttctggccatcatatggcagtcatgtgaaataaggactcaacctctcagatattggagaggactgataaaggcattattttctttttaatttagcaacttacagtaggccttagactctatgtatgtcaggaatgtctgggaaggtttctctgtagaacattagttctatttcttttctttaaaaaatacattaaatgtctgggcatggtggctcacgcctgtaatcccagcactttgggaggccaaggtgggcggatcacgaggtcaggagatcaagaccatcctggctaacacggtgaaaccccgtctctactaaaaatacaaaaaattagccgggcatggtggcacgtgcctgtagtcccagctactctggaggctgaggcaggagaatcacttgaacccaggaggcagaggttgcagtgaaccgagatggtcgagatggtgccactgcact

SEQ ID NO: 196282 - DNA, 394 bp, Homo sapiens
ttacatatgaaagctagcttgcatagctatgcttgcagcttgaagtttcaggctgctttctgttagaaaagaaatggtttgggggctgctttttattaatggaaaattccaccaagaactctttaccctttctaattgcctaaaataatttttaataactgctgtattaaaaggatatgtgtaccgaaactaagccaaaacacaactttaataggcttaagatctctgtgtgtttgctcctagacaaaacaaatggggtacagaacaaacaaaaacatgttgataggagagagaatggatcatggtctttcatagagcattctgtgcttctggactcagaaaagctgtcagacacctgtttatggtttattacagctacagaaaacacattaaa

SEQ ID NO: 196283 - DNA, 361 bp, Homo sapiens
tcggtagatgtctcatttatttatcactacacaggcctatccaagtccaatgttattgcattttaaaggaactaaatttgtagtcagttaagacttgtagggagaaaagtaaatggtctccaagttctgttaatagaaatagacttcaaattttacataagagttacttctttttctccccttctgagttaaaatgaaagataagctactctggtagtaaatggttaaaatagtactgtagcattctgcttcttacctcaaatctaacagcattaatgtgtatattccacaacaactaagaagctaggtgaaaccatcaagaaccaaaatggtgatcctttgaggcaaggatcacaaagca

SEQ ID NO: 196284 - DNA, 692 bp, Homo sapiens
agaaacaaggagccaacagagagtctacgcagtgccacaatgtgacttttgtttttaaaagatggctgttgagaatggattgcaagggaagcagagagtccaggtatcaggctagtgcagtaattgaggtgagagaggatggtggcagtggaaagagggaggacgatgcagattctacatatatttgaaggtgaaacaggatttgctactgaattaaaggtagggtgtatgagataggggagtgaagatgattacaaagtttaggggttttaccactagaagtctgtggggagaaggagtttgggggaaataagaaattctgtttgggtgacgttgaatttgaggtggccaccacacactcgggtgtagatactggggaaggagttgggccttacagagtggaactggagaaaaaagtcagagctggagacctaaatgtgataatgattggaatatcaaccacacttaaagccatgagagaagatgaggtcaccacgagaatgagtgtctacagaaaagagatcaagaactgagaccttacagatgatcatgttttgcattatccatcaatacaagcaaaaggctaacattaactcagggaaggcattttcatgggaaaccacagctcagcagtgcaggcatttagcttttgggccaattctggcttaattcccatgagctgtcagcaccaa

SEQ ID NO: 196285 - DNA, 426 bp, Homo sapiens
ctacctttttcttcttaacaagttacaaaaagatttattagggaaggaagttgagaatatgtaagtagggaattttgttcttttgtatttttatcaaagtattttagttttcatattgcattaaaaaataatactattgaacagtatactattagtaatcactttttatcatgctgtgtcttcatatagtctgaaagaataatttttcttgttacaaaataatgcatttttattgttgaaaatttagaaaatctatctttatttgcaatcttctgtcagtatttctcagcctttttcatttctgtctacttgaacttgatttgcatcattttttcttgttactccaaaccaatttatgtttctctgggtataaatacaaatttaactatatatagatgcaccagctcttatccttttcaccgttta

SEQ ID NO: 196286 - DNA, 383 bp, Homo sapiens
ccaccaatattcctccaccacactgagtatatatcatttctagcagaagcagtattattcacgggggctcaatgaattgcaatagagaacattcataaaagagctctaaaaattaaagcaaagaggcagataaaaacgttgacaactaagttcctgaaatttatagaatatgactctgcaatgtatgaaatacatatgaaaatattttgtttggtacattggtgcctcatattttttccttaccctaagaaagggtaggtttgttgtatagcagcacagattgatatggatatagaaagagaaaatatttttagttttagggtagacttgtttgtttgcttataccttagcaaagaaacatacttgaacaattgggagaaaag

SEQ ID NO: 196287 - DNA, 381 bp, Homo sapiens
attctacttcctaatgcttccgctacagtaacttcttcttgtcttatcacctcaaatccatgtttttggtgatgtgccattatcttgctttaagctcttcaatttcttccagtggctggtagaaaaaagtgaaaattccttcgtgtgacatttatgagccttgcctggttccagctatcattcatcatgccccacctcatggcctgtgccccagccaatcaaactgcctgtaattttctcagattacagtctgggtgaggcctgcaaggctgctagttcagcgctctctgttgtatcttcctttggtctctgatttcttttactctcccacctcccagaaaacttggtccaagaacagtgcttctctctttaaccttcgct

SEQ ID NO: 196288 - DNA, 302 bp, Homo sapiens
agtcccagctactcaggaggctgaggaaggagaattgcttgaacctgggaggcaaaagttgcggtgagctgagaacgcaccgctgcactccagcctgggcgacagagggagacgccacctcaaataaaaaagtctccagatattgtcagatgtctctttgggataaaattgcccctgattaagaatgactgtcttagggattctaattgctaaagggagaatggggcccaggattctatttttaccaagctcctcgggcaaatctggttcctttgtatgttctattggacctctcttcattt

SEQ ID NO: 196289 - DNA, 290 bp, Homo sapiens
cttggtgccaaaaaggttggggactgctgctatatagaatttaatattcttgcatgcattttctgaaccttctagtcacttgttaaatcccagttcagaacatcacattagatatatgatctgcactgtgctaggacgtgctccccaccaaaacgtcagcgtcttaagcttgtattcatatgaccataggaaaacctacatgcagaactttgatagtagttgttagaccaggtcaagatccatgtcaaagagataaattacaaattatcatctctctgcttaacggtctc

SEQ ID NO: 196290 - DNA, 376 bp, Homo sapiens
tcatcttcatctttttctaccagatctctcaattaatttatacaactccggctttgccctctttcctagttctgtttttatattagaacctcaatctgatgccatgactttatataaaatttataagctgaagaaagccaaatttaaatagatagatatagagacatatttatatcaacaaacagatatataagtatatagataatagatatacagacatatatttccaactcaactttctcaagcataatatctagcagcttgggaaattagtgttagatgcattatagcatccactttagtgttccttggatatgctaggtttcttaccatatctaggccctcaaatttgctttttatttttattattttttta

SEQ ID NO: 196291 - DNA, 462 bp, Homo sapiens
aaggaataatacgttccagccttcaggagcaggtgaacggatgcaaacgtatggtgagatggaaggaatatgttccaaccttcaggagcagagagctggaagagaaagtcatgttcccaacacaaagaaatcatgtctgaagcggtgggcatcccagcgaccctgatttgaacatcacacattgcatgcgtgtatgaaaacttcccataaatacggacagcgcgctggacaggtgagcaatactgcctgggctctgcagcttctggcctggtgcctacctggctgtgacaagcaggccaggacaggcgtcgcctctgaccagccctgcctgcgacgaaggccaccacccactccccaggacaacggaggtctcacagtgtccaccgcagctgtgccatgggaaccctgggggtcccgcaaaagaatattgtcaagaaatacagtgtgaattcctctgagaag

SEQ ID NO: 196292 - DNA, 451 bp, Homo sapiens
gagtaaaatcctgattggctgcccatgtcttaaccctcagaacacataatctattagctacggtctgactgccgtagaggcagaggcgaggctgaggacagaaggtaatccatcagaggcatctagcaatgcatggaacattgtttccccactaactagcagttactttatggccattatttgggatgtataaataacactgggataaactcctctgtattaatgtttccactccccttgtatcataaattatttactttgattacatgcccagaagtagaattactaggtcatagggcaaacatttttaaggctttttgttgagaaggagtctcgctctgtagccaggctggagtgcagtggcgcgatcttggctcacggcaacctccacctcctgggttcaagcaattctcctgcctcagcctcccaagtagctgggatttcaatcgtg

SEQ ID NO: 196293 - DNA, 679 bp, Homo sapiens
ggaataccatacaaggccaggcacaattcctcatgcttgtaatcccagcactttgggaggccgaggtgggtggatcacctgaggccaggaatgtttgagggtgtggaaagtgcatatgtatctattcattgtctgttggtgtgtaacacattaccctgaaaatagccacttaaatattatctcacagatttttgagagtcaggaatctgggagtagcttagctggatggttctggctcagagttcctaatgaagctataacaaaatgttagctggggctgcagtcatctgaaggcttgactggagctagaggatctgcttttcaagatgactcacttacatgactgctgaagacctcagttccttgctggttcttggcaggcaggtcttaattgttgaccatatgaacctctccataaggctttatgagtgtcctcatgatgtgactgctggcctctaccagtgacccaagggagagcaaggcggaagccaggatttcttttatattctaactcagaagtcactcagaacctcatattctgttagctgtgattctctaactccagccccacagtcaaggagaagagaattaggctccctattttcttcttttaagggaggagtatcaaaaagtttatggacaaattttagagccactgcagtctatttcagtggtagtg

SEQ ID NO: 196294 - DNA, 111 bp, Homo sapiens
ggactggatatcagaccaagattctgataaaaggggataacagagattaaccggagcagaaaaagtacttttctgagccagagataacaagagaaacttaaagaaagtgct

SEQ ID NO: 196295 - DNA, 844 bp, Homo sapiens
  misc_feature (42)..(42): n is a, c, g, or t
  misc_feature (45)..(45): n is a, c, g, or t
  misc_feature (48)..(49): n is a, c, g, or t
  misc_feature (53)..(53): n is a, c, g, or t
  misc_feature (57)..(58): n is a, c, g, or t
aaaaaaaaaaaaaaaaagaaaaaaaaaaacaggcaggagagncgnggnnaatnggcnnagggtgtctctctgtgtctctgtctctgcatgtgcctctttctggtctctctgtggggtgtgtactctttgggcttccctgctgtttctcatcatctccctgtctgcccgtgtccccctctgtgtcactctgcctctccccgtgtccccctctgtgtcaccctgcctctccttgtgtccccctctgtgtcaccctgcctctccctgcgctcttttggcctctgcatctctgagtctcttgtttctgtgtctccttgctccttctcccaacatgatatttggggagggggcaggtggaaggccaccctctttagacccctgtccttccaactaactgcataggctgaggtctgatgagaggcccaggctgcaccctacaccctttcattgccacagcctgggcccgcccctgacccctggctgagtgtgtggacgctcggacccctttcttcctccctccctcacctcccatcccccatcccttttccccctgagcctaggggccctagtcctgcaggctggggagctgtgggtttgaaggtggctccatttctgcctcctgccgcccctgcacagagccactgtaattacatgtggctgcggttcacctcttccccagtgctccggccggctccttgtcctcctcctgactgtagcccctccctgctcctcacccccaggttcctctgactcctctatcatcatcctctctgacccagtttctcccgtctccctccgcgctctgtatcacacagtgctaccttctctgtcgcctctgcccctgccc

SEQ ID NO: 196296 - DNA, 440 bp, Homo sapiens
tcaacgctaagcccttgaatgttcaaattcatgaaatggagtagttaccctggggcagaggtggtggtgagaaaacagaaatgtccaactgaaaataaataagccactcaggagttcctgcctctgccccagtattgagaatgggatagcttgcttcttctcaataaacagtgttatagaatgcatttcatactcaaggaggaaatagttataagagctaggatactaattttaagatctaaagatagcatagtttgtggtgaaaccttagaaaaatctaaatactttcagtaagccctttacattttatatgtagaccaatcattaatttatagcctttttttccatacacttggagcatataacaaacctaagaaagtttaaaagtattccaaagaaagcagaacttagctaggagaatttccctggtgagtcacctc

SEQ ID NO: 196297 - DNA, 762 bp, Homo sapiens
aaaacagatgaatgatttagtagacctgacaaatcaactaccagtcatgaagtgggaagagctgagaatcgatcctgttcagactgtgggactagaataaattctgtttagatggtgggacatatagaggcatctgaaatgtcaatcctagttcctcatgccaaataagaaggattgtgttaaagattcctgtaaagcagttaaatctctagcagttagatcacatttccccattccagtcactgagtaacctacctacccccttgaccctaacataagtctggagttttattttctgaagagcgcaaaaaggagggttattatatgagaggttctgccaacaaaatggaggtcatgggtaatatgggtagcaaaagtaagtaaccatctaaatattgaattctggttgattgttaaaatgctgtgatagtcatttgaaccaatcacaaatattttggttctccccttcttggacatatggtagaatttcaattctatttctgtttaaaattatgtgtagccatgtaatttcctttggctaataaaatgtgagaagtgacatatatccattctgggctgaagtttttggaggcacggtttaacacattttcttttcccactacagtgatcacggaagtatatgtgaagatggaatctccacaagtttagatccttgactgactgctgtgaggagggccccaggctgaactatataggatatatagtataagaaagaaatcaactttctttcttttttttttt

SEQ ID NO: 196298 - DNA, 579 bp, Homo sapiens
aattacacatgaatatatatcatactattgatacaaaatgtatatatattaatttaaaagatgtatgcagtagattataaactcctttcaagggactttttttttcttaaatcacataagtgagataggttaacaagttgcaattataacatctctatttggataattgttcaagaaatttaattacaggattttctgtatcacgaataatctattaactttgatgaagctatgaaggtttctttctatgactgtttgaaataggctttttgtttccatattacttgggggatgcctgcaataagtaaaattcagtgagatttagtcatttaacaaatatgttaattattactatgtacccagcacagttctagatgcccgagatatatcagtgaatgaaatagacaaaattccttgccctcctggagtttacagtctaatggtagattcagacaacaccctaacaaatgggttaaataatatgttagaatgtgtaagtgctatcaagaaaaataaagcaggctaagggggcttggccatgctaggataggagttagggtacaatatgagcaaagattt

SEQ ID NO: 196299 - DNA, 396 bp, Homo sapiens
ccattcatggtagcaaaaaagcacctgcaaaatcagtaaaggaaagaattgcagacagtcaagaacatatatcaactagctgaaagtgagaagatctagattcttatttgtgttggaccactaatgaccagtatgacttcgggcaagttacctgctgttccagagtctcagctgctacatttgtaaaattggtgtattggtctaatgcctctatggtgctttacaattctgtgatctgtgacttatactcactactaatataaggaacagggcacctacttttaaaagctgttattctttaaaaaggaggaaatggtttcacattgattatcagtgtttgatttttgcctcaataagaatattggaacaataaatgttaatttagagatggaatta

SEQ ID NO: 196300 - DNA, 121 bp, Homo sapiens
ccctaaagaagactcagggcttctgttcagtcatttgtgccatgtgagaagttaagtgctctatttcccatttattactatctaagtgtaacattcctatttttacccaaatgactggaaa

SEQ ID NO: 196301 - DNA, 493 bp, Homo sapiens
aggaccagtcttacaaacaggcccttctaaagattgtagcatcaggcctagctatgttaactctcaggtaaagctcctatgcctctttcccagttacaggctaccatattgccattctgtatttttgactctctgaaatgccatcttaacctttattatagcttaggtttcactggatcttaagatttttactttcctttctgattgtggcctcaatgaaggtcttcaaatgttagaaatagagaaaagtagatgtgcttttatataggtagtctttaaggaatggaatggcttctctctggacgtagaataaaaagaagccagagattctcttcctctgcccagtttaatgacagtcacagagcagtggcatttttcaaatgttttctttttctgtgacttttatatttacagttatttgtatatttctgcatatgtcttacagttaaatttttttatttttggttttagagcatttactgaggtttttaga

SEQ ID NO: 196302 - DNA, 182 bp, Homo sapiens
gcatgctggaggattcacttctaagtcacatcgagagggaaaggacatatactgaggcttgagagggatgaaagtgttcaaaggaggcagaggctgtggttgggggtattgagagagtgttttcaggatgcaggtatctgggttctacttacagcccacccccctccccgggaaacaatgag

SEQ ID NO: 196303 - DNA, 881 bp, Homo sapiens
gtatttagtagagaaagggtttcaccatgttgatcaggctggtctcaaactcctgacctcaggcgatccacccgccttggcctcccaacgtgctgggattacaggtgtgagccaccaagcctggccagtttgtatctttataatgaccccaccagatcagagaggcaggtgatattattcctgttctacaggtatgaaaactgagactcaaagtggtttaggtgtcttgcccaaaggcatatgtaaaggaagcgggaattgggtcttctgactccaagaccagctttctttttgctgttactgtgctgtctcacatttgttatacattccctgaagactcctgtgagggaaactttagaatttcatcaaagcaaatcctaaaggtacatgataaatttgttgtctgttttattgagtaaaaatctgtctagtcagcagtccatacgttaggtcagaggtctaaagtaattgtttactgggcttttttggatacattctgaggcatattaattctttcaggcttttttttttttttttttttgagtaaattactcttgaaagggttcttattggtaccctctagaggttcagaagagttaattggcttacaaaacatatgtggatcgaacttggggaatagttcagtcatctcttaacatctggatgtactgttttattattttaccattatgtatttgtatctgaaaactgcagccatttaaaaataaatatggtaagtaaacagtatgtatataattaagaataattcactgtagctcttcaagtttacagcactgttaaaaataacctggtgtatccatgtaacttatgaattcaatgaaatttaaataactgaaaaacaatttttacagtaacatgcc

SEQ ID NO: 196304 - DNA, 221 bp, Homo sapiens
tggtgctgtcaacagccagcatggagtgcccggggctatgtgtccagcatctttgatcttactggttttcagtctggttattgtaacagggactcgctggacataccgtcaccctctgtggtacacacgggccgtcaggggttttgtgtctgaggatgcagctgtcctaggttgctggaaatggaattgctgggtcagagagaacgtgcgcgtggtcaagc

SEQ ID NO: 196305 - DNA, 836 bp, Homo sapiens
acaactactgctaccatctggcgtgccattcagaggttgttgcacaccggcaaagttacccagtgcagagatgatgtgccaaaacttctctaatgtggtcttcacttagtacctcgtctaggttttggtcgagaggcagaggcggggtagtggcatgctgaactgagaagacctggcttggaatcctggctcttctagttggtaattggtgatcctggacaagcaaatgacttcttagaactaactttttcctcttctacatggggacacttagaaataccggaaggtttaagtgagagtaaagtgaaataacacgggaaaactcctgacgtgtggtaggtttattcatggtagcagtgctttgttgtaatactgaaggttctgaaaccgggacctccaaggcagcagtccaagctagaaagtgcgtgtgttgcactttgtacatacctcagtcttgctgcgcagatattgtagttatatgtcaatatgtcctggtggagtgtgagcctttcggggcaggcttttagcccctgcatcttctgtgtttagcacctagcaaaaagtgcctggcacatagaagctggtcaatcagtgttaaaagactgcaggagtaaatgagcgaatgtgttggcttttcatgtcctgccctctgagaatgatagtggaaatagaaaaggggtgatcatagcactcatcagcaataggtggggctcaatttgtttactaatctcacccatgtgtactttataaatctgtgcattttaaaagggacctttttaaaattacctttaaactttatatattcagtaataccacacacacaaaaaaacaagaga

SEQ ID NO: 196306 - DNA, 499 bp, Homo sapiens
actttgtcccctgggctggagtgcagtggcataatcacatctcactgcagccttcacctcccaggcacaagtgatcctcccacctcagcctcccaagtagctgggaccacacacaagtgcatgccaccacatccacctaattttgtattttttgtagagacgggttcttcctatgctgcttaggctggtcttgagctcctgggctcaagtgatcctcccaccttggcctcctaaagtgctcatattataggcatgagccaccacccccagcccatgattctatttttaatgtataaaaatgcaataacaggtataacaaaaaccctccttctgccctactttctcgtccctgaggtaatgctactgtgtgtttagtatacatgcttccagacttttccccatttacctacatacatatttacataaagcaaaatagatttgttgtgtggtttttaaagtcgacgcggccgcgaatttagtagtagtagtaggcggccgc

SEQ ID NO: 196307 - DNA, 442 bp, Homo sapiens
atatgtgtgattccacagtcctcttatcacgtgtacactcatcaaacaccacggcaatcaagataaagaactgtttcatcaccacaaagatctcctgcactcctatataatcaacctacccctttcgctctctgccattcctaaaccctgacaaccacaaatctgttctccatttctataattttgtcatttcaagagaaatgttacataaatggaaccacccaggatgtaaacttttgaggttggcttttcttccactcagcacaatgtccttgagacccatccaagttgttgatgtatcagtaacccactcccttttgttgctgagtagtattccgtggtatggatgtaccacgttttgtttaacgatttgcccattgaaggacatctgggtcattttcagttcttggctattgcaaataaatctgcttggaacatttgg

SEQ ID NO: 196308 - DNA, 270 bp, Homo sapiens
cttggcttcccccttgatggtgctgacaggcagacccctctgagggaaagagggctccaaagtgacaggtgttcatgggtccctgtggctgcatgttggaggaggacggggacagcaggtaagaggctgctgccgtagtgctggtggcagaagaagaaggatggaccaagatgagggcccagggtagcggtggggagagtgagatcctggaaatcttttggagatggagctactggacctgtgcattagaaggatgaggtgttcaaggct

SEQ ID NO: 196309 - DNA, 437 bp, Homo sapiens
tcaactttttctcatgggagttttggtaaattttcatgaattaaaacatgaatattcaggttaccacaagatggcgtcagatcatttcaagtaatgccaggtagggggagcctcagttcaataaatctttaaagaggttgaaatatgtgcctttcatagtatggtagttagctattgcaaataaacccctactttcttctactgttcttctatggaaacttgaggctcttggctgttcaactccaaaaattatgtaagtgtgaagtatttgagtttataatgtttaagaatttctctgatagcttagtgaagtaatcagaacttgaaaaatttgatcatcatgtctccctggtgtttacattttcaacgtcttttatagtttagttatctttctacaacttatgttgaatttgtaatattcagtcaatatatattta

SEQ ID NO: 196310 - DNA, 257 bp, Homo sapiens
caggatgcagctgcctttatctctttgtcaaagtatggctagatcaattcactagcttcctgtgtttacaaggcggaagaaatggcaacttggtgaaaaaggaaagtggccagacaaaagctggaggccagcattgatggctgggaaattaattaacaagagaaaatcagcaagtaatttttcttgagcaaatgtgctttgtctttgagcttttttttaaatgttatgttagttggttaattgccttcggacactga

SEQ ID NO: 196311 - DNA, 235 bp, Homo sapiens
agctttgctagattcacatgactcgcatttggcagagttgagattccagcctggatttctgcagtcttcagtgtcaaagcaaacctccagcccccataagctgccctcaaggtcagacactgataaaactgacaatacttcttgatcttttgccaacattgggattatcactcttttaattttaaatatcagcataaattgaacgttaaacatgaatctgtaaaaattatagttg

SEQ ID NO: 196312 - DNA, 762 bp, Homo sapiens
caggtttttacttccttaggaggacgtgctagcatcaccggtgttgtgggccttgagccgagggcctcaggactgtgatgaggctcagggccacagtaagagcagggtttcctgaacacaacactgcacttaaccacacctgggtgaaaatttcattttcttcacacaaagactgggctctaaagtgtccagtgttctatgagtctcgataaggtgaaataattctgttattgttgactcatagattttctgcttgcatgtatacctaaagactttttgcaattcttgccagggtatatattttttaagatacaaaactgtcttacaccccacagcaagctttaatcctgtgaggacaatctgtttctcctggcaacactaaggctactagatgaacaggggtcagccgggtagtttgaagagaagccttggtaatctgttagacaaagctgagaattctctaaagaatgtctagcaaagatacttcagtttgaagtgaatagaaagggttttgttcacaggccctgccttgctgctggattcaaagaatgtgcagcaccagaaaaggacatcaatgtccttcttgaaaatgaaacacacacgcgcacacacacacacacacacacacgtgtcttcttttctgcctgcattgagcattgcataactgtggaaaagttcatcacgcctgaaaatatgtatctttcctttgatccaaagcaagtgctatattggaataaagatgccatatcttccgcctttagt

SEQ ID NO: 196313 - DNA, 276 bp, Homo sapiens
ttcactggggcttaaatgttgttttacccttctttgtaacttcaagaacaccaagtttagtagtttgtgatccattaaaaaattaaagatgtaaatattagcttttcttaagtaccactctatgaaaaatgtagtcaaatgggatttaatttaattaacacccatggaaagaggcaaaatgtatcctgattagaatacaataaagtgatactgcatatcttaaaaatggatataccaattgaaagacaaggcttttagggcaaaaaactatataat

SEQ ID NO: 196314 - DNA, 673 bp, Homo sapiens
tgaggctgcctagattaccccggatggcgacatttcaatcatagtggcccagaatgagctccctcctcatgacttcttgacctcattttcttctactctccccaccctgctcattccattccagacacagtcctccttgccgtttctcaaaaccatcaatctctcaccttaaggcctttctttatactgactgtccctctgcctggaaccctcttctcccagatatccaaattgctaaccctcttactctttagaatctttgctcaaatgtcatcttctcaatgaggcctacctctgaccatctatttaaattttcaatctgcctttcttcctttatattcctacagcaatttcatcttctggtatagtatctaatcattatgcttattgtctatcatctctctctttcctgcttgcatgaaagtgttatgaaggcagaatctctgtgtctttttgtacaccaatgtatcccatgcgtctaaaacagggcttgtcacataatagatgcttaccaaatattaattgaatggaacgaatggattcaaaagcatgtaaagaatgtggcacttaaaatctaagaggaagttgtatgctaatgctatgagttttaacttccctttaaagtttttgcttgaaatggtcgccaatccgggtacgagctcaattctatctg

SEQ ID NO: 196315 - DNA, 557 bp, Homo sapiens
gagcatttcaagggatagtcacgtagaattagaattgtgaagatgataagtgagcaaagattctaaagagtaagagggttagcaattgggaaccctcttctcccagatatccaaattgctaaccctcttactctttagaatctttgctcaaatgtcatcttctcaatgaggcctacctctgaccatctatttaaattttcaatctgcctttcttcctttatattcctacagcaatttcatcttctggtatagtatctaatcattatgcttattgtctatcatctctctctttcctgcttgcatgaaagtgttatgaaggcagaatctctgtgtctttttgtacaccaatgtatcccatgcgtctaaaacagggcttgtcacataatagatgcttaccaaatattaattgaatggaacgaatggattcaaaagcatgtaaagaatgtggcacttaaaatctaagaggaagttgtatgctaatgctatgagttttaacttccctttaaagtttttgcttgaaatggtcgccaatccgggtacgagctcaattctatctg

SEQ ID NO: 196316 - DNA, 621 bp, Homo sapiens
aaaaaatcaccccaaaaaaagtgccaggcactggggtagaacacaatgagtaaaacagtttctattcttttgaggagcataatccattttgttatcatggtaacagctgacaaagcactttctcaaatgtattaactgatcatcctgtaaatacatattatgattccacgttgatgtgggagcctcctactttttgctatgccctttcttcctggtctttcttgttttctgtgataaatctgttctagggagggtcagatcccacccttccagacccaagaactgtctctacccaactatgatgttgagtctagacaagtacttacagagggccttacagatagtctaaattcacatcttcacccttctgttaaattgtttttacaaatacaaaaataatacatatttgttcctgatttttggcaccaaaaattataatacatagtctttaggaaaattcaaagatttagaagaataaagaaaagcatatgtagcatattagtgggggggggagaatgaaaagcaaaactctcacttcaccctaatcttcctctacttcccccaaaagtaaaccttctgaaatatatcctctcagacctcttttcatacatttataaaatg

SEQ ID NO: 196317 - DNA, 536 bp, Homo sapiens
caaatcattggtgttttgtggatctaattctgtagtttatgtgttttgctgtcactgttaccaggaatggcttgtttactgagcccatgttccttggatttttatctctgaaaaatctttagacctagatttaaagttcattcctcaagagagaatttgtatttgcatttttcagactgctgatactactaccaaactcagatcaccttaaaatttcagcttgattatctgggagtggggagggaacgctacataggtattgtggtttctagccctaaatcaggtagaatgcaaccattttattaggaatagacaggggacacatttgggggttcatttttttgtttatttttacccggagctaagactgagataggcaaatatactgacagttttgctctgtggagcacagtttctttctagttcacctattgagtatgttgtctttgcaagttcttggctttatgcaaaggccttggattacacacacacacacacacacacacacacacacacacacacacacacacacacac

SEQ ID NO: 196318 - DNA, 416 bp, Homo sapiens
tgctatccccaaactgccacacttaactcctgaagtaaacaaacaatcttggctggcaggactatgctgaatctccttaggcactctctaatcagatgtcctaggtcctcccaattcttagaccttttatacctgtttttctccttcttttattccatttagtttttcaattcatacaaaactgtatccaggccatcaccaatcattctataagacaaatgtttcttctaacaaccccacaatatcaccccttaccacaaaatcttccttcagcttaatctctcccactctaggttcccacgccgcccctaatcccgctcgaagcagccctgagaaacatcgtccattctctctccataccacccccaaaaattttcgccgccccaatacttcaacactattttgttttatttttc

SEQ ID NO: 196319 - DNA, 936 bp, Homo sapiens
aataaacagtggtgagatcatgtgaggtgaggtttttgtacttcattccaaatatgatgaaaagccataggggggttgagaacgagggaatgatgtaatctaactctggctacatgtggaaaataatctatagagggatggggcaaaatggaattgaggagactaagcaggggtggaggggagtggctgttgcattattccagggaagatctgatgtttgctttgaccatagaggtagctgtgaggtaaagaagttgtcagatttgggaatgttttgaaggttgaacctacaggatttattggagtgtgagagaacaagaaagactaaggtgaaatcaaggttttgccccaagcaactgggttaatgatgacttcgttgtttgagagcgggaacactggggcaggaacaggtttggaggaagaaattaagaatttggttttgtacataattttaagatgcccagtgaataaccaaatgaagatgttgagcagacagcaggatatacaagtctagaaataaccttatgggaaatattactgcatatttgtatgctgatggaatgatctaaaaaaagagggaaaaattgatgtttcaggagagatgatggcaggaggggaatccttaattaagcaagaagcgttcagattcaggatcaaatggaaaagtgagccttagatagccgtgtgggcaattcattctgtgcaataggagggaaggcagaggatatgggtacagatgcagatagactaatactttggtggtggaagagtgtagaagttctctcaagtactacttttttctcatcaaaaaagtctgaaaggttggtttaacattagaaaatcagttaatatactgtatcatagaacaaaggacaaaaaccacacgatatctaaatggacacagaaaaagcatttgagagaattcaatactccttc

SEQ ID NO: 196320 - DNA, 191 bp, Homo sapiens
tcaaaaaatattttcctaagaaatgttatttggcagtaagactatactatatactatagactacactgttattttggcgatacgactatactatatactatacgatttatacaatgaagcttatattctaacacctttccactggaaaatttaaacgccaaataaaaacttattggtattcaaaagatttg

SEQ ID NO: 196321 - DNA, 305 bp, Homo sapiens
tagagttcaacaccaaacaaaataaatcttaaatctgagacagctggccattaaattatgagtaaaattcatcatcagcttatattacctattatgtgaccttcctctgttcctgtggtaaaaacccttgggaacaatcaagtacaactatatatcaggggtgtccacactaaaaaaagaattgtctcgggtcacatataaaatacactaacattaatgacacccgatgagcttaaaaaaaattgcaaaaaaaatctaataatgtttcaaggaagttttcgaatttgtgttgggcgataacaacg

SEQ ID NO: 196322 - DNA, 326 bp, Homo sapiens
tattagttgggaatctgattttccaagtcttgtcatttaaacctgtatgacggtattgtgttcaagatatgaacagccaaggtaaaatacaatttcccatgactcaaagatcactcaaacatttgctcctgaatcttgaaaataaattgtatttcccctagaggataatcacagcaagtatcaacagcctggcactacaaaataaatcttgtagagtcattgctcatcacaggtgctggaatgtcaaatgggcaaaaacttgcttctctgatgtcttatcttgactgatttctagaacataatgttacgacaaagctctaatgacc

SEQ ID NO: 196323 - DNA, 156 bp, Homo sapiens
atactgttatagataggaggaataagtttcaatgtttcatagcagtgtagggtgactatatagttaaaaacaacgtatttatatttccgaatagctagaagacaggtcttgaaacattcccaacacatataaataaatacttaaggtgatggatac

SEQ ID NO: 196324 - DNA, 693 bp, Homo sapiens
gaatgcatactatatgactgcatgtttatgaaattctagaagaggcaaatctaatctagtgatgagaatcaaaatggcagaacattccctgggggaagaggactgactagggaaaagaaccaagactttccaaagtgataaaatctatatatacgtatctcattgccaccacagccaaaaaggaatcaatttctttgcatcagtattttcgcagtgcttccctatccctgtacaccaggtgattttggtggacttaagtaagggttgaaaaagaatctctcaactagagatttttagaatctctaagttttgtcaccaagcacgatttgtctttaattttaccaataggaactaaaatatgcctaagtgaagtagttccttacataaatttaaaatgaaacaacaaataatgccactattttatactcgaaagaatgtaaaagattgctattagtactaaaaaaagcatttctgtctctggataaacttgcaggcttgttggctggctgaagaatgcataagtactatgcttctaatttttgcctcggctgtcaagaagttcagagccaaattcagtgctcagtttagtgattaatatcccagctgcctgatatatcaatttttcttgattaggtagggtatacaaggtggggtattaaattatcctgtttcatactgtaaactacctcaaat

SEQ ID NO: 196325 - DNA, 696 bp, Homo sapiens
gaatgcatactatatgactgcatgtttatgaaattctagaagaggcaaatctaatctagtgatgagaatcaaaatggcagaacattccctgggggaagaggactgactagggaaaagaaccaagactttccaaagtgataaaatctatatatacgtatctcattgccaccacagccaaaaaggaatcaatttctttgcatcagtattttcgcagtgcttccctatccctgtacaccaggtgattttggtggacttaagtaagggttgaaaaagaatctctcaactagagatttttagaatctctaagttttgtcaccaagcacgatttgtctttaattttaccaataggaactaaaatatgcctaagtgaagtagttccttacataaatttaaaatgaaacaacaaataatgccactattttatactcgaaagaatgtaaaagattgctattagtactaaaaaaagcatttctgtctctggataaacttgcacggggtgttgcccagtctgagagcatgcaaaaggacgaggcagtgccagctggacggcctgcagatgagagctttagaggatcactccaagtgcgtactagaaatagccattatgagggccagcagcacggatatagccagttgtgtggcattaggtatgtactatgtcacgctcgcgaggtatctaatgatcctgttataaga

SEQ ID NO: 196326 - DNA, 472 bp, Homo sapiens
tcaacaacaaaaagactaaatttaaaaatgggtaaaggacttatatagacatttctccaaagatatacagataaccaaaagcacatgaaaagatgctcaacatcattagccattagggaaatgcaaatcaaaacaataatgaagtaccacttcacacccactagcatgactataaaaaaaacagaaaataagtactggttagcatgtagaaaagttataaatctcacgcactcctggtgggaatgtaaaatggttcaatgcagtagaaacaagtttcatgactactcaaaaagttaaatatagaatttaccatatgatcaagcaattccactcccaggtccataacaaaaagaatttaaaacaggtattcaaagaaacacatgttcatagcagcactgtttactattgccaaaagacagaaacaataaaatgcccatcaagaaatgaatggaggctgtcatggcagctcaca

SEQ ID NO: 196327 - DNA, 644 bp, Homo sapiens
attataaatagtatcataggctgggagtggtggcttatgcctgtaatcccagcactttgggaggccgaggcgggcagatcacttgaggtcaggagtttgacaccagcctggccaacgtggtgaaacccagtctctagtaaaaatacaaaaattagccgggcatgatggcgcacacctgattcaggagaatagcttgaacctggaaggtgggggttgcagtgagccaagatcgcaccacttcactcccttctgggtgacagagtgcaactttgtctcaaaaaagtaaatgaataaataaatagtatcatttaaaaattttgttttctaattgtttattgagagtatatagaaataaaatggctccatgctgaaacccatttctccacctctttcacccaacaaactctaaagtcattgatttattcatttacatgctcattttaaagcctctcatttattaatttacatggcataatctctcctaatatattgccctagtattttaccctaactagtcttctaactattatcttagcctctggcttaatatacctctaatccatctttgtaaaagcccaaacttatcatgtcactcccttgatttagaaacttccataatctacagataaaactctttaacgtgc

SEQ ID NO: 196328 - DNA, 244 bp, Homo sapiens
gaataatccatttcatacagaaaacattctattccatggtcacaaactctacccttacatgagttacgatcttgcagatgattaaacattgggccctgggatggctttgtatgaaagtgtggagagagtatacagaaagtcctaggtaaaacctcacctctagttggggcaaaacaacccaaagtgtgtatttagctgcagataggtcaaggaaatttatcatgggttaaattatgtgcccttt

SEQ ID NO: 196329 - DNA, 442 bp, Homo sapiens
ttgtttcatgttcctgagaaggcactttttttcttgctggtttcaatgtttcctctttgtttcaaaaatttgattatatctcagtatggttctttttgagttcagcatgcttggaatttgttgagcatctcagaagcgtagatttatatttcccataaaatgtgggcagtgttctaccattatttcttcaaataagctatctccttttctctctttctttgtgtctcttcatcttgctctctttgttttgctcctctgagactctgaaaatatgtatgttagtctgcttgatagtgcaccacagccccccttatactttgtttacttttattcattattttttcttactgctcctgggattgggcactttcaattgccctatctttaagttcacttgttcttctgcctgctccaatttgctgttgaaaccatctagtgaaat

SEQ ID NO: 196330 - DNA, 771 bp, Homo sapiens
gaggttcaactccagacctaggccagctgaaggtcaatgacaagggcaagatgctctctgcagtcaacatcacacacttgtctcaatagaaggaaggaatttatataaaataagaagtggaaagagaataacatctgtgacagtgagatgacatttccacccgattctgattccatctaatagccagtgcaggtgtgggggagggaggagggagacagggtggttggggctggaataaatgttttcagcagaaccatgcctcagatggctctcagaactcagcctagaaggcaagccagttcagaggcacagggagacttatggagacgacataaatgaacagaaaataaactgtacatttggcaagactggcactgtaagtctgtgctgtgatgaacagagatgtcaaacatgccccatgcctgccaggtgtcatgtttccaaaatccctttctctgtcagagtttgcagaggaatgagctgggctttctaattcctgttactggtaatggatcacatttgtagagtacttactatgcaccaggcaccatgctgagaggtttactatctactactccccataatcctcacattgctcttgagagagagagggatggagctcatttacctcaagcgatggagaatcccgaggagtcttcattctccccttgactgcacatctgtgcatctagttaaggaccaggacacaatgggaagagttccaaagccaactgaccaccaaataagtctgagcatgatgtgctcctgagg

SEQ ID NO: 196331 - DNA, 297 bp, Homo sapiens
tggtggccgccgcctccacagcctgggcctcgccgcgatgccggagaagaggcccttcgagcggctgcctgccgatgtctcccccatcaactgcagcctttgcctcaagcccgacttgctggacttcaccttcgagggcaagctggaggccgccgccctaggtgcaggcaggcgaataatccagcattgtgctgcaattgtgctagatatagatattcatcacagctacatatgcacccagaaggcagattgcaagaaatacatgcatacaggcatttacctcatcagaatgacaga

SEQ ID NO: 196332 - DNA, 307 bp, Homo sapiens
agaagttctagaccagccttggcaaaacactctctcaacaacaacaaaaatacaaaaaattacctgggcatagtggtgtgcgcctgtggtcccagctactccagaggttgaggtgggaggattgcttgagcccaggaggttgaggctgcaatgaaccgtgttcgcaccactgaactccagcctgggcgacttgtgtgtgtgtgtgtttgtttgtatgtatgtatgtatgtatgtatgtatgtatgtataaaaaacctcctgtaattggttttaagtaaacttcaagtttgacaaatgttattatgcc

SEQ ID NO: 196333 - DNA, 336 bp, Homo sapiens
actgagacactgggtgtatcaagcttgaaagagatcttgcaggtaattgagtttcatctgatacttgacttccttctctacttggcccttgaatagccacttgttcctccaatgtcctagagtacattccactgctatcagtgctggctgttaggacagtggttagggcagatggcctgaagccatccccactgtgatctttacccatttgtcctgattttgccttctcatgccacctggcacaagtaggatccttctttctcaggaaaacccttcacagtcccctgactgttttctttccaggctgggcactccctgttccttcaattactgctt

SEQ ID NO: 196334 - DNA, 208 bp, Homo sapiens
gcccaagcagatcatggagacacgcggcagagctgagcaaatttgaggggaagtgggggaagcctgggtgagtgttttcctgagaaagaaggatccttctcatgccacctggcacaagtaggatccttctttctcaggaaaacccttcacagtcccctgactgttttctttccaggctgggcactccctgttccttcaattactgctt

SEQ ID NO: 196335 - DNA, 689 bp, Homo sapiens
cataggagagtgtgaagatacaagatagcaacttgatatataactcacatcaagaaaactttcaccagcgtttaagggaaaggagttgtagatgtgggtcatttaatacccacttccaaattcactgaagtggacagcgccctacacacaaggctagagtgcagtggtgcgatctcggctcactacaactcctacctcctgagttcaagcgattctcctgcctcagcctcccgagtagccaggactacagtgtcgaggtcatgaaagccactgaaagactgagaactgttccagaaaggagactagagagacatggcagccaaatgctccacataatcctgtcctggattcttctcctacaaaggaaggggtctgaggattaggtggtagtactgaatcaaggaactatcatctcctattgtgctgtaggcaaacttgagtgacatggtggaagccaccagagagaatatctgaagcaattcattaaaatcttggcagccagaccccagctcccactttccctgaaagctccctttaatgaagctgaacgctgtcccagcaattccctccacagaagacctactgtcaccacctctggaggggcaattcctggaggaaccaagtcagccaatcgaaggtcctgaataagcaaaaactaagtaaataaataccatctcgaaagtgatggg

SEQ ID NO: 196336 - DNA, 117 bp, Homo sapiens
gggcagatagctctgtgggagatatgggtttagtgtgagattgctctagaaaagaaataaacaccttaactagggccatggtagccggaatggagaagtaggatggatgtaatattt

SEQ ID NO: 196337 - DNA, 428 bp, Homo sapiens
cagttaggaggctggtgtaatattctaggagagacatgatggtggtttggagctagtagtaggagtgcaggtggtgagaagtgctccgattctgggaatattttgaaacttgaaccaagaggatttcctgctgtattgaatgtggtgtttgagggcaaataaataaatttttaaaaatgagtcaagggtgactccagagtttttagtttcagccatgggaaggatggcattgccaatagtaaaatgagcaaagaacaggtttgtggacaaagaaaaggaattcgattgtggaatggtaagtctgagaggagatggggtattcaaatgtaggtgttgagcagcagttgaatcggtgacgccgggttcaggggagaggttcttcatggaaatataaatatggaagtcatctatgtatctaaaagcaatga

SEQ ID NO: 196338 - DNA, 604 bp, Homo sapiens
gtccagggcaccaggcacaagcatccctgtcctctccctgtggagccacaatggctgtgcttagttcctccagcaaagtgacgtgacggcacagtgagacgtcgcccaccagggaagcccacggagactcagcgcccagcgactagggggctggtcacgggggcacctctgcttggcgcgcacagacattccaggaccccagaaggaaacgggctcaggataccacgtggtttccacaggagtttagacacaggagctcctcgctattgagggaggttgtgtgtctccacagggaactgctgcagccagattccaagacaccagccaagggcaccctcaccagcaggcctttcccaggaccaccgtctcaggcccgccaggtcactctttctgggcactttctcaggaggttgctccagggcaggatggaagcacagagagtccggggttgtcacattatgctggctgagtgtttagacctctagagaggagagcacaaaagcggaacaggaagcccagaactcctcccggcagaaacaccaactcacaacagcaaggcccagaagcctttctgaggcagctacaaagttctgcgaattgatac

SEQ ID NO: 196339 - DNA, 411 bp, Homo sapiens
aaaaccatatgtaaggttaactcgggaatggaaaagccaagtactaaagatcacaaagctgttttgccttttgtggttctgggaatgccttggaagaggttggcttctgaaatgaagaaagatcagaaaatgaaggtgtagtgatacctgttaatgagtaatttaacttttctgtctgtgctaccttgaggaatgtagtcatattttgagaaacctgaggcaacattagtttcttgggattctttgatttagctaatttcagttatgatacactgcctttttacctactatatttcatttatctctgaaaaatagaaatttttttcttgactttattatggggcacatgatacttctagtagtattttcatttaaaatatgtctaatttctttgattatttgtcttttaag

SEQ ID NO: 196340 - DNA, 790 bp, Homo sapiens
gcctaccagtggtcttttcaaatgtaaatctgatccacctccacttaaaaattcatcattgctgctcattgcttttaggataaagactcagttgaacccagtcatctccagtgtagtcccagtcactcatattgatctttcatttctcccatgggccatccacctccctgacacaaggcttttgcacatgttccttttatttatacctgctatttccagacattgttttggtgctggggatatgacagtgaacaaagcaggcaaacattcctgccattctagagctcactttctcgtggttgctttttggttggaatgttcttgacctttttattttgttttgttttgtttttgtgtttttgtgtttgttttttcatagggagtttaggatttatttatttattttagaataacagctttattgagatataatgcacacacattaaaactcataaaattcacccatttaaaatgtgcagttcaatttaggatattcagagttgtaggccaggtgtggtggctcacacctgtaatcctggcactttgggaggccgaggtgggtggatcacttgaggtcaggagttcgaaaccagcctagccaacatggtgaaaccccgtctctactaaaaatacaaaaaaattagccaggtatggtggcgggtgcctgtaatcccagctacttgggaggttaaggcaggagaattgcttgaacccgggaggcgaaggttgcagtgagccgagatcgcgccactgtactctagcctggatgacagagtgagacttggtctca

SEQ ID NO: 196341 - DNA, 290 bp, Homo sapiens
cattaattaaatacagaagactctaaatgaaagcattttttgatggtagaaggaggttatcagatgctaaaggtagaggcaatcaggagattaaaaacgagaacaagagcgagacggagagaaagcgaagaaaaatgaagtagggaagtgctatagtttggatgtttgtccttccaaacctcatgttgaaatctgatccctaatgttgtaggtggagcctaatggggggtctttgggtcatggggatagatttgtcacgaatagattaatgcccttcctggggggagctg

SEQ ID NO: 196342 - DNA, 331 bp, Homo sapiens
ctgttaatgaatgctgatgcagtctaagacctctctagtgttaatcgttgtaagtatcaaatagtctaaagggcatttcaaattatagtatctttaaagcagaactcttgatttctgtctcccctagaggctagtccttttccaatgggtaagtagcactaacaaaccagatgtttgcacaagccccaagccccgaagcatcctagatccctctctttaacagtacctgtccccagtccaggctggcgggaggtcttgtcagctccaccctctgctgtgtcacatgtcataagcccacagctctgtccccctgctagcatcctgtgtcaag

SEQ ID NO: 196343 - DNA, 142 bp, Homo sapiens
ttataggtaaggaaagttattttcagatgggctaagtaacttgcccaaggccacatagtgatggagcgcatccgtctgacagcacagcccatgctcctgtctgcaagtcaccatcagtggctctttgaaagcaaagtgagga

SEQ ID NO: 196344 - DNA, 524 bp, Homo sapiens
caatggtaggcctgtgaccaacaaatgaccccatgtgggctatgagcctacatggagaacaaacacccactagtcctgagaaacttcagataagaaagggagtatgctgtggaacttctcaaacctcgagaatctggccagttctctaggtttcagaacatcctgagacacacaaagtaaaaccttaagcattattgattaaactttcagagctgcacatttgcacgttagctgttaattttagctagggtgagcaacacccttgttgactattgctcctagggacaccatgttccattaaccatccccagaactccctgaaggtaaagcccccgtggctgtccttcagaccttgtggttcgctctggtaatataagctgggaccctccaattgctctctgaagtctcacccatggagtggacacactgccggggacctgttccaactaggactccagatgtctgtatccaggacttcccagcactgcttgatctgggtgtaggtattctccccagtttgttga

SEQ ID NO: 196345 - DNA, 391 bp, Homo sapiens
gactccaaatatagggccccgcagaagagctctgcctgggaggcagagatttcaaatgttgaattttccttgtttcagaatacctcctttaatgcagtgaagttttggtaatgtttcatagaaaaaataaaaggtgtagcacagacagatatgtcaagattacttacatggtggctataataaaaagtaataactaagatatataatgagtatttcctataaatcagaaaatatgcaaaagatcagaaaatatgcaaaaggtctgaaaatatgcaaagattccccaaccatgaccctctaagaaagtttcttctctgctctgcgtttctttccatgtgtaagacaggggtgttagggctgggagcaatggttcacacctgtcatcccagca

SEQ ID NO: 196346 - DNA, 460 bp, Homo sapiens
aagccgtcccttttcaaaatgtcatcttgccatgaaagcttcttcaattcgttacctagaagtgcaaatgtattgaaagttttactcattaaataagattattttgaagctaaaggccaaagatcctacttactttggagaacagtgttgaatccagcccaatctctcctttcagcccaggcatgttttagtactgggatgttttctatctttttaagtgtcctgtgctctgtttacactatattaatctgctcatttaaattggtgttttgttttaatgtttggccagagtttatgcactgccactttggagagaatctaagattcattcattcattcattcattcactcactcaacaaagcatttgttgacagcctgttggcatgggagacccttgcaattggcaccaagaatacaagaatgagaaagggactcaacttgcacccaaatgctcacagt

SEQ ID NO: 196347 - DNA, 497 bp, Homo sapiens
tgttgttgcttttatgcttagtgcaaaaaaagtctcagagattctgtactgcgttattttatttatataacattctcaaaatgacaaaacggtagggatggagaacagattagtggttgacagggtccaaggggatagagagtgcaaagataaaggggtagcattagggaagttcctttggtggtggttacacaaatctatacatctgtattgcgtagagctacacacacacacaaagcatgcatgtaaaaagtgaaaactgaacaaggttgacagtctggttaatagtattgtaccaatgacaatttcctctgtatactattttgcaatttcatatggatctataattatgtcaaaataaaaggagtttgaaaattgttaatttattggccgggtgtggtggctcacgcctgtagtcccagcactttgggaggccaagatgggtggatcacttgaggtggcacgcctgggcaacatggcgaaacaccatctctact

SEQ ID NO: 196348 - DNA, 861 bp, Homo sapiens
  misc_feature (789)..(789): n is a, c, g, or t
  misc_feature (792)..(793): n is a, c, g, or t
  misc_feature (797)..(797): n is a, c, g, or t
  misc_feature (801)..(801): n is a, c, g, or t
  misc_feature (806)..(806): n is a, c, g, or t
gggggggggggggggccggaggccctggtggccctgggatggggaaccgcggtggcttccgcggaggtttcggcagtggcatccggggccggggtcgcggccgtggacggggccggggccgaggccgcggagctcgcggaggcaaggccgaggataaggagtggatgcccgtcaccaagttgggccgcttggtcaaggacatgaagatcaagtccctggaggagatctatctcttctccctgcccattaaggaatcagagatcattgatttcttcctgggggcctctctcaaggatgaggttttgaagattatgccagtgcagaagcagacccgtgccggccagcgcaccaggttcaaggcatttgttgctatcggggactacaatggccacgtcggtctgggtgttaagtgctccaaggaggtggccaccgccatccgtggggccatcatcctggccaagctctccatcgtccccgtgcgcagaggctactgggggaacaagatcggcaagccccacactgtcccttgcaaggtgacaggccgctgcggctctgtgctggtacgcctcatccctgcacacaggggcactggcatcgtctccgcacctgtgcctaagaagctgctcatgatggctggtatcgatgactgctacacctcagtccggggctgcactgccaccctgggcaacttcgccaaggccacctttgatgccatttctaagactacagctacctgacccccaactctggaaggagactgattcaccaaggttccctatcaggagtcantgnncacntgtnaaganccaacagagtctcgtgcgcggactcagtccattgtggtacaatagggtctaacac

SEQ ID NO: 196349 - DNA, 708 bp, Homo sapiens
ggccccaaagcactgcgaggcgctgtgtagagggactcagactccgtgtcgcaggaatgaatgagtgagtgagggtgcaagcactggcctgagcctggcttccacctgggggtatggcgggggccacaccacaggatccagggaaggtatggggtacagtgtagggcccggttctgagcaggtgctcacggccagccccaggtacaggagcagtacctgggatcccagattcttaggtcaggtgcctggcaagggactgtgtggctgggaggatgtgggttcaaggctgtggcaccccacgagctggaagcactccggccactctagtgccgtgacagatttgagctccactcttggagcttgtcacagttcacattggggacgcctgtcgcttagtcccatgaagagcagtttgggtgccccatgcagtgggctctgcagggtgagggggagggcataccctccctgaaaggccttgggcacgaggcaggcaggcagctgggctgcagagcagagcccgggaggggtgggcagaggaagggcaggctgggcgccctgcaccacaggccaggctgggccgctggggccttgggcagcctctttgtgtttccctgtgggcctggtaggagagctggggccatgttgctgcccagagcacctgctggctggcacaccccctgccctgtgggtataattagcactgtgaca

SEQ ID NO: 196350 - DNA, 499 bp, Homo sapiens
taatgctctgctgttactgctttgaaattcttaatgtattgaacaagaggtttgccaagcatgtagctggccaacccagagggcaagggtttctggtttctgtggtgctcagctctgaaaggatgggtggaaggggaaacgttgggagaatttgcagtctgttcctcaccatgtgatcatgatccttgggagatatgtgacagtcttccctgggatttgtggttcttccagcagacttgggtaatttctttgccaacatctgtcagcatcaatgaagttagcttggtctgggaaatgttttgtttttgttttcaactgtgataaaatacacataacaaaatttaccatcttaatcaattttaagtatacagttcagtaatgttaaataccttcacattgttgtgcagacattaccaccatccatctccagaactttttcatcttcttttagtaaaactttgtacccattaaacaataacttctcattttctccttccct

SEQ ID NO: 196351 - DNA, 450 bp, Homo sapiens
taggcatgtttactggaaaagtaaataataatttcaaatttaaactacaaaaatatgatcatattttctctcatatttaatttgaagaacaaaacaactttctgaaaaagtgagaggtatatccaaagagtctcagttctaaatccttttcgagatttatgctttagctttgctagcctgcaagtgtctttaagatttagtcattgcttcaatcattctaccatgtgcagagtacttggaagagagggatgcataaaacaaggtcagccatattgaagaaggttagagacttttggcggaacccaaagtaagaaaaaacaataatggcacataaggcaaatggaagagagggcagaggccagaatctaagcatttttaaagaagaattcagtacttctttaagtgaaaaactgtaaccatatcttttgtttgtcaaatatttaagagtta

SEQ ID NO: 196352 - DNA, 746 bp, Homo sapiens
tttgtttgttttggctacctatcttaatcatattttgccttggtagaatttcttacaaaaatatatcgtggctgtcatgagaatgtgcctggaagacctttaaccatgagagcataactgaccatcggcctcagctgctgggctctgaaatccatcactgtgtttgtggtgaggccacgtaccaacaactggtcatggcaaagatactaaggctcattcctgtcctatgtcagttgacactggctccaggacccccaatgccctagctgaacactccttaactgcatggcagcctagaatatgtccaactaccttttctccctctttccttcactcagatcagccttgcatcatgatctgatgacttgcccagccttgtccatctctctccccattttctgccacaggcatctcccctaataatagccttgcacatttaatcccatcttagcatctggttcttggagcatacacttctctctgcaaccaaactctgttcccttctttgttccacatcctcttttcatggcagataaaatcagctctgggctcagtgcatacggagcaaagtctgacagcaagaatggtcatgggccactgaggataacaggtttgcttgctggagcgtgtaatggagtctccacgatgcctcattggcaaagatcacctctgtatttcagcaggattggagtctgaacattcctgccttgattgcacaatgtcatggtttcattcatagggactta

SEQ ID NO: 196353 - DNA, 758 bp, Homo sapiens
acagcacaaaaacctcctgactacacatctatttgtaagaaactttgcttaatcccagatgagatcaatccacaaatacttataatctagaaaagggaaaatgaactaatatccattcatcaaaatggcttgtatataactcaattactaccttatacctcaaggtagaaggaacctgattcacaagatttctcatgtaaccttacgatatacaattgggtaggatatgggccatctctttgaaaacgatgaaaagtgagtgggtgctaccctatgtatcaagaacatattatgacttttccccttctttaacaaaaatgtctgtaaaccataccaaatgtccatagtttaggtattaagttttggtttaaatgagatagtgaacaggggtgactttattacaatatgaacaatctggctagaaaaatctgtcattttttagacttatctctgttaagatcacgcagtcaaaccaacagtagtaattagatcctttctcactgacttagctaaagctaatgagaaatacacaccccatttttgcacaagccttggaggagacagatcggctagaagacagtctgagatatggagaggagaggggagaaaaagtatttaaacaagcctgcacctaagatccacactcagactgcagacatcctggtcaggtgacagctcaggccacccaaaacatggcggaaaggaataggaaccttccttggggaagggaataggatgggggaaagggataggaatgg

SEQ ID NO: 196354 - DNA, 475 bp, Homo sapiens
gaaaaggaagcataccccaagtcaaaagggaagcatctgatatcttcagccattttcgtagtcaaatattgtctttttctttaaattttttttctattttcactggttatagtattaaatctgcctttaactttttctgtttttgcttttacatggaagttttacacttttagtaatatttttattttcaataaactatatttgagggattctctacttttaaatttttaattattttgttttttaaaaaattaaggaatacttctcataaataattttaaagtacataaatctcaataaatttttgcatacgtatacacccctgtagccaccacctagatcaagatacagacaatttttagcaccctgcgaggctccctccctgtcagtaccctcaccatcacctagaccctcatccctgtgtaaccattttcctgacatctgtttccatttgtgacttttacctgtttgatga

SEQ ID NO: 196355 - DNA, 514 bp, Homo sapiens
ctgaggaccgattatgccacacacatcttatacagagctgagtgcagagacagatgattattttagggtaatggagttgcctcaggctcttggttcacttactggttaaaccattgtctgcagctatcagttgagggattgcagttgataaaatggctggagaggttaaggtaaggaaaatactgtttactcttcacttttcagtctagtaagtaaaaacaataacctggttgtaattatagtgttggggataacatctgtcaacttaagcataaatcaggcaacgacacaaaattgtaccagtagtcactgcattgcttcttgccatgcatttgcactaaaagaactagtccttagccaggcttggtggcttagacctctaatcccagcaacttgagaggccgagatgggaggatgtgcttgagcccaggtaccatatctgaataaccagagattgttgtatcagttgttttttgtttgtttgtttgttttttgagactgagatctatggaag

SEQ ID NO: 196356 - DNA, 312 bp, Homo sapiens
gtaggtttattaattggcctaatttcaatgttatgtctcagataatagggtggcccaaaaagaggaagagagatgggggaatagtctcttggtagagctatagaacacataccacatttattaagttcactatcttatatggacatggtttatgataccccagaacagttacagtagtaacatcaaagatcactgattccagatcatcataacaaatataataataatgaaaaagttggagatattgtgagatttaccaaaatgtgacacagaaacacaaagcaagcacatgctgttggaaaaatggtgcca

SEQ ID NO: 196357 - DNA, 518 bp, Homo sapiens
ccttttcctcccaaagttctccctcttggagctcacttctttctgttctaattcttactaatgcttttaaaaatgacatcttttctgtgattcgctccaattgatatacttcttatagaaacacattatggctttcttcttaactttatgtcatttagacagctatggtggcattaacaagccacatttgtagctagtttcttgttttggaacatacattgtgtagtcattgaaattatccacaaaggaaatggtgctcttaggaaagtactcccattatccaaaatagaaccatattaaggaataatttggccttttacttttggcttgacacattgcaaatgttcacggaatagtagtatttttagaacttgaagtgaccgttagagtccatctaggccaactctcttcaaagattggtagattaagggacaaagaagctaagtgatttgcctaagggtcatacacctgtttgaagacagaactgagactaatctccagatactctcactcctagt

SEQ ID NO: 196358 - DNA, 573 bp, Homo sapiens
tcagcatttctgagggtttgtgggtttgagtcaacattatgctatcaccttttagtgcacttaataattaagcttacagtaggtagcagacaatggcatcgagctgggtgtggcttcagagccagccgagtcctttcttgaagctctacaaaagcctctatgatatttctccccaccttggaaatttttaaatagtttaaacatttaagcagattttaatgttttttatttaaaaaatggaaggaataaaaaggccacagtagaatcttcaggaaagacagtggttgcagttctgtacatgtgaaagtcaaaaagtggctaagaaaaagatgctccgcctgccactactaaaaagaaaaaacgtttgccataagccaccatgactcagagttcacagatgggaagaaacagataaattagagcaaagttcctgaaaatgttctgtgactgatactgcttcctgtaagtgactggaaagagctagtgctgatttgagtagacattggttcttctagaagagccagaaggtttcacatggatttttttaatgttggaaaaaccaggcaggagaac

SEQ ID NO: 196359 - DNA, 248 bp, Homo sapiens
catcttcatattctcctgaacactgcatatgtgaatgaacaaagcacattttgatgatatcgtatttcctttataaaaaggatcacctttctgattcattatttttgtatttcctccatatcactttcagacaacatcacctctccccattgcttctgtcttgggctccatatttaactagctgctactttctggtgaattttttccaagttcttctctctccaataataaacatgtcttgtaccccc

SEQ ID NO: 196360 - DNA, 539 bp, Homo sapiens
tgtcttcttggtgatggtcctaggcctggaagttcaggtgtctgggggttctgttcccagttctgaattgatctttttctcattattcaatgttcctgtttatccctggcaggtgagaattgccagtaagaagttatagcactgtctgattctcattccactgtaggtagcgaccctttattttcctccctagaagtttgtaggaatgtcatattttctactttttcttagtgttctgaaatctgatggtggatgtgagtgtgcgcttcctttgcacattgagctcattgctctggagacccctccagactgaagcagcttccacttcaagaaggtattttattacctccttgacaattccatcgcttcctctttcagttcagcctttctggatttcctctattagaccatttacgttctccccatttgtcacttattctttctcaagatttttttctttgccttcttgctctgtattctgggaaatgtccttaacttccaacctgtctatgtaagttattattttgtcaatcacactg

SEQ ID NO: 196361 - DNA, 519 bp, Homo sapiens
atcagcatgtgtgttcacttattcacaacgtggcactacttgttttggttcataagtattcccataaaatagatatctagaaatgcaatcagcttttaattttgggagatattgttaaattaccctccccaaatgtaccatttatcttcaataatggataagactgcttgttacccatatgtaaaacaatactatttgtggaaaaaaaggatacattatattctacttaatttgcatttttctgaatataataagagctgagtggtattgactattagtattttttcttctgctcctttgtattttttgcctactttcgacttgctttaaaaaatatttttctattgatttataggaactctatattatggatattaagtctttgtatcaaatattttattctagcctgtcacatatattttaatttatattctattgcaatttaaaattttttatgcgatgagacttgttagtattttcctttatggcttcttttataaaaacaatctttctttggat

SEQ ID NO: 196362 - DNA, 415 bp, Homo sapiens
gaaactggcagggtctagtgtaacaaatgacatgaggaagtggggggctctggtgacagatttgcaatttgtgacagtgaaagaatcttagagctacttatagaaaaatgggatatttaagggaggatttaaaatcaagagaaggcagcaagtaactaacagttcatcactgtctacctttctgattcctacaaggattgattgagccagagtattgtgggtagagatgattgacaaatagtcgtcatcaccactctgaggacactgaagcaagaatgtagcaacaagcagaggggccataaatatacgcttaagaaaaaggttgtattctgcttatacgtccagttcccagcacacagcagatattcaatatataaacgaatgaatgactgtcttctgtcagcaagaaatcaag

SEQ ID NO: 196363 - DNA, 131 bp, Homo sapiens
gatgcaataatttatctgataatttataatgtatactgtatcatagtattgttcaataaaatattcaccaagaactgaaatttctataatccatgcttcccaatatagcagccatgagccacatggaacta

SEQ ID NO: 196364 - DNA, 411 bp, Homo sapiens
cgagggatctaggctgtgtgctccttatgagaatctaatgcctgatgatctgtcactgtctcctatcacccccagatgggaccatctagttgcaggaaaataagttcagggttcccactgattctacatcatggtgagttgtataattatttcattatacattacaatgcaataacagaaataaagtggagaataaatgtaatgagcttgaatcatcccaaaaccatcctctactccagtccgcagaaaaactgttgtctataaaaccagtcccaggtgctaaaaaggttggggactgctgatttagaggactactagcagaaaagacattagcaccagcagcctcaacagttgttaccactgtccagtactggcacagaatccagcagtagcaacaggaacaaattggtc

SEQ ID NO: 196365 - DNA, 677 bp, Homo sapiens
gcatgttagcacaaaactaaatgctgaattatttgcatgggagtgggttactgtgagattaaagaaaaaaatctcgtatttatgcttcaagcagcatagctctttgcttatctaacaaattcatatttgattataagccattagtgacagttaatgaaagggactctgtttgaattaagcggttatgagtatccatctcagaagcttacttctcttgatacttgaattaagagcctattctcattaatgccgacttattcagataaagttcacagtgtttttgtctttttcatcatatttatatcttaagtgaaaggtttcaaccgtaacgacacattggaagcaactgggtccccccgcaccaattcaactggaaaatctgggggtggcacgtagaccttggtattttttataaagatccccaagtgattttaatgtgaggcagaatttaaaaccattggcttagagcagtagtgattaaatatatacctacattgtttagtttctgaccttgatagatatattttgtcatatttaaataaacaaaataatggccaggcacagtggctcacgcctgtaatcccagcgcattgagaagctgaggtgggtggatcacttaaggtcaggagtttgagacctgggcaacatagtgaaatccccatctctactagaaatac

SEQ ID NO: 196366 - DNA, 325 bp, Homo sapiens
cagaggaaaacctgcatctgagtccccttgtcatccctcctgtggattcctggggaagcatggaaaacaagtatttaaaatgacaggacaatccatctgccacccgtgggaatggtagaaaataagggatattcatggaaggctgcttttgtacagtctcacaaacagcagcccttagacctaagaggacattgcctatcagtcttctcagtgtagaggaagaactgtcagggccagggagtttgggatgagagaccacaaaaggcagagaaagaattgtcctctccccaaagtgcagatagctctagaaaggaagtaggagttg

SEQ ID NO: 196367 - DNA, 526 bp, Homo sapiens
ggcaattccaaaggtataatttaatgactcttaatatattcattcagtgaattttgaccaaggcatagatttgaactgctgtactggagagatacttagctaggtcataagcctcgcagattgcctggtattcacatctcaacccctctgtgttgtacttttcttgctatacgtgtagtaattcttgtgaagtaatttttaaaatcttgtttatgaaaaaggctatcaagtaggagaaaactttagtaaaactgaaaggcaattccattgtgatgtgaggataagggcatgaaatgtgactctcaagaaaataagatttaggagacagaagcctgtataaacagttccatatttatattttggggattcacaaaggttgaaggacataacccttggtttgttttttgctttttgttcttgttttttgccacacacaggatatatacatttaagataatgaacgctgattgccatttagtatatggcttttacttgcagtgtccaaattcattatatcttgtctaaa

SEQ ID NO: 196368 - DNA, 143 bp, Homo sapiens
gccctgccaagcttcctcccctcccttcctagtccaagcactccaccgtctgtgcagactgcataacagcaatttctggaaacaggctgaagaatctgggccagtccagaggcagtggattcctggtttatgtgtggtggggt

SEQ ID NO: 196369 - DNA, 134 bp, Homo sapiens
ccagaaggttaaagagtttaattgatatgtatatcatttttttaaagctgcatttagacaatttccctgtacatgacaactcaatgcttgtatatttctgaaaccacaaaaaaataaaaagacaagtggacata

SEQ ID NO: 196370 - DNA, 429 bp, Homo sapiens
ccataaaatactgcctgagttaatgaaaaagagaaagatttaattatattatttaaaatttaaaagataagcaatatgagcattaaatactaatataagtctataacttgggaggcaagaggagggaaagtgtgaagtaatgttagtgagctaaactattttttgttcacagcagggagttattagccactgtgtaaagctgttatacgaaaaagtacatgcttattatttaaaattataatgatgaatcctggaagaactgaaaacagaaatggttaaaagttcttatctctggctagcattcaggagcagagggtaaaagtaaatctcagtttagtttaggcttggcaagtggcattatatactctattataaaaaatactgcgtatatattttctctttgaaaaaataaaaaaaatatacattcta

SEQ ID NO: 196371 - DNA, 374 bp, Homo sapiens
ggatattatcttgaaggcactatgaagttatggagggtctctgttagtttgtcaccatcacacctgtaccctgaaattgaggaaaaggttaatgtgtgcaaagtaatattctggataggttgtcaggcagcactctgcaaaggcaagcggagggagaagaaacctggaatgatagaaagatccagtagcaatgcactatttcaggcatgttatagaaaaggcctaaactaagatgatgtgggtacaagaaaaggaggagtcatgacaccattatgaaggaagaactttgaatgacagtgctggtcaaaaaaggaagatgactgaaagttaagtgactctcattctgcatgaggacccctgtgacggaaatttgg

SEQ ID NO: 196372 - DNA, 459 bp, Homo sapiens
ctttcaaaaaactttttaaatatgtcattaaaatggtaaatttgcaagtttaagtgaaatctagtttagaattgatgaattgttagtgatgatattcacatcatgaaagtactcaatagcaactagccaaagacattactttgaggcatgaaaatatcctgtgtctgtttctgcaatatatgtttatttcaggataaaaaaagaaattgtttctataatggattttcacatggaacaagtaaaatgttcttgactgaatatgttggctgtcttttcttccaacaaaccattagtttaccagtgttgacattagaaacagctccttactaaaaaataaaaatgtaccaccaatggatctcagctcttaagtggatttctagtgactatgatacttgcatgaagttcagggattggaatctatcactaatactatcctagaataaaaattgaaatacagat

SEQ ID NO: 196373 - DNA, 488 bp, Homo sapiens
aacctatgccagccttcaaaatgttcacttgggatctctgcacctgcttcagcatgttgcactgtctcaatattaatagtcataattttgggagtcctcttttggaattgcctcagagtctgctgtggatccccatgaaatgaaatcactttgctttaatcacacttcaggtttcaggtaatacatagattggtgaatgaaataaaataagcagttttttagcattgtatttcttttgatttcatccttcctgtgaaacatactgttagtgtttaaaataatcatgatcagtctaaattaaacattgtatgtttcacttgtaatgataaagttagtgtttattatgtatgttttatatagtatatacatgtgtatgtgtatatatataaaataaacacaaataccaacagttgaaagaaaagagaaaacgagagcaaatatcttgtgacatcttagtatgccatgccatagtacatgtataaaaaggg

SEQ ID NO: 196374 - DNA, 290 bp, Homo sapiens
cccaacacctctctattctgtacacacctaacagagttctaaactactaggtgtgtacatggaaaggaggtgataaatcattgtgtatcacagtttttagctctatgttttcatcctcagcaatgaaggacaatgtggaagaagccatcacgaaactcagcctggtttgggactgcttttgcttccgaagggctatttgtctgttcttcaccatcccaggtagcaaatggggagcaaattgggaaatctgcgcaaaattaatagccctatcaggaatcaagcgggtatgc

SEQ ID NO: 196375 - DNA, 178 bp, Homo sapiens
tctttctcacacaaggatgatcctgtatgacagatttttatgcaaattttactgtccaggaggtataagacataagctggaaggtttccttttttcactttctttttttttttttttttttttttgagacgtagtctcactctgttgcccaggctggagtgcagcggcgcaatctcgg

SEQ ID NO: 196376 - DNA, 347 bp, Homo sapiens
atgagcaacagaattctagataagagaacttcctgagcctgagtctgaaagcaagaaatcataggtctctttgagggtttaatttgattagtgagtaggatctatgaaggacagtagtagaaaaagaatgaaaagttaggttagggctagatcatgaggatattgatcaccacacagagaagttggaactttgataaatggtgagcaagccattgagatggaatttgactgtggtcgtcatttagaaaaattactgtggtgaagtagactggaaggaagacttgacgttgagagacctgttatgaagttacaccagaagtcaggtagagacataatgaaggcctggt

SEQ ID NO: 196377 - DNA, 526 bp, Homo sapiens
gagtaatgctggccttagaatgagttaggaagtgtgccctcctatttttggaaaagtaggatttgaaggatcagtattgttctttaagtgtttggtagacttcaaagtgaagccatcatgtctaagattctttattgttgggagatttggattactaattcaatctcattactagttacaggtctactcaggttttctatttcttcatgctttagttttgctagattttgtgtttccaggaatttgtccattttgtctaggttatccaattcattgctgtataactgtccacagtatgctcttatagtcatttttatttatgtagaattggtagtaatgtccctgctttatttctgactttagtaatttgagtcttttctctttaattcttagtccatctagctaaaggtttgacagttttattgatcttttcaaagaaccaacttctgttttcattgattttctctattgtttttctattatatatcttatctctgctcttatctttaatatttccttccttcta

SEQ ID NO: 196378 - DNA, 386 bp, Homo sapiens
cagcctgaaaaataacatatattggttgtataatccacttaggaggtaggtcttatcttgtatgttttacaggggaggaaagcaaggtatctcccttctacccaatgttgaggttttcaactttgactaatcctctttttagataaaaggtagtctgccccaggaatggagagaattagggggctccattatggtgacatgtgtggtaccatggtcatcttcttttatggagatggggctgtcatggggccagtcctggcaccacatcgcaaagtccaggacaaagctaacatgtttgtgctggcttgacgtgctgttgactacccagcacgcggtcctactctgaggttccactgaggtcggcttccctacaaactccctgtttg

SEQ ID NO: 196379 - DNA, 143 bp, Homo sapiens
atgattggtaaattcaggaagacagcagcataacttctgagctgcattggtccgaaggtgatatttctcaggcatgggatcgggaagggttgaacattaactttcagcaagaaaggaaaagccctcagctcagctaatgcaca

SEQ ID NO: 196380 - DNA, 570 bp, Homo sapiens
taggtctgagtttaaatatttcctctcaggggtctggtcttcccatactctctacataatcttagttttctctgtcatgtgctgttgtattattattattatttttctttttgagacagagtcttgctctttcgccctggctggagtgctacagtggcacgatctcggctcactgcaacctctgcctcctggtgtgattctcgtgcctcagcctcccaagtagctggaaattacaggcacgtgccaccacgcccggctaattttttgtatttttagtagacacagggtttcaccatgttggccaggctggtcttgaactcctgacctcaagtgatccacccgcctcagcctcccaaagtgctgagattacaggcatgcaccaccgtgcccgaccacgtgctcttatattaacaaccagtatttactaagcacatactatgtgccaggagatagtctacatattccatgtctattagtattcttaatacttgcaggaccccaattaagcaggtgttggtgttttcctcaagttcacacagctgatcaaatcagtgagggctgtgaccctag

SEQ ID NO: 196381 - DNA, 159 bp, Homo sapiens
  misc_feature (15)..(15): n is a, c, g, or t
  misc_feature (29)..(29): n is a, c, g, or t
tgatctgaaccaatncagctcggtacccnaggtatcttctgagcagcctgcacagaatcctcattctcctcatccacgtgtccttctgtgacattcaggcattgactgtacccttttgcttacccatgcctatgtgcctgcccttccggcaggccaagg

SEQ ID NO: 196382 - DNA, 281 bp, Homo sapiens
agataagatcacagaatctgtctggatttaactttctcaaacagactagggaagaatggctttcattctttctaatcaaaacacctgaatgaagtttaaagtgttttaagtgttgagtcagttacattgaaaacaaatggtttctcagaacaagagctattattcctcgtactatatcctttgaaactgttttgacaaaactagtaaaccatgaagttgtaccagggccttgtttgggaatcttaaactaaaaacagtgaataaatctacaagatattcgc

SEQ ID NO: 196383 - DNA, 478 bp, Homo sapiens
agagttggatctcttgatctcttcctctgctgtctaacctaatatgtcctactgtaattttaggctagtttctctagtctagacctcaatcaaaatgtactagagctattcagcacctccagagtttcttccccatctcttcttcctttgtagatgtgtgagtaacttcctttcctatacagaggtttctttagcatttggagatttctttctcaaatattttaaaaatttcattctttctctggaaaagatggctttagctataggttcagaaaaatggacacgtaatatttgtcacctctgttaatgctgaaaatgaaaataaatatcacaatgtttataaagtgttattgcttttttttttttttttttttagacggaggctcgctctattaccgagatcacaccattgcactccagcctgggcaagaagaatgaaactccatctcaaaaaaataaagaaagaaaaaaatgcaaa

SEQ ID NO: 196384 - DNA, 433 bp, Homo sapiens
tgtaatcccagctactagggaggctgaggcaggagaatcgcatgaacctggaaggcagaggttgcagtgagccaagatcgcaccattgcactccagcctgggcaacaagaacgaaactctgtctcaaaaaaaaagaaagaaagaaatatttccctgttcttattgctcaaaggaaaggttatggatcagtttatttaaagacaagttttggctgacagcccaactttttttttttgctcatcagcatggtataaagcatgtcatttaatacaactatttaatgtatatttgcgaccactttcttctggattatatattagaaggttatattgttcaaggcaagagttcagtgagtcctgtttttgagttccttttggggtatgtttgagtttgcgtttttttgttttttttttttttttttttgagagttttg

SEQ ID NO: 196385 - DNA, 356 bp, Homo sapiens
aaatcaatcacagaagcaatgtctacactctaaaaataatttgaaactgcaaaggatttagagttgccaagacagcgttgagaaagaaaaacaaagaagactaacactgcctgattttaagtgttattctaaagccacagtaatcaaaacaaagtggaattggtgtaaaaatagacacatacatcaacaaaacagaatatagagttgagaaatagacccacacatatatggataactaattttcaataaaggtacaaacataatttagtaaagaaaaggaagtctcttctacacttaatgttgaaagagctggatatccatgtgtaaaaaacaaaagtaaaatattttaaaaagta

SEQ ID NO: 196386 - DNA, 238 bp, Homo sapiens
cagctgccatgccgtgaggcagcctgtggagaggcccacgtagtgaggaactgaggactgctggcagccgtggcagtgagtgcagaagcaaatccttccccagttgaggctgcagatgactacagccctggcaaacaccttgactgaagtcttgtaagagattctgaggcagaaccacccagctaagaagctcctggactcctgactcacagaaactgtgagatgacatttgtttttt

SEQ ID NO: 196387 - DNA, 510 bp, Homo sapiens
agaaaagtcttctcgatagataaatatcaaaaagtagatacatagtatgtgttataaaaaaaacatcttttgtcagagctggcttcataggttttatcattcttgttgctactgttgtttttaaactgcaaagagaaaaaaaatcatttcttaaggtcatctttatccaggtctaccagaagtactttatggattggaacttgactctcacacttgtatgatgcattctatcccaaagctcttcacatcttaattctgagtagagaaacatatcaagtcaaaaaataagccccaggggttaatgaaaaggaaaattcaacttataatcatcaacatttgaaaattctgacaatattctgttaattaaaagaaagaagaaagaagcacttctagagctactaagcccaaagtattgactatttttgttaaaaattcatcattcaaaatgaagtcaattcatagtttttgttatattgataggtattctgaggattatccaaatgtttcatg

SEQ ID NO: 196388 - DNA, 490 bp, Homo sapiens
gttttgtattgtatctattttttagagatggggtctttccatgttgcccaggctagagtgcagggggggcatgatcatagctcattttagcctccaactcctgcactcaagtgatcctcgcacctcagcctcccgagtagttgggcctacaggtggtgccaccacaccaagctctgtctgttgattgggatgcagctagggtggggtgagtggtagaggtagattcattggcacaggaaggcccccacacacatgagaccagaggaactggctccatccctgtgtctgacttgcctttgttgtagaagcaatggtccagctcccaggtctagaggcttgagtttgttaaaatgtgctggacatccagacaaatcagacactttttatggaaagctatataaaggacaccatccttcctaacaataccacagagattcaagggattcaaaaatcgagaatgaaatccgttccaaagcacgatactgatggc

SEQ ID NO: 196389 - DNA, 322 bp, Homo sapiens
aaatactacaagagcgggggagtcgggtctcaggctcccagagcctttgttaggcaattgcatcaatttacaatttcataacattgttacttatctccttcacatgacaagtaataggaggtttccattttgggtaatgattgtaggctgtggaagaagagtatgttggtttaaagaaaatattaagtaaatgagactgagatggtacctatgatggaaaattctgggctagttgactttaggatggagatgctgtgtcatgaaaatcagatttgaaatcatgttcttaaaaatcagcttgtcactttcttgttgggagctt

SEQ ID NO: 196390 - DNA, 662 bp, Homo sapiens
tcagtcggtaccgattacgctcctagatcaatacacaaccatcatttctcatcttaaattcataaccacaaacctcatagagatctgttaatgctagtcaggcaattacactgtttcccattcctttaattccttcactatcctgtttcaatttcacacctttttctgctttcttatatgtaaaacacctcctccctgtccttactttcaagtgatcactgtacatcttatttcatgaagaatattcaaatgattaaaagaaaacatcacagattcccatcaccacgtctgcccccacaccgtttacaaacccacactccctgctgcccatcttgttgccccgggtgaactatctgaactactatctaaagtcagtttcttcccacgtgcactacattccagcagcttttacttagcaaagaacattttccagcaatttccttatctctccttaacaccattttctccccttttcctactggatcattctcatcagcatgtaaacaagttattacttgtttcccaacctgaccacatttttcatcttccgtctccgtaaatctgatctgtgccccactatttatttcctgaatttctatgatggccttttacctgatcttcctgcatgtgtcctctcaccctacacaatctattcccagcat

SEQ ID NO: 196391 - DNA, 535 bp, Homo sapiens
ttggattgggatcctggctgctgcttcaacctcatctaatttcctattacacctcctctctctccctttttgtacatttgtccctctctctgatttccaccatctgtctttccagtttactttctctagttccagacaacaaaaattctttaatcccactgggatctccaatcaattgattcaatcaacttttcattatgcctcaaccctttgatcttctaatctaacttctcataactcaagataaattccatgggaaatccttaacaatcacttccacatatacatccttaactgcctgcctccctcttattgcttttacttgtttggaaaaaccacaacttggttaaatccagatcaccattctctatgtctataattctgcagctaaacataggtagagatcaatacacaaccatcatttctcatcttaaattcataaccacaaacctcatagagatctgttaatgctagtcaggcaattacactgtttcccattcctttaattccttcactatcctgtttcaatttcaca

SEQ ID NO: 196392 - DNA, 768 bp, Homo sapiens
ggcagaaatgctcgatgacctcatggagaagaggaaaaagaagcttgattctgtgattgaattcagcatcccagactctctgctgatccgaagaatcacaggaaggctgattcaccccaagagtggccgttcctaccacgaggagttcaaccctccaaaagagcccatgaaagatgacatcaccggggaacccttgattcgtcgatcagatgataatgaaaacgccttgaaaatccgcctgcaagcctacgacactcaaactaccccactcatagagtacttcaggaaacgggagatccactctgccattgatgcatcccagacccctgatgtcgtgttcgcaagcaccctagcagccttctccaaagccacatcctagtatcagaaggccaggcgagactgcaccactgcttatcaccccaccgcgtgatccctgctcttaggtgctgggcagaagggaagggtggtcagggtgaggatggtgagggagggctggtgaggggctcagaggaatacctggaacaacagcagtgttattgtagtgtggcagtttcttttatacataggtgggagtttttaaagtaagggaaaaattaattttttaaaaaacaccatgcttggagggtgggggtagaaatacagagatacaatattatttctaaggaattgggttttcatttactctggactggtgaaaatattttttaaagccagtgctctgagacctcagcttttaactcagaactccatgggttccagaccaagagt

SEQ ID NO: 196393 - DNA, 232 bp, Homo sapiens
ggcagaaatgctcgatgacctcatggagaagaggaaaaagaagcttgattctgtgattgaattcagcatcccagactctctgctgatccgaagaatcacaggaaggctgattcggcgctttgagtcgaagtcttgctctgttgcccacactggagtgcagtggtgcaatctcggctcaccgcaacctccgtctcccgggttcaagcaattctcctgccttagcccccacgag

SEQ ID NO: 196394 - DNA, 584 bp, Homo sapiens
ccgggttcaagtgattcccctgcctcagcctcctgagtagctgagactacaggtggcgccaccacgcctggcttattttgattttattttattttatttttgtattttagtagagacggggtttcaccatgttggccaggcttgtctcgatctcctgacctcatgatccgcccgcctcggcctcccaaagtgttgggattacaggtgtgagccaccgcgcccagctgtatttctatctttgtttacggttttgttgttctgcttcctaattcttttatatacttctcttccataatcttcataaagaatcctttagggctatttcattccatttctatagccagtcctgtgcttacatagtcactgggctcctgcccacccccatcccagctagggttgtaagctctgcctctaaacttgtggggcagtcagttccagcaacagcttacagaggaggggcatggtggtccttctgaaaggaatggtcattgctgagcagcacgataaaaaaggtaattgtgccatttaccatctctcggacttactatcttatttacagacaaggaaactaatgatatctacct

SEQ ID NO: 196395 - DNA, 1084 bp, Homo sapiens
gaagatgatgggttttatttgagaagttgtggatttgaactgcggtgctcctagagcctgcaggcagtgggggtgtgggacttgacacacatagagatcaggagagctgtaaagactcactgtgatggctcatgtgggtggtgactgacccgtgtgagagggtgctgctggcaggcagagctggcagaggaagatagggttgagggtctcaccgttgggtatacccacacatgagtgacagggaggatcatgccaggacattgctgcatgctagtgccttgtttcattctggcctttgcaaatgtaaatattgaagaatagccagcatggcagctctgggttttatctttttgtctggatctgtactgtccagcatcatggctgctagtcacatgtgacgtttacatttaaattaaatactattcaataaaacctgaaattcacttcgttagttgcactcgtcaagtactccatagccacacgtggctagtggctagcccatctctgcttgctggttagggccttgcgaggctgaaatgttggctcttattttctcatttgcctcagaatccaaagctgggctttaggctgtcagctgttaaggcatctagagaaaggtgtgctggagtgcagcgtggttgggcaccagtaaccaaatctggccgttgctgagaaccaggcttgtggggtgtctcctggaaagggaggtggggtgtgtggctgataaggatcttatctttagagattctcttaggcatcctgtgttggatgagtgcttcccagatctttaaacaaaataaaacaaaacacccacacaaacattttacaaagaaaaagaacaaatccatacttagaagtagaatgtccactaggtcaaagtaagaacaagagatgtgccaggccccaggactcatggaaattagatcatgtggtcagagttgatatcaaatagggggaacatagcaaaagatcttcttcttatcccacaggactctagttaggcaaattcttatgttttaaagccagctaggaaatgcgtaaataggggtgaatgcccatggcaagaaacaggaatcaggaaaaa

SEQ ID NO: 196396 - DNA, 2247 bp, Homo sapiens
gtccctgtaagcatcacattgctggaggaaaatctcatgccagagcttggaccatccctagctcaggggttaggggttgtcccttggtgacctaaatgaaaaaacaggtccagaacagagttcctgatgctggacactcattcagtctttgaatcgtgggaggggaggcctggtactaggtagacctaacctctttgaggaaccacagagcccaaggctggaaacctccagaatcctccaccccctgatcctccctggggacccctgtggcctgtctcactgagcactcttccatctgtagatgtctgggctgctgtacaagggagtcccctttcaggtgtggtgctagacatggtcactcctgctggatgtctaggtggtagaaaccaaggacctagggaaataccaggtacagcctttccatgctcatccagagcaggacaaacaggccaggcggtgtcaggagcccaggtctccagctggagggaacgtcaacccttcggtgggagcaggggccctttgcacatcctaggcacagatggtaatgtagacaccacaggtaagctgggcttggtacctacccctccccggattcagaaagaaaccaaacaaggagctttgtgcggaatgaaacctcctttcctcccagaagcactgctgactgtttggtggttgccatttgtggcagtgagcctttgtttgttctgaggttgggctggtttctcctcttggccctgccctacagatcataaaggagaagagcaagaggtccccagcaaacatccacagatggccttggaaataagtcaccttcctcaccctgcaggaatgccagtgaacttattgctgacatcttggagctcagtaccctcatagtgtaacggcgtcagcagatctgcctgtgctgggacttcctgtactacccattcctgaggggcaatgcttctgcagggcctgtgacttggtgcacaacttcagacaccatcatcttgcagcagcaccgcaccctcactagccagggtgttgatgacttcctcaaggccaaggccacattcaaggcttcggacttcattgatgcgcttgtgctgagcaaggtggcttctccaggatcttaattcaggaggtagaatggagcttgagatcaagtgtctgatcaagcctcagtgtatgggcgctgttcatcctctggtgctgaagcagccaagagacccaagtctgcctggctgcctcttaggatatgacagcagagccagtggcctctactagatcctgtacaacctcacaaaacacccagacatcgggagtgctgccagcctgtgatgcaagagtcctaatcctgaagacattgaatggatcatgaggatcagagaggaaaagtcacttgcccaaagtcacacagctgaacagtggtggagttcaactttgaccgtgggctgtctggccccaaggtgtatgcttgcttctctcccaagagacaactttcttatcaggctcaaatgaatgaaaggaggatgttaaagttcctagaagctttaattgaatgaaagttcctagtagatctgtacctactaaaaaccacacttctgaagctacgtggccaccagaagacacagctagtctgccatgtaaaaaaggaaaggtggcgtgtgccctgaaggtgcaggggtgagagcagggaaatggagaccccaacagccagcagcagtggccctcatcacagccctccaggagatatcaaaggaggtcagaccttggacagtagtcttgacttcctgctatagaacacattgttaacactgaaaaagatgatctgttctaggggaatggtgaaagctgactctagcacttgtactttttgtttgtttgtttgagattgagtcttgctcttgtttcccaggctggagtgcaatgggtgatctcagctcactgcaggctctgcctcctgggttccagctattgtcctgcctcagcctcccgagtagctgggattccaggtgcccgcaagtgtgcctggctaatttttatgtttttagtagagatgggatttcgccatgttggccaggctgttctccaactcctgaccttggccaaagtgttgggattacaggcataagccattgtgcccggcctgtgtttttaatttcatcgtggcacagcttcaaaatgacatctaagtagctgacataaaaatgaaaattctgtgtactttgatattagcaggcttcaaatacaaaccagaatatgagt

SEQ ID NO: 196397 - DNA, 760 bp, Homo sapiens
  misc_feature (11)..(11): n is a, c, g, or t
  misc_feature (18)..(18): n is a, c, g, or t
ggtaccacacntcgatcncggagaagcggcgggagcttgagatcaagtgtctgatcaaggtacttgaacttgatctggagggctctggggagccatggaagatgctggataaaggagtgacagtcagctatgttttcgagatgactgtagaagcctgcctggaaggagtgaacaagagccaggagaccagggagggagcttgtggggcaggtctggagatggtgagggagggatcctgcttggatgaaaggtcttcagggactgtctcaggttacacacaggtgtcctcagagctagtgtgttcagagtcttgcctccaggatgaaaatgggaaggagttgtcagacgaggacatataaatggaggctggcatattcatgagtgctggtggtggtcccggtgtgggactactgtgggaacaggggtctctccatccagggatatgatggatggaccctacatcactccattctgcccttcctttccctcctcccattctcccgaaagcctcagtgtatgggcgctgttcatcctctggtgctgaagcagccaagagacccaagtctgcctggctgcctcttaggatatgacagcagagccagtggcctctactagatcctgtacaacctcacaaaacacccagacatcgggagtgctgccagcctgtgatgcaagagtcctaatcctgaagacattgaatgacacagtaagatgataatggaaagcagcagcttgttggttgtcacttttctggacattg

SEQ ID NO: 196398 - DNA, 513 bp, Homo sapiens
gtaggatctctgaagcctgtgccagtggaaccgcagctcatggctggcacctgtgttctcattcttacctcattaagagtaaagtttattgagtttattgaatttaagtatctttagtgagatcatatattattagtaagaactgggaccaaacagattttctgactctaaaagagagattttcacagaaacagatatatacctgtaagtatacagacacgcatacacacatttctttactgctcataaaaattagtccttattagaatgtgggatgtataaatgtaagagaattttcatgttaaaattgacagatacatttttaaattgtcctaaaataaatttaattatttttcttttagaattttccattattaatgttatttttatgagaaactatataactttattgataatacatacaataaccctttgtttttcaaattgaaaatacagtgtattttgcaaataactaagtcctaattttgtattaaaattttaaattttcaatct

SEQ ID NO: 196399 - DNA, 220 bp, Homo sapiens
gggaacacaaaatgcggatctgggggagttaaccctctcggtggaagccacgccagtgcccccaaaaccaggcagaaagcagctccagcaggcagccgatgggagcagccgacaagataccccatcttcctttggccagttcacacctcagtcctcccaaggaaccccctacacgtctcggggcagcaccccctactctcaggactctgcctactccagc

SEQ ID NO: 196400 - DNA, 1222 bp, Homo sapiens
ggcagatgggggctgtagccccggagcccacaaggacacctggggcctcaaaaatgaggcctgggatggctgatctgctgggggaacagagggaaaggctttagatctgggcatggagagggaccgaggctggcctgtgtgggctcgttctaccggatgaggaaggcaggtgtcccaggctcaggtggtgggcggggcaggtgtggctgggagccagggtgctctctggaggtgcagccagagatccaaggtcaaccctggagggacaggcagttcctggttttttctaaacattagcttcgaaacttccagagttaacacgccggaatcgtgttgcatattattgagcttccagtctggggtgctgcgtggaccacgttgaatgcccagggactccgttgggcagatagaggggtgtcaggagcatggagtcagcccggctggcctgcaaactgcagatgctggaaggcccgtcaggtgggacctcccgtcaccaagcagatcttaacaggcctctgcttcttggtggaatgttctggtacattggcaggatgcactgggaaaagctaccatcctcaggccatgtcccccacacagtgtcattttcctccatttctgaacacttctctctcacctccctgtcaagatataccttgctgggaccgggcatcctggagttccctgcttggcagaagcccagaaaggcccagataaacgctgccccttggagccaccaacaccagagggacagaagtgggggctaaaaaagaacttaaggccaggtgcagtggctcatgcctgtaatcccagcactttgggaggctgaggcgggcagatgacttgagggcaggagtttgaggctagcctgggcaacatggcaaaatcccatctctactaaaaatacaaaaattagccacgcatggtggctcatgcctgtaggaggctgaggtgggaggatcgcttgagccctggaggccaaggccgcaataagccatgattgcaccactgcatttcagcccaggtgacagagcaagactctgtctctgaaaaaaaaaaaaaaaaaaaaaaaaaaaagaacttaaacctcagcatggcagagctgtgtgcagacccttataactaacacaccgaataaccataccacgttgtgaaactaattcctccttttcatttgcaagtaactctcccctctgcctttttttttttttactgttagaagctt

SEQ ID NO: 196401 - DNA, 474 bp, Homo sapiens
ccggaaggtagctgtactgcatagcaccaaccaagggactatcacctacaatcctggaaagatctctttcctttgcccctcattctttctttttaattgaaattgattcatcacacaaaacctaactatagatgggaatattcttgctggtgagacatagctaaaaacatatgccagctgacattgtacaaataaagcatagatagcaaatttatgcatttttcttctattcatgttccagttataaacctgagtgttagctggtcatgcattctgttgaacagtaggataatatgtggaaagtttacctgacatagctttctagtaccagttaagatttcagttttatttactaatagactagacttcttcaagatgcacaattaacaaggggcccttatctggggtctgtgcacccccctaagcagtccacagatgtgtttcaaggggatctataaactgcttaaattgcca

SEQ ID NO: 196402 - DNA, 445 bp, Homo sapiens
atttgacaaagagtatctgtggtagtggaaagatctctttcctttgcccctcattctttctttttaattgaaattgattcatcacacaaaacctaactatagatgggaatattcttgctggtgagacatagctaaaaacatatgccagctgacattgtacaaataaagcatagatagcaaatttatgcatttttcttctattcatgttccagttataaacctgagtgttagctggtcatgcattctgttgaacagtaggataatatgtggaaagtttacctgacatagctttctagtaccagttaagatttcagttttatttactaatagactagacttcttcaagatgcacaattaacaaggggcccttatctggggtctgtgcacccccctaagcagtccacagatgtgtttcaaggggatctataaactgcttaaattgcca

SEQ ID NO: 196403 - DNA, 211 bp, Homo sapiens
ttttactttataaatcagaacttgcctctgtttggcaggaaccttgtttgggaaatgaaaatatggtaagtatgtgtttccttctagttaaacaagggaaagtatcgttcttaaacgccaaacttaaatggttaaaaaagttaagtcttaggccatgtcttagaacgaacgttcttatctttaaattgtgagtcattttttcagatagaga

SEQ ID NO: 196404 - DNA, 155 bp, Homo sapiens
tgtatattagctaacaaggaggtgctgacagttttacaggacagtgtcacattaagactgacgttttggaacaatctggtatttaatattgatggccataaaaatcagagatagaagattaccatatagatataaggaaatgaagttcaaaggca

SEQ ID NO: 196405 - DNA, 665 bp, Homo sapiens
cccaaccacctatattgatttttaaggaattatctttctaatttagaatatggaaaaagaatggttgatacagatatatgtctttttttaatctctgaaaataaaaagtttgaccattttttggacagaaaatagacttattatggcaaattcaacatgggccccaaaatgctgtaacagtacactgcacactcatttctccttgtcggtggctgtgctctcttgcacaacttcaaagcctcccatcatctgtggagaaaacttttttttcttagtgaatagcatgaatacacttcctttttctctttttctaaccttctggcttatgtggaacttgtgccaaattcctcatcatgaaggcatctgatttatattttgacaacagtgatagcttcaaatgaacagttgtaaataatatgtcttcttctttttagttatggattgcatattaattttaaccaaactacataattatctcatcgttccgaagaaataatatatacaaaggaggatttttttaaagtatgagacactaggaccgtttgttgcaattattatcactattattatcatcttcctctgtcctggtatcctttattttctgaattaaaaaaaaaaaaggctgtatgatgtgctatctagggctttgataaatactcttttta

SEQ ID NO: 196406 - DNA, 328 bp, Homo sapiens
gagcttgttacctatatgtagaaggaaagctaaacattttgatataaaattagaaataattcaccaaaataactgtaggtaaagtaagaagagctcagacattcgattcataataataccataagggaaacacactactttgctgtagttcaccaaaatagctgtaaaggtcactgttaactatttacctttctcttaagaacttgtttttccctgtttattagtacataattaaaaattcttattcaggcccagatgtgatagcttatgcctgtaatcccagcactttgggaggccaaggcaggaggatcacttgaaggcagaaatt

SEQ ID NO: 196407 - DNA, 507 bp, Homo sapiens
catgtatgtcagagtttatttctgggctgtctgttctatcccagtggtctatatgtctgtttttatgtcagtgccacactgtttttattgctttgtagtaacttgaaattaggaagtgtgagacctgcaaccttgttctttttcaagattgttttgactattatgggtttcttgagatcccataggaattttaagatagatttttctatttctagaaaaaaatgtcactgggattttgataggtagctaatgtctaccttttgaatacctcttataaaattcatctcaaggggcatctcctttgtgaagcctgttgtaaactactatatagaattaactgtttttttattttgtcccctaagcatttctaacatctatcacacttcgttaaacttacttgtttctttttactagactgaagaattgccatgtgtattagttttctgttgctgcataacacattgccacaatttttccagcttaaaacaatgctcatttattatctca

SEQ ID NO: 196408 - DNA, 593 bp, Homo sapiens
gaaggatcaccttttcaacatatggttctgaaacaaccggatttccatgtggaaagtaaattaatttcaacccttatcttatatgcggaatttaacttgaagcatagacctaaatataaagtccacaagtgtaatttctggaacaaaaaatgtaggttaaaattttgaatccttgcagtaggtaaagataccttaggatataaaaagcgcaaatataacaggagaaaaaaataaataaattggactttataaaaattaaatttttctgctgtttggaagacattgttaaaaaaggtgaaaaggcaaaccatctaaccatccacttgggaaaaatagttgcaaaaatatttttacaagtccagacttgtatctagaatatatgagaagactaacagctcaataataaatgactaaacaggtagcatgaaaagatgttcgactttattactcaccagaaaaatgcaaatcaaagccacatagaaatactactacacaatggttagaatggctaaaaataagaagaatggcaataccatgtcaaggtgttgccatgacaaggatttaaaactctcatatgttacttgtgaaacttg

SEQ ID NO: 196409 - DNA, 432 bp, Homo sapiens
ttgagataatacatgaaaaacacctagcacaaagactagcacagagtaggtgctaaataagcattagctctcctcattatcctaatagtccttcccaggtagctgtgattccagaggaatggtaaggctattcaagggctagaagatgctgcttgagcaagatgggtaagcatttttgtcattcaacgcattcaatcaaatgcttactgactgcctattgtgtgggtgtaagcactgacatttgttgactgcctcaatatgcctcccctcttctctcagtaacaatcttggattcttatttgagaagattcccttcccatccaaatcctacattctcagccatgcgctgttaagtggaaccgaccctacctccaggggtgacaagcagaacactagcccccagccctgcagcctgatgggagataggcatgt

SEQ ID NO: 196410 - DNA, 609 bp, Homo sapiens
taaactctgattaccaatctgaaagtaaggagtctgctctgtatatgggtgcatttcaaggcttttgcattgtattttcagtgccagatgtcaacaaagggcttaataaatacttgttagataaaaatttaatgaaagatgattttacatattccagtctcacttcagctgaactacattggtcctttgtggactaagtaatccaggcagctctgagagcaagccagtctttaggggaacagatcatacccacaagaaagttgagggagcctccgttaagttaaaaaacatttcgtttattagtaagtcattttcagcatataaattaagtttaaacagtcattatttttaacttaatagtttcatcacagccaaaatacaaatttttaaattctcattggcagatcctaattggcatattgtaagtagtggaatccatttatagactttaagtatgtgggctttgatgtagcgaatggaatctgtaattagcccaggattggaacatggccttcctcaattgtagctaagatcaaaagctaatagctggagtttgggacagctgtgtcacattgaaaacagacctaacctccttcagtttcctcgctg

SEQ ID NO: 196411 - DNA, 520 bp, Homo sapiens
acatcccctccctgcctcacccatgctcccaatgcccaaagctctggaatctcttcccgcgtggcccaagcctgcttccactgcttggcaggatgtctcccaagcccctgggcccatgggctgactctgctcctggagtagcatccataggctgaaaagtgtgggagggaataaaggatgcacagcacttggacatgaaggatggggtatccacagagctattggagggagaagaggtgtaacaaaccagggtcaccccatgtccccatgttcagggacaaaacacagacgagtctgagaattttaaatttaaaccaggtttcccaagtcctcgtaaaggcacatttgtcgtggtaggagaatagaacatactttagttaacagtttgttctcttgatgtataatttttttaatattcagacataaagtataagtgaacttccatctgtcctcttgcctcagtccctgaaaatgccagtgtccacccagcatcctcatgggtggcacgaaaacccagaca

SEQ ID NO: 196412 - DNA, 405 bp, Homo sapiens
tccccatctcatcccaggtcaccacctggctgaccccaggtccccgacccaacaacaacccctcccaagtccctaactccctcacttggacttgagacccttcacaacccagcagcgctccgcctccaacgtgacatcatgctttctggaaacttccccgtatgtcccactttcccacacttggtgccctggagcaccttccggcctctacatgctgtacgttcccctgtgagcaccctcctctcggcctctggccaacacagtcccacccatctgtgggtaacaaacgggtgtgtgtgttcttttcagccttgctaaactgtctgaatcaaggatcacaaactacagcctgcaggccaaagccagcccacagcctgtgtttgtaaataaagctttattggaaca

SEQ ID NO: 196413 - DNA, 227 bp, Homo sapiens
ggatagtaatatctgcatgtgcaggcactgctaatctcctaagcagtatctcttcttcttcattaacagtaccccaattttgtttggtggaaaaatgtgcccagctttaaaagaaaaaaagattctcaattttctagggtccttagtggatatggttataggatagttctggacaattagatacaaatacaagtctacttggtggagctgccaggaaatttggtgtt

SEQ ID NO: 196414 - DNA, 371 bp, Homo sapiens
atccacccgcctcagcctcccaaagtgctgggattataggtgtgagccactgtgcccagccgaggttttttttttgtttaaatcatagagtaaaattgatctgggaggagtataatggtctgcgaatttttaaattttattagatttatgtaaacacctccacaatcagaatacagaacagtttcatcaccccaaaaaactttctcgtgctaatcctttatagtcacattctttcctacccctagttcctaaatggaatcatatagtatgtaaacttttaagatggctgctatggtctgaatctttgtctgtcccccaaattcatatgttgaaattctaaaccacaaggtgttgctactaggaggtggagc

SEQ ID NO: 196415 - DNA, 457 bp, Homo sapiens
ggtggaaatctcttcaaaaacattgttttaaaggttacttcgtatttgttgatatcaatttaccgtattgcttcacttaggttattcccaagttttactcttataagcactgttgcaatgaaattctttatatctaaatctttctttacatctcatattgtttccttgagatatcctccttgaaataaagccagtatgtcaaaggtcctttcatacatgcttgctttaaatcttcaagaatgcagaaacactttgcaaccatcctaagaatactttttttccagtggagaatcattgatggaggcaaaaattaaaggatggaagtttaatgagaaacagggtatttacatgatctcaaaatatctccctgcatattacttgtcgattaccaagaaacgagtaccaactttacattggagaaatctggcagtactgttaattgagtaatcaaagttaa

SEQ ID NO: 196416 - DNA, 302 bp, Homo sapiens
  misc_feature (24)..(24): n is a, c, g, or t
ttccacgtgcgaaatatttgcgantattgaagctgcttaatgtccatgtgaggagaaggcaatacaggaccagatcactgcccaaaatgataccctgcttctagaaaaaaggaaacttcaggagcaagtcatagagcaagaacagttgatccacagcaacaaatggacgatatcttccatccagagcagggtactttacatggataaagaaaataagcaattacaggaaaatagtcttcgtctcacacagcagattggcttcttagagcgaattataaggagcatccatattcgcagaggag

SEQ ID NO: 196417 - DNA, 629 bp, Homo sapiens
gggagatggcctgccctggtctcttggctgccctaatggaaaggctccaagttgcagctttagaaacaagggctggcactatgagcaggctataacttcttgcttacaccttctctcttcacatcgggtgccgcctgtcaggtgagggccacagtccttcattccaggtgtttttgccttcagccttgctttactaccatgtttttctccttttctgtcttccatctgtccttccataaatccattcattattcatccatccatccgtcctttgagacatccatccttcaagccaccgtttgaccccttcatcccaaattaatgacttactatatgccaaactgtgtgctagaaactgactctacagatgagctagaacagttcttgccctcaatcttggaagaacaactcattggtagcagctccactgtttattggcagaagggaggattgtgtccagggccgcagtatgcagtggggcagttcaggcactgcacaaaaaggccctgcagagccagcgaatgggcctgaaatgcaagctctgtgtcctgacctggagatgggtctttccagaagaagggacagcaggaggtgccctgtgagttaccaaacgtagttcattttgtagc

SEQ ID NO: 196418 - DNA, 571 bp, Homo sapiens
agaaacagaaaaaaatcaaagactaatcctacaaattctcctttaatcttagagcttccagacctagtttctctttcatctaggacttcgaagttatctagttattttatgggtagtgaaaccacaagacgaagagagggtggtgggggggagattaaattaatgagcaggtaagcaggtttattatttcgtctgatccttccttcctgctaatttctctgagccaatttgggaggcagagcctaacatgttaactcagagacagagtattgtatccatgttctttctgaagccatttatctgaaggatattaaagatccaatttacatagacattatggcattgtgaggagggtgtgtgcatgtgcacaaatgagagagagaaagagagagagagagcgctagggtatccatccagttgggcctgtgtttgtgtacatgctcaacctccaatgagtgccatccctcatgaggctctcaaagaagtttgcaatcactcagcaagttagttcaagaagtcattgggccttgacagaaatcaggctccaggcaacggcggaaatgtttattaa

SEQ ID NO: 196419 - DNA, 152 bp, Homo sapiens
attttataattatttgtaggtttactttttaaaacttcatggtttgatgccaaacccattcctctgtactggaggctctatgtctgtccttttttttttgagacagagtctcgctctgtcgcccaggttggagtgcagtggcgcaatctcgg

SEQ ID NO: 196420 - DNA, 224 bp, Homo sapiens
  misc_feature (202)..(202): n is a, c, g, or t
gtgacgttatcgcccaacacttgtttcattagaccaggaactattttcaagatattttaagagaacatattttgaaaactgcttttatggcaacataagtagaagtagcaggttatttttaatcttcatgatttaagattttattcactaccaggcattttctttttcttttctttcttttttttttttttggaaaggggtnccgaccctgaatcgtaactcat

SEQ ID NO: 196421 - DNA, 356 bp, Homo sapiens
tgcagttcaggatgtcatgcccccatggcccactcagggcacgaggatttccgggtgattcctgtggtcagcttcctggacctgacagtggggtggggctgcaatgagacgccagttgcaggaagtggtttgcacagccttcctggtgtcatgggtcactgtcttgccgagtggctttgggcaggtcccttcccctctcagcctgcaggttcctatgccaggagctcccttcttgccccaccagggccttgttttcccagatacagaggtggggcagatcccagcccgttgaaacagacaaggctttggaggccacattgggcccatttctcagaggggcagtgtggctgggtgct

SEQ ID NO: 196422 - DNA, 276 bp, Homo sapiens
tcagggccatctgtttgactaaagaaagcagccctggcttaaataaagacacaattaaggctccaaatgaggaactggccctgcagaaaatgccaggccacaaccacggttcttggtaactttgctctgcacattatccactaaagaaatcaaatcaccttttccatctcctgacacggtgttacagggagccacagagcaacagggggaggctcgcgctcatgccctgcgggggaacgagtggagcacccacacttccggtgcaaccccgcgaga

SEQ ID NO: 196423 - DNA, 302 bp, Homo sapiens
acgttgcactcgtaagataggagagacctgagcacttgtaaatgctcatgagaaggaaataccaggagagaggtttacatcggaggtggggctgggcgcggtggctcacgcctgtaatcccagcactttgggaggccgaggcgggcaaaacacaaggtcaggagatggagaccatcctggctaacacagtaaaaccccgtatccactaaaaaatacaaaaaaattagccaggcatggtggcggacgcctgtagtcccagctactttggaggctgaggcaggagaatggtgtgaacccaggag

SEQ ID NO: 196424 - DNA, 332 bp, Homo sapiens
gtaaagatgatagatcgaacacaggtacctattttctcttcttcctgaaatctcattaaaccaacagtaaaagtgggactacagacggaagcacacctgagaaaacaatccaaaactggcaaagggaaaagccaagatttacactccagaattccccaaaggctaaggaattggtactctgatgtaggagtagaggtagaagctaaaaaccgtttcctcccctttggaaggattaaggtcttcatactcatgcacaaactgtgcacagactcaaatgcgtagctctcagaaatactgacttaatctcaaaaacctctgaagtgtaactgcac

SEQ ID NO: 196425 - DNA, 500 bp, Homo sapiens
gccagttattaggtgatcacttacctaactgaacagagacttcagtggccacatatgacaaggaatacagactttatagaattagtggaggaaagtcattaaacaaatagcaacactttggaatcttatttccaaaattgacacgttatattaattttgaatgcacagttttgaacaaaagattacaagttaggcaaagaaacaagtaaggatggcttatacctaggaaaaaaccttactagacatagattttaaatcagctattaaaaatatgtgcaaagaactaaaaccatgtctaaatatttaaaggaaagtatgagaacagtgtctaaccaaatagacaatatcaataaagagatagaaatcataaaatagaaattctggaactgaaaagtataataacagaaaatttgctggagaacttcaatagcagatttccactgataagagcaaaaaatcagagaatttgaagatggttggtattatccagtcagaggtac

SEQ ID NO: 196426 - DNA, 476 bp, Homo sapiens
  misc_feature (433)..(434): n is a, c, g, or t
  misc_feature (436)..(436): n is a, c, g, or t
  misc_feature (439)..(440): n is a, c, g, or t
gaagaaagtgcctgcttcgccttcaccttcggccatgattgtaagtttcctgaggccttctccgcctgcagagctactggaactagttcacagacccaaagatgcttgaatgaaggaaaggcagccttccctggaggaagaactcaacagcgcttccacaaatagtacatttttactgattatcaaagaaggactgtgactaaactagaaggagaattaacactatccagagatggctacagttctgaagggaaactttgagtctccacctttccaagagtggataatcctctctccacaacttgataatgcacaaactgcaaatcttctggtactcactgctgcaagcaaacttgaagtctttctgagcctgactcttcattccttccttgtgtgacccaggtatggaggactgccctcccaatcatatctnntngcnnagagctgtgtgagacagatggtcatgcagggagaat

SEQ ID NO: 196427 - DNA, 796 bp, Homo sapiens
ctttttttgtttgtttttgagatgaagtctcgctctgttcgcaggctgtagttgcagtgagccaagatcgcgccagtgcactccagcctgggagacagagtgagactccacctcaaaaaaaattaaaagctcacgctcaaacttccacccctattgtttggaagcatgatttggcttgtagcatgaatttttaaaatagtagacacccacaatcaaatgtaagagtgggacaaaacagattaccccacaacaaatctaggtggcttttggactgtccacactgctgttcattccctttctataggtcatggagagtttcctatttgccaaaatactttttgtagcaatggcatgcaaatccaatgcactccttgtttgtaataaactcgaattatatactacctcacacctcttctagtcttaaaaaaaaaaaaaacttctattctccacttttcagatcattcttaaacatgtcctaaattcttcagcgctgcaggaaatgtctgcctcaaagaccagatttacccaattctttagggttcaattctgtccctaagcagttccgtaacctcagacaaatcattcaactctactgggactcaatctccttgtgttcacattcagtgagggagtaggattaaatgctaaggtcccttccagctctaaccttttatgattctgtaactatacagatacagtcaacccccatatctgcggagggattggttccagtcctcccttcagataccaaaatccatggatgctcaaatctgatataaaatggcatagtgtttgc

SEQ ID NO: 196428 - DNA, 792 bp, Homo sapiens
cttgggagcctgaggcaggagaatcgctgaaacccgggaggtggaggttgcagtgagccaagatcgcgccagtgcactccagcctgggagacagagtgagactccacctcaaaaaaaattaaaagctcacgctcaaacttccacccctattgtttggaagcatgatttggcttgtagcatgaatttttaaaatagtagacacccacaatcaaatgtaagagtgggacaaaacagattaccccacaacaaatctaggtggcttttggactgtccacactgctgttcattccctttctataggtcatggagagtttcctatttgccaaaatactttttgtagcaatggcatgcaaatccaatgcactccttgtttgtaataaactcgaattatatactacctcacacctcttctagtcttaaaaaaaaaaaaaacttctattctccacttttcagatcattcttaaacatgtcctaaattcttcagcgctgcaggaaatgtctgcctcaaagaccagatttacccaattctttagggttcaattctgtccctaagcagttccgtaacctcagacaaatcattcaactctactgggactcaatctccttgtgttcacattcagtgagggagtaggattaaatgctaaggtcccttccagctctaaccttttatgattctgtaactatacagatacagtcaacccccatatctgcggagggattggttccagtcctcccttcagataccaaaatccatggatgctcaaatctgatataaaatggcatagtgtttgc

SEQ ID NO: 196429 - DNA, 457 bp, Homo sapiens
atcagattgtaagatgcttgagggtagggaccttgtctgtcttgtcactgctgaacccaccataacactgcctagaatagtgcttcaccaagtcagcactcactagaaagttcttggataaatgaatgagcactgatgtttcttggctaacgttttgactcttttaaaatttagaaaggctgtgcgtggtggctcacgcctgtaatcccagcactttgggaggccgaggtgggcggatcacgaggtcaggagatcgagaccatcctggctaacacggtgaaaccccgtctctactaaaaataaaaaaattagccagacatggtggcgggcacctgtagtcccagctacttggtaggctgaggcaggagaatggcgtgaacccaggaggcggagcttgcagtgagccgagatcgcaccactgcactccagcctgggtgacagagcgagactccatctc

SEQ ID NO: 196430 - DNA, 431 bp, Homo sapiens
tcttttgttttcttttacttagctaaaaataaaaatatatttaatgacagacagatgaaggaaaaataggactttgataaggtttaagcattttcaatgatgactacagaagcatttagaaaacacaagaggatgtgaatgtgtcacatgcttgggtttcatgctaaacagacagcaggagctatggaatggagacctcacttggggccaagagactatctgtttccattgaagttcctaaaaaaaccctttgtggggaggcggcctccaagcgggagcagaaggccaagtgcaggcctcagcctggtcactctggttagtgttctctttctgtcctccaagtgggtgattagaaagcccaaacataatgatctgttatggacagagatcacagtgctgcggtttccagaagctgctgctgacatggtctt

SEQ ID NO: 196431 - DNA, 461 bp, Homo sapiens
taagagacctaaggtccctactctcatagaaattcaattctagagaaggcatttagacattaagcactaaaaactttaagatatactttggaggcaaagctggcagggcttcttaatgaattggacatggagaggggaaagacttttctctagagggtgaattttctgtgtacagtaagttcatcacctgaggcaaaggagatggaggaaaataggatgatgatgttcagaggtttgacatgagtgttcaaagattaagatagctatttcaggaaactgggcagcaagctggctaggaaaatgtcattggattgccaggcaatgttgaggcttcatttgatcttactgatcaagtatagtcagtcctccatatctgcaggttctggggttctgcatccatggactcaatcaactatgaatcaaaaatattttttaaaaaatttaaaaaatacaacatttaa

SEQ ID NO: 196432 - DNA, 575 bp, Homo sapiens
gcctcagcctcccaaagtgctaggattacaggtgtgagtcaccatgcctagtgaaagtcaactcttttatcttcaactctcactgttcataagctgatccagaagcctacaggagaagaaacccacaagttaggggtcagataaatcaaactatttattatctatatatgtttttattacaaaacttaggctatttatcttatatctagctctccttgagattcgactctacattatgtatatgactttattttttccacttctctcatctcacttccccttgtagtcaaaatggtttcttcacagctctcaaacctgcatattctactcctcgtcacttagcttgcactgttccccatccttttttcctcatccccacccatcctttggcagctgggttatgcttgttataaagccatgttatcgtttgggggcgttacatgcagcacgcattttggcatagagcatcactgtccaatttttatcccacactagttgtcgtgttgccagattggtttaaagtctctagatgacaaagatggctcagacgtgcccatcctcccttagtgctaaat

SEQ ID NO: 196433 - DNA, 627 bp, Homo sapiens
tataaaccttcacaacagccctgcaaaatgggtactgcaaactaagatctagaaagattaaatgacttgactaaggtcaaatattaaaaatgcagagataggattcaaaaggcagacaaccaattcaaaacctaggctttagcctgtaccctaagcaataaagacaaaatgagttactataaatgagcagagaataaataccctaacacaatacaaataaaatgctacaagaagattctcaatttaacatttaaaacagaaatctgtattaattcaaatcattacatgtactatgctgactcttagtagtagtatttccgtttatacaataatttggaagatcaagggcataaaattaaacacattccacctcaagaatttgaacaatggaatcacttcatcgttctacaattagacacttggtttttatagaatcaacacttgaagctcccttcttcttttaaaggttcaaaacaaatttagataatttccctctacccaaagaaaaaaggggcaagattaataccaatttacaaatgtaaacaaaataggcatgtattttttcagcatgaaaaaacagtaagtgagaactcaatactaataattccaactttaatgccataatca

SEQ ID NO: 196434 - DNA, 1075 bp, Homo sapiens
ctctctcctctattgcccaggctggagtgcagtggcacaatcttggctcactgcaacctctgtctcccaggttcaagtgattctcatgcctcagcctcccaggtagctgggactacagatgtgcaccacatgtctggctaatttttgtatttttagtagagacagatttcgccatgttggccaggctggtctcaaacccctggcttcatgtgatctgcctgccttggcctcccaaagcgctgggattacaagcatgagccactgcacccagcctagttttattctcacgtagtatatttaattgccataccaagggaatccaagtcccaaaggtcaagttgagaagacaattaccaatatttttatgcaagattcatataacataattattttttggtcaataaacaattgtgagaataaagcttttttaagcttttgatggctattatgttaactgttaatatatgacgggtaatgaagtgtcagaggctcattagatctttgagcctattgctgccagaccctgatgatactgaaatcctatctatcccatcaaaaacaacacataacaattggaactgagaagaaagaaaaaaaaagaaagaaagaaaatattttttcagcttcaatcagggtcatttatggttcctttttctatgattaggactttgggacataaaagattccctgaactataagggtatcagtttaaggaggtatgggagtaagatcctccagataacatattagccaacaataagcattgcatccttttgaagctttgtactaacatcaaaagttttatgattaggagttgagaatttatacagtcttcagaatgtaaaagaaagtgttataaaagctagtagatgttaaaatttattgtaatataagaggagtaatcctgaatgtgggagaaaaaaatagaaaccattagttataataattcattgtgaaggaaatacagtaactctgatacgaaatctgtttcaaaagggggagggttaggtagactagaaaaaaactcagtacttcaaccaaaaggcggcagaaatatcggcattgaaagaggatt

SEQ ID NO: 196435 - DNA, 131 bp, Homo sapiens
atgagtgggttcacatccactttttaatgttgcatcagcctgaagccaggaagtgctagagccgtaagactcctcacactgtgacctggccacatcctacatacatgtcagcttgcacgccatctacttaa

SEQ ID NO: 196436 - DNA, 559 bp, Homo sapiens
tggcctttaaactggttacaaagtatgtccttatataaatattgcttttgttagtgttgctacttcttgcaacatggagttttaaaaaatgttttattttaaaacattatgccctatgtgaaactgcttgctgatttctgtggttgacttctccgtaaacttgaacggagtgattcaaagtacctctagtccagtgctctgtaaatatccattgacaagagcaactgcaactcagctgcaagtcaaaaccaaagattcagcaaatggacagccaagaccacaagaaagaatcagggcctaataaccatttccatgtaacttatggctgccccacgcagcctcaggggcgtgtgattagcgtgaccacgtaatccttaagggtgtggggcacctgaccctggagctgaggcaggacaaaagccccattcagaagagcttaagaacctttcccaggaagccctaaggaccttaggacctatatgtttatacacatataaaaacatgacctatctcacgcacaatcaggaaatgcaaattcaaacaacagcagggggcccat

SEQ ID NO: 196437 - DNA, 151 bp, Homo sapiens
gtgaaggatgtgagttaaaggtaagatatttcaggaagagaaagtatttatgcccaagatagcaaagatcaagtactgcctatttcatctgtaaaatattccattttctatccatttttagaaatctttagctgtaatacctgccattact

SEQ ID NO: 196438 - DNA, 1071 bp, Homo sapiens
gcccgcccccatcttttcatttttatagcttcacctaagttttgaattaaaagaaataaataattaatacccaaaatattgttttatatcaatgaccaacgtaatgaaacactcagcagaaactaaagccctgaagtggttaagaaaaagctacctatcactaaatcaggcatgcttataagcaacctagaagaaaacttttatctgccttgttttggctttcctggcatacttccttacttcatctccattttataattaagttttgggtcacaagtctaaggcaaaggagcttccatactgaaaatctacatttttaatgcttattttatcataaaaataatttgggtaattttctgcaagtgacttctaacttaacagtagaagtttaaaactgttcaaagaccaaagcacaacatttatctagtgtttgatcctagtataaaagaatggcaataattatgtgaacaggaattacatgcccttagaatgtgcattttttaacctattaaatttgccaatcttgcaaactattgtttacttgtattgcataattagatactcatattaacatattgaattcagaaaaagttagcaagccaagatgacattctctgtagcactattttaaattataatgaatgatcacataaaactctttagtatttatctaaagtaattattactctacttcatttgtttatctaaatcagtgatcattgatgtttgaactttttggcttaaatgtttattttgtttatactacttgctagagtaaaataaatttaatacatgaaaaactctacacaatttaaaataggttataatttgtcaatacttatgttttaaaatatttttagaaggaggagtgctgtatattattaaaacaattttctgaaattgtttaatattatctttgattttaaaatgacatatatgtggatttacaatgaatcaaattgtcctaaaagatgtcagataagaaatgcaagtgctttgcaagtctaatacttaatgttcttttatgtacaacaaaaatttaataaattaactttaaagcaaaaaaactga

SEQ ID NO: 196439 - DNA, 335 bp, Homo sapiens
gcggccgcctactactactactgctcgaattcaagcttctaacgatgtacggggacatgaaaaactctacacaatttaaaataggttataatttgtcaatacttatgttttaaaatatttttagaaggaggagtgctgtatattattaaaacaattttctgaaattgtttaatattatctttgattttaaaatgacatatatgtggatttacaatgaatcaaattgtcctaaaagatgtcagataagaaatgcaagtgctttgcaagtctaatacttaatgttcttttatgtacaacaaaaatttaataaattaactttaaagcaaaaaaactga

SEQ ID NO: 196440 - DNA, 625 bp, Homo sapiens
ggtagagatgaagtctctctatgttgcccaggctggtcttgaaatcctgggctccagtgatcctccttcctcagtctcctaaggtgctgggattacaggcatgagccatcattatttaaaaaacaaacaagctatcatttttcagccctaccattgtttcctgacttatgtaatataactaaactgtttttgaagcttaaaatcaactcaagcttaattgagaagatgagctagtttgtttcctcaggtgtgtgtgcgtgcgtgtgtgtgtgtgtgtctggaaagttcttaccctttctcctcaggagtcaggagcctgggaatcaggagcttagggctgggagttctgccagagcaagagcaagatgtggcttgaggcccttcagaagcctccctgactcacagcaagaagcttggggcctcttactgatgggtggatgaggttcttttctgtcttaaaggggcaactcctatgttgtgtttttttttttaagaaaaaaggccaggcactgcgactcacacctgtaatcccatcactttggtaggctgaagcaggcggatcactttaggccaggagttccagaccagcctgggaaacacggggaaatcctttctctacaaaaag

SEQ ID NO: 196441 - DNA, 467 bp, Homo sapiens
tggtttggtagatctgacttgtaagcagttcatagaagctgctcaatactcaagaatcttgcaagacagttattaaacattcatagcttgaaattgcccatggtgggagagtttacatcacaaccactacaaatcagcacttgctttcttcttcttaaagagagctgcttaccatacatagcacccacagtgtctcccttctcttctaccccaacccctgaaacacactgacccctattctccagatgacagcacagctgtttgggactgatagggtcacagttgccaggttgggaatgctagatgtagtcttcacccatcaccttctgtcgtcctcccaggggtgtcatatttacagaggcaaactcttacagcttggatgatttctcatcaagcaactctactcacctctttttcccctttccctgtgcgtttcttcttcttgtcctcattttccttgagaaaac

SEQ ID NO: 196442 - DNA, 518 bp, Homo sapiens
acagccaaaccataccagaggctgaggtgggaggattgcttgaacccaggaggcaaggttgcagtgagccaagatcatgccactgcactccagcctgagtgacagagcgagacccctatctcaaacccccccccaaaaaacagatacaggtggatgattggatgggtcagggatggatgaatggttggatgggtggaaggatggatacagggtgggtggattgttggatagatggtgggataaatattcgggtggtgtatggttggatggatggtaggatggtggatggtggataattggctggatggatagtaggatggatggatgttggatggatggatgaacagtggggtggtagatgggtagataaatggttggatggacagtaggatggtgggtggttggatggatggattgatggatggatggatggatggagggttagatgaatgcatattggctggatgatagaatggtggatggatagatgggtggtaggatggtagatgtttaggtaa

SEQ ID NO: 196443 - DNA, 88 bp, Homo sapiens
gacaatggcactaaaacgaatggcccctgaactctgtcttctaaattatacataagcagagtgcaaatctaggctaggtcccaccatc

SEQ ID NO: 196444 - DNA, 511 bp, Homo sapiens
accctctccctaggtccccattttctgctccatcgtctgcctccccagtccctggagttcactctactgttccaccagctccatgattcctgctgacacctggcattgcctcttcaccttgtcctggtctcatatatggtttaactcttacccatttctttttctgaaaaaaaagttcaatgccactgtctttgtcctgcagcaggggtttggcaagagtgttgagatctgatggccattaagttcataagatgtggggctccttaagactggagcagtgctaaggagaacttagaagtcttagaggcattcaatgcacggttggctggatttttcttcagagccttcagagagggttacaaagaaaccctccctccttcacctcctttgagttctgtgataacttgagaagtaaagaaatgaatttgtatctcatttggaatggaagacacattgtaatttttttttctggaagaagaataaatattgaaactattggttctcaaaggaa

SEQ ID NO: 196445 - DNA, 389 bp, Homo sapiens
  misc_feature (368)..(368): n is a, c, g, or t
atgggcgaccatttcaattcaaccagagatccaacacactttcgaataaagagagaaaaaatgtattaactgacttaacaaaaacgctatttatttaactcacgcagtattgcttaaagagtatctacaaaattcttacctcaatgttttcttgcaagagacgtggaaaccaaaagtaaacagaccctctttaacaatgaaccactgataaacataaaatatttataactggtataacatttcacttaggtgcattttttgagtgttaacttgcatcaggcaatccaatttaccaacatttatcagatttctccccagtgagagttttcacttaacttttttttttttttttttttgggaaggggccncaacccgggggaaccgggagc

SEQ ID NO: 196446 - DNA, 194 bp, Homo sapiens
ttctctttccaaggctttaatttcctgcctgttgtctgagctgggcattaaggaggttgatcagggagcactgtcatctagttgaaatgagagatgctgcagttacgtctgaatcctgaatgttttggcggaagacccagcctggctcaaggccactgcagcagtgggacctttcagagcttccaggaggctca

SEQ ID NO: 196447 - DNA, 598 bp, Homo sapiens
ttggatgttgaagtcaccaactattattgtattggagtctatttagatctaataatatttgctttttattatctggaggctccagtgttgggtacatatatatttagaactgttatattgatccccttatcattatagaatgaccttctttacagtttttgacttaaagtctgtgttatctcatgtaagtatagcttctcctgcttggtttgggttcttatttgcaggaatttttttccatcccttcacttttagtctatgtgtgtctttataagtgaagtaagtttcttataggcagcaaatagtgatgctttttaatttagccagccagtttagtgaggagtttaatccatttacattcaaggttattattgatggctaaggacttatttctgccattttattaattgttttctggttgttttatatatccttttttccttacttcctcttttaagttttatcattgcagtttgatggttttctgaagtggtaatgtttgaattctttctctttcccatttgtgtatctgttctactagtgagttttatactgtcttgtgttttcatgatggtatatattgttctttcacttccat

SEQ ID NO: 196448 - DNA, 278 bp, Homo sapiens
aaaaattggctaggcatggtggcgtatgcttgtagtctcagctacttgggagcctgacgtgggagaattacttgaacccaggaggtggaggttgcagtgagccgaaattgcaccactgccctccagcctgggtaacagagtgagaccctgtctcaaaaaaaaaaaaaaaaaaaattataaacttttatcttcaaaagcaaaagcattgtttactgtttcagtcagagagaaatgatgcgtaattaaaatccatttgggatgaacagagaatgtttgca

SEQ ID NO: 196449 - DNA, 394 bp, Homo sapiens
gtgagaactgggctgagccatgccagtggcctgtgaccctccagccctggatgccaccccccacctgcccaaggggacccccactgatgtggtctctgctgacacctgtgcctgtgcctggggtccctgtcatccttccctggtctgagtggcaagtctcctgccatccctgtccccgctatgcggtgagctcttcagcttgggcccgcctggtggctcacgctactctccaccgtgcctggattagggcgagtgctgaggctggagctgaccctgccctggccttcagggtcttggcttagttccacctgcactggtccaagtccagcctggttgcctagtgaaggatccacagtgggtacataaagggccaagcgctgtccacgtggacaca

SEQ ID NO: 196450 - DNA, 240 bp, Homo sapiens
tgagttgtagtgagttaagatgtactgtctgatgagctgtagtgggttgagatgtactctctgatgggttgcagtgagttgagatgccctgccctacctatgcatgcctggtggttcccaaatctctgttttgattcgcactttttgggactaaccagccatgcaagttcggactaaccagccatgcaagttcggactaaccagccatgcaagttcggactaaccagccatgcaagctcg

SEQ ID NO: 196451 - DNA, 1156 bp, Homo sapiens
agcggggtgttcagaggaggagagaaagagatgaagaggagtgagccaggtttcaggagggggcacgcaggagaccagccctggattcagacttgagcctggtccacaccagaggccgatagaaggcttggattacagcaggggcaggttctttcacgaaatcaaatttctccactgatttctgaattcatagcaagctaactagaagagatttttaattcagaatgctgcactccaaaaaactgagaaagacattgagggagggaatatggaaatttgatggtatctcggctaagtttgatattgagatttttgtaataaatgttgttgaataaaaaaggcatcaagatgcctaaatcagagagataaaatgaagaataattacagtatacaatttttgaattattgtccaatcaactaaaattagaagtttttaacatgctaaaatggaaagttattcaacagaatggaatcctttaaaatatgatggaactgccacttaagcatcagaagtctgctcaggtgtgaccctgggagcccaaacttttcacggaacagcaaggaacatccctgtgctcctccttcccagtctctttttttttcagagggagtctcgctctgttgcccaggctggagtgcagtggcgagatctcagctcactgcaaagctccgtctcccgggttcacgccattctcctgcctcagcctgccgagtagctgggacaacaggcgccagcaccatgcccaggcatacaaaacctgccttgcctctccccagtttgaacagtgcttttgaactttgatggaaaagccacatttggaaggtaaattcttacagggaagagattttttttcttttgtctctagttcatggtaccttggatagatgtgtgttcactgcagagtcctacaaagtatgctctaatgttcaaaggcagggtagtaggttctagtaacagcgtgggatttgcacatgctttgttgactttttattatgcaacagcaccttttaagtcatgtgctaatctagcacattcagttgtcctatatgagagtgtgattgttcctaaaatattcaccaatcatttgttctaagtgctaggctcttctgtagtattttcagatcttccttattaaaatttgggagctaaaaaaca

SEQ ID NO: 196452 - DNA, 250 bp, Homo sapiens
gggtgggaacttaagggggttcatagcttagggcgcatagctctggataatccagcaatggtttgtaatcctggagtcgtttactccatctttttaggcctatccctcagccaaggaaagagactgtgagaacagcctcttgccacagttcccctggtatgttgtgctcagggggactgcaaaggccaatgttggtgctggcaaaaagccgaaggagtaaaggtgctgcaatgatgaactgcttgggctg

SEQ ID NO: 196453 - DNA, 268 bp, Homo sapiens
cttttgtggtataagttgcttctggatagatttagtggtgttgtattgataatttcatttactcatgtgcattctctaacagattgtaacttccatgaaggcagagctgaaacctttctagctttaatgtaggctagaaggtatagggcctcacatgtagtatgtgctttaatattactgcaaggataaatgagttccaaaacccaaccagatgacagctgagacttgacaagcctcagaaaatctgagaaatattttctcttctttg

SEQ ID NO: 196454 - DNA, 522 bp, Homo sapiens
gctcggtacccggatggcgaccatttcaagcttctaaaagtgagattaatgagtcagaaggtatgaatataaggctttttgtcaaattgatttcctagagggtgattcattatactttttcaccggcattgaggtcaagtgtcctgggagtaggactgttgaaaatgtaaaaagtcacttcagttctggaatttatcttgctttgctttgttttgttacacttttttgccctctcctgatgctcacctggggtcacacattgcctctggttgtcatatgtctttcatctctttcaatctagagcagtggttctcaattagggagtggatattgtctcctagaggtcatttggaaatgtctggagatagttttgattgtcagaatcaagggggtggctactggcatctagtgagtagaggccaaacatgctgctaaacttctcacagtacgtagggtggtcccttgcagcataaacgtgtctggcccaagatctcagcagttgaaatggtcgccaatctagaa

SEQ ID NO: 196455 - DNA, 502 bp, Homo sapiens
agtccaccactggcgtgggtgagcagccaggtaatgggaattgatcagtgccaccacccttgaccccaactaccatcccagatgcccagattccagtcctggagttttattctctcagcttgatcctttgaccaagaagatccagtcccaatatgtcacctgtgcttcatctttggactatatctcaggtgtttacgtgtcaactaatgggagcttactgggttagaagtcaggacactgagtttcaatcctcacttagtagtctgtggccctctttggcacattaacctccctccttgatcctcaggctgcacctctggcaaatgggagaatgcggctccttttgacttcaagggatctttgtgggaaccaatgagaaaatgtgtgtgaagatagctttttggtatattttaaaagtgcacaaatttaagatcttactgctttataaagtgctttatgaattataggaaaataaacacattttagatcttagaaaaaaaca

SEQ ID NO: 196456 - DNA, 190 bp, Homo sapiens
taaagcagagtcaggtgctgggaaaatgctggactcttgtcggccattaaccgactgaccatgtgaccttcagtaggttattctctctttagacttccctagcttgtctttagtgagagctaatggttttcaaactgtattccttggtgccccatcagatgtcactgtggaagttaggaggaggccagag

SEQ ID NO: 196457 - DNA, 279 bp, Homo sapiens
gggtcggccaatgttgacatgagatcccagtaaaaaagtgggataggggaaataaagagtacagtgggctgggcgcggttctttaatattttcagggacttttctttcttcccagaatgaagtgtaacttccctcggttagctcaaaggtctctacaataagtatatgctactgtctatcctcatatgttaacaaattttatgcttttgctattccagaatcgtcatcaatcctggactcattctgtggaagagatgtttccactctgatgtttctttg

SEQ ID NO: 196458 - DNA, 739 bp, Homo sapiens
tgatttttttaaaagaaatttcccaaaatcttgatgccagtgggttctctagaaatgataattttgctgaccatttttctcagtgctcttggcttcatccagtctagatagggggaaacactgatttctgattcttgagttctagacagttatatcttcttgaaaggggcagagttaaagatggaaggattggtatcttgtaaatatattcagacactcatatgggaaggaaagggactgtccattttaataatggagacatagacaggtttatggttcagctttcaaaatcagtctgagaaaagttaagcctaaagttttcttccctttactgtcattaattctgtggaatatctggaacagtacttttgggtgagttggagaaagctacacgctctggaacgatgccaacagggaggcactcagatgatttagcaaggtaaaggcctttgatcaaagaaaaaaggaatgcctttatccttggacacagtcaaatggattccataacaactcccacccactatcgcagcctggcacccttgtgcagtgtacatactgcacaaccaatcatggttgactgtgttactagatattctgaaacttagctctctgacatcttgaccagtcctacccaaggcacaaagccaagaaagaaatgatcagaagagattcccaggggccaaaatggatataactacatgtgtactctcagctcatttactttgcttgaaaaagaatc

SEQ ID NO: 196459 - DNA, 392 bp, Homo sapiens
aataacaccgattcgtattgatgtatgtattatcatttgtcattttctgtgagacttgattttcatatcttttgcacattttttagtgagttttgttactgtattaagatctctgtcttttctactatggcatttgtgttacctgtcttgtttgagaaggcctccctcacactgagattttgttaagttagatttttaattcatatggaatttattcttttatggtttccagatggagtccatattgagattgtgttacagctattaagaagcactcacccttcttttaagctttcatctggaaatagatatgtgattagtgaaaatgcaagttgtagatttatccctgtagttaaacacaattggcatatgtgcacaaagaggaagggggt

SEQ ID NO: 196460 - DNA, 403 bp, Homo sapiens
aataacaccgattcgtattgatgtatgtattatcatttgtcattttctgtgagacttgattttcatatcttttgcacattttttagtgagttttgttactgtattaagatctctgtcttttctactatggcatttgtgttacctgtcttgtttgagaaggcctccctcacactgagattttgttaagttagatttttaattcatatgtgctcttgtgttgtgattagggtggatagagtatatgatccatttattaggagcactgatagaaggatgattgccagtgttacttcatatgaaattgtttgggctactgctcgtagggccccgatgagtgcgtattttgagttagatgctcatcctgatcataggatagaatagactgctaggctatacatcatta

SEQ ID NO: 196461 - DNA, 197 bp, Homo sapiens
aaggacatgcaccccctcaaatccgcttcccccacccccttcaatactgagaagaccacggaaacaaatcacttcgaccacttagaaagcgatcaaacctttataaaaatccatcgctcccaaatcgatgggtgaatatttgctgggaatttgttccagaggaataaatgaggagccttgagtgtattaaatgcaaa

SEQ ID NO: 196462 - DNA, 281 bp, Homo sapiens
tcggttaggaccggaaggtagctgtactgttagttagaaagccggggactagagcctcctcagtgtaattgcctgccacttaattattctcacactccacaggggactgattttcccctgcatttttcacatgcgttccaagcggggtctcaagtgtacctcccagccccattcctccagcctaactctggcctgcagttagatttaaactgcaaataaactaaaatactaaatttctagttccttctgacatttccagtacagctacctttccggtcatt

SEQ ID NO: 196463 - DNA, 1060 bp, Homo sapiens
  misc_feature (760)..(760): n is a, c, g, or t
  misc_feature (772)..(773): n is a, c, g, or t
  misc_feature (777)..(777): n is a, c, g, or t
ggagagagagagggcagcaggagcctgggactcgggagcgggacccggacaaagccacccgcttccggatggaggagctgagactgaccagcaccacgtttgcgctgacgggagactcagcacacaaccaagccatggtccactggtctggccacaacagcagcgtgattctcattttgacaaagctctatgactataacctggggagcatcacagagagctcgctttggaggtcaaccgattatggaacaacctatgagaagctgaatgataaagttggtttgaaaaccattttgagctatctctatgtgtgtcctaccaacaagcgtaagataatgttactcacagacccggagattgagagcagtttattgatcagctcagatgaaggggcaacttatcaaaagtaccggctgaacttctacattcaaagcttgctttttcaccccaaacaagaagactggattctggcatacagtcaagaccaaaagttatacagctctgctgaatttgggagaagatggcagcttatccaagaaggggttgtaccaaacaggttctactggtctgtgatggggtcaaataaagaaccagaccttgtgcatcttgaggccagaactgtggatggtcattcacattatctaacttgccgaatgcagaactgtacagaggccaacaggaatcagccttttccagggctacattgacccagactctttgattgttcacggatccttatgtgtttgttcagtgacatcangagggcggcacnntacntagtgtctacgaaggaatgactggctcactgaaggttccgaaaatgctgtgccacggcattgcgtgtacaagaccgatgctactcccggtgcgcagagggtgcccaaacagtggacccgaagcgcaagcaacaacccttactcgtcaaccacggggggcacctaaccccggtcttgagaagctccacaaaggcgtgggcaaccagcggcccataggaggagaagcgacgtgtgcacaagtcgccagggcacaaacacaacgcagcaggcgcacatgagcacag

SEQ ID NO: 196464 - DNA, 448 bp, Homo sapiens
tgaaaacacagccattctggaaaaccatttggaagtttctttaaaacaaaaacaaaaacaaaaactgaatatgcacctattataagaatctgggtaaagggcacgtgggatctctctgtattacaggctgagtaacccttttccaaaatgtccaaaatgctttagatcagaagtgtttcagattttgaattttttcattttgaaatatttgcattataccatttgagcataccgaattcaaaaatccagaatctgaaacgctccagtgagcatttcctttgagaatcatgttggcactaaaaaaattttgaatctcagagcattttgtacttcaaattttcagatctgggatgctcaacctgtatttctgataacgacatgtgaatccaaaattatctcaaaataaaaagtttagttaaaaaaaattttaaacaacaacaacaacagc

SEQ ID NO: 196465 - DNA, 290 bp, Homo sapiens
gctgccctttctctgcatggcccggcccagcccgggaaggaggaagggaggaagggagggatgctggagctgccatcttggctcccggggacttggtgtccatgctgtaacacatctgtcactgcgtgggtgtggatgaggctgccacatgctgtgccctttcctgatgcagcttgtgatgcgtgagatgctggaaatgtatttaactcgcagcacaggtgtctctgatgttttcttcaccccaccccaccccccgactcactaataaaaacagctccgcacctggccca

SEQ ID NO: 196466 - DNA, 357 bp, Homo sapiens
agcatggtatgcgacctttcaaccactggaaggggcattgtgaagtttgcatatagtatgccagtcatcaccaattatggggcctgactaagccttttgattccaggcaggcacaactaaacagaccagtcctcggggacacaaagacaagactggccctgcaggaaaaacaaagatcaaacaaatcctggccaagccacagccacactgaacggcttgcttatctctgcaggaaagagtgtgtgtgtgtggtgtagcaattgaactcaatttctacattgaattctccatttacaataggggcatcaaggtttctattaccctacattctatagaccataatccaggaaggtatac

SEQ ID NO: 196467 - DNA, 639 bp, Homo sapiens
agtctagaagtactagtggagaagaagggcatgtagacttttcacttctttaggagtgaatggccctgacatgattcggttgggaaggaagtaggaatcttaaggaaaacaaatgattcaattaagatgaagagaataaaatggtcaaatattaaaaaagaatttgttttgggggccatagtgattaggcttgcagaaaatgccaacaggttggcagaaggttagagctgtgctgaaagggatgagatcacgagacaacagccatgaagaaagggtagtaagtgattatgtacctcaggactgaagggacaagaggtcaggaggcactctgtaggggcctagatgtctacagggatatgtttaaagggggtgttgtatagatagaaaagtactttgtttccaggttccaaatataatgttattatgttggtagaagcatctccaaaactctggccctagaaattaggtcctaagtaagctttaaaagtggtactcccagtcttgggagattcacgttaaaattaaactataaaaaaactaagagaattcagaaaattatttgaatgaagaagtgctttataagtatgacaaaaagttagaattcttaaaagatttttaaattaaattgaaaacaatttc

SEQ ID NO: 196468 - DNA, 608 bp, Homo sapiens
aatttgtgagaaatataggcagtgttccacaagaaaagaggttaaactttggtcttatgtagaaatttggaatggcttataatcttgaggtatgtattttttgggaagaactatgtagaagtgtaattctttacaatagaaatatgtccttcctatgtattcacgaacacatagaatttatatattgggattagcttactaggtatcgacaagtaataagatgtattaaatgccattagggcagggcttaaaacagtttatgaaggggagaattaactttgctgtaaatatcttctgtgactgaaaaagttgaactcttgcttttttcagagtttgatttttgttagaataaatttcatttcctctacatgtgtggtcacagtccactaatacttgtcatcgaatacttgtcatagttttgttgcccagtgggttctttatgcatgtaacaattcattatactttctgaagcatggtgtacagtcactttggaaactgattcctaaggaatattctagccaaatcatgtatctgtggtttagtttttctacagtagggctgtgcggttgctgcctgctttatagggcatgtgggtttatatggtatct

SEQ ID NO: 196469 - DNA, 705 bp, Homo sapiens
gtaaccccacacccaaagagctcagagacgtggaaatctgattacagacctccgggaaactcagagacttcacaatcagggataaagatccaccaatttctcagagaactcacaaactgggacaaaaatggaccaacagttcagagacctcacaacctcttctcagaccaccagacagcccagagacctcgcaccacggacacaatgctagagagccctaaaatcacttatgctggaacacaggcccgaaaactactcagaggctcacaccctggacacagattcctgttcagagatgtcatatactggacatagagttccccaaaatagctcacagcctttatacaccgagacagatccccaaacagctcagaggccccacagacctgaaagtgtggacataaaccctctatagagcttaaagacttcacaccctatgacaaaaaccctgaggaactgagatcacaccccctggacacggaccccaaacagcttagaaacctcatatcctaggctcagacccccaaacagttcggagtcttcccactctaaacgcagacctctaaatgcttaaggaatatcacatcctggactcagtcctcaaaaccattcatggaacttgccctttgtccttatccggaaagatttcagatggctgatagtcatggacacagatcaccaaacagctttgaaacctttgtgcaa

SEQ ID NO: 196470 - DNA, 333 bp, Homo sapiens
actacggttgcacaccaccacacccagctaatttttttattttttgtagagacagggttttgccatgtgccccagactggtcttcaattcctagctcaagcaatcctccctcctcgaccttcagaagtgctgggattacgggcgtgaaccaccacgcctagctaccaccttttttcttaattggggtactagggtctctagtataacatgatccagaagtaatctttgccttattcctgagtagagcacacacgctctctctctgtctctccatctctgtgtgtgtgtgtgtgtgtgtgtgtgtgtgtatctctttgtgtgtgtgtgtgtgtt

SEQ ID NO: 196471 - DNA, 344 bp, Homo sapiens
gtgactggcttctttccctcagcgaactgatttttaataatagtgagcacagatagttcagtgtttttatcataagctaagcagtttacattaattcattgaaatagtaccttgtgaagtagatactcttattacctccatttacagataaattgaaggcacagacaagtttaagtaacttgccaaatgtcactgaggtagaaagcaactgagccaggcttcaaatcaaacctgtattagtgattacccaatgttgcctcccaaattgtagctcttggctgggcgcagtggctcacgcgtgtaatcctagcactttcggaggccaaggcaggtggatcacctga

SEQ ID NO: 196472 - DNA, 412 bp, Homo sapiens
caccataatgatttggaagttcctgttgtcagcattaccagcaattgatactgtcattgtgttggattttagccattctcttaggtgtgtagtggtatctcattattttaacttgcagttgcctattggcaaatgctgttgagcatcttttcatatgcttatttgccatctgtatagcttctttggtgaattgtgtttgtgacttcctgacatacaattcctaaaatccttagaatctgcaaagtgttgcctttttgtatgctaatgaggtgactgatggctggcagcctctaggtagcttcaggatgggggctggtgacctgaaagaccaaggcaggattagaggtttgcaactttaagcccatcccccagcctttggggaggggagagaggctgaagattaggttgatca

SEQ ID NO: 196473 - DNA, 328 bp, Homo sapiens
aagaaatgaaaacagcttgattgacagcctagtaacattaataaacttcgaaggtagagagctgctcttactttaaacatcccagagcaattctatcagaagaataaatactctgtattccaaattcaaacactttcagttgcctttggttgaggcaattgtattctaacagcaacatggcagctttaacaaggtatttacatttctatgtaaaatctcaatattccctaactctgattctatcccctctttcctttgagggtgctttatttgacacagtgtggtattggatcctgtaggtacccatatcccctggcctctttaccat

SEQ ID NO: 196474 - DNA, 462 bp, Homo sapiens
ggaaacaacagagtgaaaaggcaacttatgaaatagaaaaaatatttgcaaaacatacgtataattaatatccagaatatataaaaaaaaactcctacaactcaacaaaaaacaaatagctcgattaaaaaatgatcaaaggatttgaatagacatttagccaaaaatgattaacaagcatatgaaaagatactcaacatcactaatcattaaagaaatgcaaatcaaaaccaaaatgagatatcacctcacatctattaagatggccactatcaaaaagacataaaacaaatgttggtaaggttgtggagaaaatggagcccttgcgtattgatgatgggaatgtaaaatggtgcagctgctgtggaaaacagtatggagattactcaaaaaattaaaaatttaccatatgatccagcaatcccacttttgattatatacaaaagaaatgaagaaggatct

SEQ ID NO: 196475 - DNA, 528 bp, Homo sapiens
atcaaagatatgcaaattaaaccactcaagccccccaaatgcaatataaggcaataatataccattttatagttataaattagccccccaaatggagttaataaatcaaatgctggtaggactgtagacaagtgagaacatttgtaaacggctagtgacattaaaatctggtgcaatatttgggtaaaatatttagcaaaacacatcaagacctataaagatatctgtactctataacctagtaatcccactgttgggacttcatcctaaaagaaggaacagaaatctgcagtcccaccattgctgagtcagcagtacctaaggcctgtgactgttaatacctccagtgcgtgggtgacatctctacagtcaattaatgagccagtcttcataagatattacattagccagcctggctaacatcaattacagtcagaagctgagctgtaatcatggggcgaataagactgagctgctcattgtttaaaatgaccacagaatgaaatcacctttatgagcacaactggg

SEQ ID NO: 196476 - DNA, 404 bp, Homo sapiens
aactgggtctattctgtgcccctaactttattctttattatcctttttctcttgtgcagacaatggactgggctgccgttcatgccccactgccactttgttgtttttgcctccaattataccaaagattatgatcatgtgatctccaagtaccatcttagatatttgcatatcttaggtaataactttggaaaggggtttcacagtaccttatgtctaaaaattagctaaaatttaataagttggcacctataattatacaacgtgtaccttttctccctaaaagtttagccctacctcttaatgcttattacatttattttaaatagtatgtctctatcttaactatagggaaagtcagatggtctcacttgagggaaggtagcatgtgctaaccacttttg

SEQ ID NO: 196477 - DNA, 574 bp, Homo sapiens
aaacatggaagcatataattattatattaatagtattctgttgcaggtgtccagaattcaatagcaacaaaggggcattgggtgctgaagactctcatccagatggtcggcttgctggcgcctcctagctggatttatcaagggtatcccttcccacacacgtggcctttctagaatctgctgtgaacagcaggacctgcagagacaccccagggaaaggcttatggtaatcactgagggactgctggcaaccagaggcctcctcatcccctttggttgtttgcatgtgatttgatgccggagtcgccactcatccccagggggtgtgtgtgcatatgtgtatgtgtatgtgtatgtgtctgtgtatgcgtatgcgtatgtgtatgcgtatgtgtatgtgtatgtgtctgtgtgtgcgtatgtgtgagcatgcatggtcagactgaccttggaccaatttgggtgttttatttcattttttttttagatggagtctcgctctgttgcccaggctggagtgcaacggcgccatcttggctcactgcaacctccgcctcccgggttcaagtgattc

SEQ ID NO: 196478 - DNA, 485 bp, Homo sapiens
aattctagcactttggaaggctgatgtgggtggctcacctaaggtcaggagttcgagaccagcctggccaacatggtgaaatcccgtctctactaaaaatacaaaaattggctgggcgtggtggcaggtgcctgtagtcccaggtgctagggaggctgaggcaggagaatttcttgaacccaagaggtggaggttacggtgggctgagattgtgccattgcactccagcctgggtgacaagagcaaaactccgtctcaaaaaaaaaaaaatgctacatggccttgggcaagtcacaccaattcttaggcatggttttatcatttgtgcaattaagatacactcccccactgggtccctgaaaggattaagtgaaaggataggtataaaagtgcttggcaccttgtcagtgcttagtcattgatttcctcttatgtcttgcaataaatgttattgaataaacggtaatttaccaataatatatcta

SEQ ID NO: 196479 - DNA, 282 bp, Homo sapiens
tcactcaattgctcaagtcaaaaagcctggcaattatcccacgttctcttttttcctcacctgcaatatccaatccatcagcagagtcaataaatcttgaatgcgaccacttctcgccaccaccactgctgctaccctgccctcatctctcagctggactcctgaactggtcctcttgctgctggactgtttccatctgaccccacagtgctctccttaacaaccagaggaaaaggcaaatccgattacatcagtgccctcggaccagccagccaagattgg

SEQ ID NO: 196480 - DNA, 347 bp, Homo sapiens
attttcatctcctatcttccagctctgccatccactgtgtcaagctcaccctgcagctagatctcctcatgggcatagaatggctgccaggagcagcctggatcattgcatcctcattcacatctggcagaagagtaaaagctaccagcaaaccattttttgtgtgtcattaatctgaatcctgtcacctgcccattctcttatcaatcacgactaaggaaaggatttagattatttgcttggattaatcaggggcacccatagacctggcatagaatggatgttggggagacaatcacaattttcattataattagaattgcttaaggagttcaagatcagcctgg

SEQ ID NO: 196481 - DNA, 168 bp, Homo sapiens
ccttgctgttctcgtgatagtaagcgagttctcacgagatctgatggtttaaaagtgtgtgtcaattgcttcttttctacccatccccatccttccgctgtgtgagatgttcctcgcttcctcttcgtcttccaccatgattgtaagtttcctgaggtctccttcccc

SEQ ID NO: 196482 - DNA, 517 bp, Homo sapiens
gataatattagggaatttcccaaacctggagaaaaatattaacatcgatattcaataaggttataatcaaactcccaaaggtcaaagataaagaaagaacctcaaaagcaacgagagcaaaaacaaataacttataatggagttccaatacgtttggcagcagacttctcaatggaaaccttacaggccaggagagagtggcacgacatatttaaagtgctgaaggaaaagacctttacccaagaatagtatatccagtgaaaatgtccttcaaacgtgatggagaaataaagacttgctgacaaacaaaagctgaaggatttcatcaacactagacctgtccaataagaagtgctaaagggagttctttaatcagaaaaaaatagatgttggtgagcaagaggaaatcatctgaaggtacaaaacctgctggtaatagtaagtacacagaagaacacattgagtattataacactgtaattgtggtatgtaaactacacttgtcttaagcacaaag

SEQ ID NO: 196483 - DNA, 243 bp, Homo sapiens
taaaatcagcagcacatgaatttttgtaggtggctcgtatttgctattaatattgctcagaagactcaggaataagaaataataatgcagggtttcttcaaaatatggttctggacagtggattatagttacctggagagcttgtgttaaaatatctgaggatgattccaagtaccagggcttatacacaggaatacttgagaaccactgcactcaagcatttaaaattttccttttacctaa

SEQ ID NO: 196484 - DNA, 539 bp, Homo sapiens
gagctgttactgcgcgtttctggcttggaaagcttccctgaggctgctcaacaaatctgcagccaccctgtaccaggaagcttgggataatggacaataattttaggtaaatagatagaataaaagacctttcatttatataactatgaggcctgctgtgttatgttatgatttctgaaactcagcaaaaaatgtttatctggcaggcagctttccctgtagaaagattagtctaaaatctgaaattccacagtctggaattcagggactctcaaacaaaattctgaacacacagttacctgtcaattaaattaagtatgaccatcacatttcaccatgagttaggggttcttattttggggatcatctttaaaaccatatccaataatttcagaactagtttctgttgcttattttcataggacttatgaaacataatatctaagaccaacttattggatggtttggaaaatattgggacatttcatatcctggccttcttctgagtctttttttgatgttactgcgtgcatacactt

SEQ ID NO: 196485 - DNA, 545 bp, Homo sapiens
  misc_feature (451)..(451): n is a, c, g, or t
ttatttatctgcttttaaaaagtctaactttaaatgcattttcatgtaccgactgggaaaaagaagggtgctacatcaaaatttcaatgaacttaaccactcgtccatattttaaattttaatatacaagaaggagaaactatgttcaattttccctgtacagttgagattttagcatttgtagactagaggtgaatatggaaaagataaataagttcaaattgcaagtccagtttaaatactatgttatcttttatttaaaacagttttaatgagagagagagagtaaatagctaatacggtagtttcacaggaaagagccattggttgaaaacgctcatttattttataaaaagtaggaagaaaaaaaaagtcccatgttaattttaaaataaatatttcagctttggctcttaatattttgtttaaaataaactaaatgtaattttcncctgagtgctgcataaagtattaatgcaacgttttggcacaggctaaaatgtaaaagcaatcacatctgtcttttcgggactgtgcaatcgttt

SEQ ID NO: 196486 - DNA, 443 bp, Homo sapiens
tccagcccagcttcaagtcctctattctgccctgccctaatcctgggcttccggagccttctttcaggacccaaaccctccatactccttccatctcagccccaacatagacccttcttccaccagcctcactcctcttcccatctgctcacttcttctcctctgatggtcccatccccaggaagtcccccatgaccccaaagagggttacaccacgtatattcccccagctctcactctcttccccaatgatgaaacaccattataatggaaagatcaattgcatcttaaggactgggtatctgccttcccgactagatctcaggctctaggagggtaagggcaggtcactatgcctgctttcttcaacactgccacccagcacttgtttaatgtctggttcttgatacatatttgttgagtaaataaatgactgtcattta

SEQ ID NO: 196487 - DNA, 621 bp, Homo sapiens
tctgtataaacaatgtgatgccagctgagcacctgattttcttctgaaagtcaggaattcggattgtggtcagtcacgcaagctcaatatgcccatgtggccaacccacaatccaaccccgaactcccaggctccgatgagcagcgctgatagatggtgttccgcacacccttgcaacgcatcactggagaggcaaacatgcccgtgtggctctcctgggagggagttttgggagcctgcactgtcttcctccagactccaacctgtgcaccttttccctttgctggcttagctctatgtcttttcactgtaatgaattctacctgtgagtaaaacctcatgctgagccctgtgaatcctagcaaatcaccaagtctgtagttggtcttaaggaccccagtgaagttggtgtcagaagtggggttggctaacatgactctgcctcactgaaatacgatgaaagctttctttgggaaaatgaaggatgaagaggtgaagatgagatgttagctcctgagtcttccacagcatgaaatgcagctgagctgccaaatgccgtgaaaggtaaaagtcatctatggagtttagaaatgatagtccaagcccaggagagctgggatg

SEQ ID NO: 196488 - DNA, 277 bp, Homo sapiens
cctctttctccagcatccatccattcagttaccaccctagctaagcacccattagctcttgcctcggttaccctaaaaaccttctagctggtccctatttctattctgccaaattcccactcccccggttctattcttcacaagtagttctcatgattctcttaaattctaacaggctatgtaacttctttactcaaaatttcccgtggttcctcatcaactgaaataaaacccagtatctttccatagcctacaaagttgtgacctaggtcctccc

SEQ ID NO: 196489 - DNA, 446 bp, Homo sapiens
gtctcatgagatctgatggttttataaatgggagtatcccagcacacgctctcttgcctgctgccatgaaagacgtgagtttgctcctcattcaccttctgccatgattgtgaggcctccccagccatgtagaactgcgagtcaataaaaattctttcctttataaattactcagtctcaggtatgcctttattagcagtgtgagaacagaggaatacaccatttttctttaaggatcaagtatttccaatgggagaaaatagagaagcattttctagagtcaaggaaagcatagtgcataagttaattaacctccctggcattcagaatttgttccttggggagctcaaacctaattctgtttgtgccaacctagagttggtgtggaatttattcttcccatatcctacacagaagcagcaagaacatggttataaatagtgtac

SEQ ID NO: 196490 - DNA, 833 bp, Homo sapiens
attttctggcaatatgtgacacactgtattctggtttctgaagatagggaggaaatgagttacaaaaggtccctttcctactgcttactttctcctgctgagagatcaacaacaacaacaaaaagtaaacatagacatcaacagttcagaaaactttcaatgctgacatgccccaaagacagtaaaacataggtaatgtaatagagggtgatgagaaattactttaataggggaagtcagggaagacgttgctaaggagttcacatccaaatgatgagaagccatgcacagacctggggaataactttttagacggcagtaagtacatagtccttgaaggaatgaggaactgtaccaaatgaaacagaggcatcacacatactgaggagtaaaacatgactagtaaattttgaaataaaaagttatgcatttttatagcgatgggattggatacggataaaatttcagaaaatctatcaaagaaagaaagaacaacagttgggtggtagatctgagctaacgtacagctcaacaacatgacagtatctcggttggttgctcaacatttaccaaaaagaagacttaatgttcatagactaaaactatttgaacccatttggttgataaatcctagaaatgaaaaaagaggtacagagaaagtgaatctagactactgtttctcaacatgagaacgaataaaataaattagtgtaaaagaggttagccttactccatatatattaccatgaaagtccctaaaaactgatcatgagagcttccgcaactttatcagttttcccatggttaacatatttattgcattttcctgaagc

SEQ ID NO: 196491 - DNA, 347 bp, Homo sapiens
  misc_feature (135)..(135): n is a, c, g, or t
  misc_feature (170)..(170): n is a, c, g, or t
tgaatgaatcacttctccaagatcatcctgtcggtcatatgggtgagagtctcccactaatagtactagcatttgagctagttcgagggcgaaatgtactccagttatcaaagtcatcattgctgtgagagccanggcttgcaggccatttggaaaactgtgatccaggnctgtccccagcaccctcctgggtctagccagggaaattaacatcaatgggaaaggtagggaagggtaataataggaaccccagagaggttgaggggaagctgaaataaaggaacttgtagcctacttcttttttgaagtgttgaaggaaactgacccatagagcattctggagccaa

SEQ ID NO: 196492 - DNA, 381 bp, Homo sapiens
ctggtatttacatgttcatcccattcatttaaaaactatgtattaataatagtctgggtatagtcataaggtatatcattttttaaaaacccatttaaactgtctgtctttaaactcattaggctgaaagtcacttataatcagcaacatcaaatgacatatttaagccaaaataagtactatgatagaattagtacactgtatgtgttacgcatttgtgaacttaaaattattgtttttattgatatagttatttataaagtcgacacactagtctcccaatccgcacatcaaaatacatcttaggcattctgttgatatactgaacaaaactctgagaaaaagaaggaaagaaaatataataaaaatgttcagacactt

SEQ ID NO: 196493 - DNA, 528 bp, Homo sapiens
aaatcaaaactaaaccaccatcgaaacccaaattcacaccttcaaagtcaagcatctaataattaacagcataccgaagtttacacacacgttaaaaacaagtaaatctggcatatgccacagcaaaatacaggcctccattatgaggagtactgagaagcacattcgcatccttccttttctggtgcaccacaggctctccctccagtggagacttgtcgtttcatctactttcattacatgtatttcaattgcaaagaggctctgatcaagcaaagcccatccttacaaaattggaatccacatgcaaaccaaatagttctttttccagctcacaccatgtcatgtgattacatcaacacatagcaaaaaactgggtattatattttccaaattgtcagatgatcccaaacaaaaaaatccaaacccctaaaatcaatggcagtcccttaaatatcactgtgacaagaacacttaacagtaatatacagaatcatccatcctactataccatccacagtccaacac

SEQ ID NO: 196494 - DNA, 509 bp, Homo sapiens
atggaagaaaatatttacaaattatatctctaataagggatttgtatccagaacatacaactcaataataaaaagacaaataactatattcaaaaataggctttttgaaatgaagtatgggatgaaaaaaatgggcaaaggatctgaatagacatttctgcaaaaaagctatacaaatgaccaataggcatatgagaagatgtttaacaccattaatcattagggaaatgcaaactaaaaccacaatgagattctacttccctactccctactatggctttagtaaaaacaagtgttggtgagaatatggagaaattagaaacctcagacattctggtgggaatataaaatgatgcagtcactttggaaaacagtctggtagtttcttaaaacacttaacatagaattaccatatggcccagcaatttgacttccttttcaaatgtttcatttgagaacacatattcacataaaaacttgcatacaaatgttcatggaaatattatttg

SEQ ID NO: 196495 - DNA, 654 bp, Homo sapiens
atcttaaattggactagccatatttcaagtgctcaatcaccacacagctagtggctactatactggacagcacaggttcagactttagcaaggaggttttcaagtaaggagagtctcccaaaacagaggttttaatgatgatctatacactttatgtgaaaatgaattaggctgcctccttactatcaaagaaatgcacaccgcaacctagagcttcaattatttaaccagtaataccattcttaaggcagagtcacaaaagagaccttttagtgtcagtgtcacagatctttagagggtcacaaacacatcaagttggatcataagcaaaagagctccagatttgataatataagcaatgaactctccagacataatggtttctaatgatatttgaactgaactaaaacaaaaacatagaatttttaaaaatttgaaccatatgctaggatttagaaattttaaaaaatcggttcttgaatatgactgaagtagaggtctatatatttaggaacacagaatctggctacctggctacatagttccattcactcttcaactagagaaagaaagttcattcagctactccaaccaatatttagtgaacagctattgagtaaatcctgtactctaagtgctgaactcggtgttggg

SEQ ID NO: 196496 - DNA, 896 bp, Homo sapiens
gactaatgatggatttatcaggacatgaccccatagtaagtcaaagaacatccatatatatatacaatggaaccttatttggcattttaaaaggatgaattactgacacagactacaatgtagaagacccttgaaaacattatgctacatggaagaagccagtcacaaaggctgtatgcctgattccattcatgtgactgtccagaataggcaaacatagtggatttcaggcaccaggagctggaggggggacagagtaggttaacaggattgaggagtgactgctaatgtgaatggaatttctttttggggtgatgcaatgttctaaaattagattacagtgagggttgtacaactctgaatatattaaaaaaccacttaattgtgagaataaaagataaacggggaaaccaatgaaatagaaaatagatatataatggaaaaaactcagcaaatccaaaatttaagcctctggaaaaaatcaataaaattgataaatctaacaagattgatcaagaaaaaatgagagcattagcatcaggaacaaaacgggaaacattatctggatattaaaataattggaggagattgtgagctattttatgctaaattaaacttaaaaatttagatcaaacagacaatttgaaaaacacaacagcagaagcagaactgacacaagaaattctgtatgtcttaaagaaatttaatcaataattcaaaaactttccttaaagaaaactccctggcctggatggcttcactagcaaatgctttcaaacacttaaagaaaaaataatagcaattttaaatgcttccaggaaatagaaggaataacttcagaattcctgttatgaatccagtgaccctgatatcatactttaaagacattaaaagaa

SEQ ID NO: 196497 - DNA, 166 bp, Homo sapiens
tagcattacttctgtaagaaaatatatttgtaggtcccaaaccatctgtttaaaaatgaacctttgttgtgtgtgtatacacacatacacacacacatgtgtatctttcataagtcattgcacactatacacaatactgtgcaccttgcttttttttttttttttt

SEQ ID NO: 196498 - DNA, 118 bp, Homo sapiens
ccagctactcaggaggctgaagtgggaggatcacttgaatctggggaggcagaggctgcagtgaattgagattgtgccactgcctgggcaacagagcaagacctcatctcaaataagc

SEQ ID NO: 196499 - DNA, 616 bp, Homo sapiens
cctcctcagagtattaagctggtggacgtttggggcttcagcgctacactggaatggacaccgccccaagatacggggaatacagcacttctgggatacacggtgcagaaggctgacacaaaatccgggctgtggttcacggtgctggagcactatcaccgcaccagctgcatcgtctctgacctcatcatcggcaactcctatgccttccgtgtctttgctgaaaaccagtgcggactcagtgaaacagcccccatcaccacggacctcgcccacatccagaaagcaggtaagggaggcacggggatcatgagctgggaagacttaaggataggccgggcacagtggctcacgcctctaattccagcactttgggaggccaaggcaggcggatcacctgaggtcaggagttcaagaccagcctggacaacatggtgaaacctcatctctactaaaaatacaaaaattagccaggcatggtggtgcacgcctgtactcccagctactcaggaggctaaggcaggagaattgcttgaacttgggagttggaggttgcagtgagctgagatcgtgccactgcactccagcctgggcaatagagtgagactccacctca

SEQ ID NO: 196500 - DNA, 144 bp, Homo sapiens
tgtgttacagtgtgttatagcatgtgttgcagcgtgtgttacagtgtgttactgtgtatgttactgtgtatgttgtagcatgtgttacagtatgttacagtctgttacagtgtgtgttgacagtgaatggatgtggtggggaaa

SEQ ID NO: 196501 - DNA, 509 bp, Homo sapiens
cttaattaggacggggccctattctctggaaatgattcttcaaagctcttggttctgtcctctggcctctttattccatcctctgagtcatccttccttttccatgataaatggtcagtgtttgcagctgaataattttctcagcctctttcctgcctacagcaatttagagatccaagggcctttttttttattttgtattctctgtaacttttaattcgaagtgacagtgtttaccccaatataattcttttaaaaacctatgggcttcctataaagcttcatattggctgcacttcactagacaaaatctacacccacaaacaagcccttctctagcttaagattcttggaaagctgctatgggccaacacttaataatcagtgaagccctattgtttaatgagatctgtgaagcacacccttcagattcttaaaggaacttttctttttccatttgaggaaccactttacatcttccttatttaataaagaattgttcagccata

SEQ ID NO: 196502 - DNA, 499 bp, Homo sapiens
caggaagtagtgaaacctggtagagagaatattatctttctccaccttcaattataccagaactgcctccagggactttggcaggtttgacaaatggcagaagaatttagaagattttctttgctggcaaagggagccaatggttgggcacaaatgtgctgctgcggttgtttgtacaatgaaactctagattgtaggcagaaatgtcaggttcctttcaactctcttcagagctaatctagttcccatgtgcaaactcaatctatagcatttgggtaaagaatactcagtcctctgctgtgacaagaacaaattcatcacccacaccatacattgtagctaagggcatcatcgtgcccacatgaatcaccaggcagagacggctgccaactctgaaattctttactcatggaagactcacgtatactaatgccgactatttacgcaagcacatttctccaggtggcctggagcagtttacaagatgctggctcattcc

SEQ ID NO: 196503 - DNA, 457 bp, Homo sapiens
ttgcactccagcttgagcaacaagagcaaaactctgtctcaaaaaatatataacaataataataataataataataataataaataaaagactagccctaaaccattgtgcatgtgtgtgtgtatgtgtgtgtggccaggtgatagaacacactaatggcttttctaaggttccttggtccaacttctggagctatggtacaactggcatccctagaagggaaaagcataaatgctaaggtggtggagcaaccaacaggaacccactttatcatgaaaaagatgaagagaggttaaataaacaaccccaaatcacactcctagtcaatagtggttatgagttttgcactaaagtccaactgatctccacagtcaaagcatttgacaagaagtcctctcattggtaaatacaaaacctgttattgattgctgcatcatacactaccccaaacaaagta

SEQ ID NO: 196504 - DNA, 294 bp, Homo sapiens
cttcttttgcaagatttctttagactatgctaggttgcttgtgttttcatataaattttagaattggtttgttaatatctgtaaaaatggcagctggaattttcataggtattgtgttaaatctatagattaatagtattaccatctgaacaatatgaagtcttccagttcatgaagatggatgtctttctattttttttttaggtcttcattagtttctttcaatgttgttttgtagttttcagtatatgagtcttacacaacatggataaaatttatttttaggtattttat

SEQ ID NO: 196505 - DNA, 306 bp, Homo sapiens
tgtttcaggccatattgtaaagaagtgtgtcttgtgattttgatacccagaaatctccagtggagggtattctctgccttccttttctttgcagatgctgagctgaagaatggaaatttggagcagacttgcagtgtcaattgtaaagcaaagagtaattgatattactttctgtgacactgagttactttcaaaatagctttataaaaatttaggttgcttaccaacacattaacttctccctgccgtccacacgctgaacagccactactttcagaaatagactgaataaatgtaatgcattta

SEQ ID NO: 196506 - DNA, 658 bp, Homo sapiens
tatcccatagaatgcccacacatgtggaacatgcattggtgttccagttgggagaagctatttttacaaatgcaggctgaaaaacctattttcaaatgaatgctcctaaacataaaattcaccttaaacctaagcccccaaccagcattcaagaaagaagagaaagtgggcaacattcaaccactaatttcatggccatgttgcctaaggtgaggtctctaagtgatttcttaaactcaaacctctggccccagactcgacttggctcttcttctttgtctccagtgtattcttgtgcccctgaacgctgaatcacaggcaaaggtttccagtattttcattctctttctgctttgaagtccattaatcttcatgttgattttccctccaccctcttgaaaaaaatatctgcgttccccagatggaaagccaggagcttgcctctcctaccattcccactccatgtgatcgcttcccaaggtgccaactcctggctttccatctggagaacttaaatgggggacagatgaagaaaagtttatcaccatctttggaacacgaagtgtgtctcattcgagaaaggtgtaagatgcttccctcaaaatggctggcaactatggattgtatacctggctgactcattctcatggtgtacggg

SEQ ID NO: 196507 - DNA, 388 bp, Homo sapiens
ctcactacaagctccgcctcccgggttcccgccattttcctgcctcagcctccccagtagctgggactacagccgcttgccaccacagccgactaatttgtatttttagtagagacggggtttcaccgtgttagccaggatggtctccatctcctgacctcgtgatacgcctgcctcggcctcccaacgtgctgggattgcatgcgtgggccaccatgcccggcctaggtaaggcagttttaaattagttaaacgtaggaagtaaagctactttgaactgatcctttgacaagacattcacttctcagcagagtgctatgagggactaataaattattaaattttattgtgctaaaactaaagtgaatttcaaatgtgaataacaaaa

SEQ ID NO: 196508 - DNA, 579 bp, Homo sapiens
tcctacttcagggtggtattatgagagttaaaagggttagcatagatagaacacttttctatgattgatctaaggttggcttttagggactacattatacatatgggttttgtcttcatgtttttgcttgcatttctctctctgcccactcttggggctatttggatgtcacctcttcttcttctgagctccagtctatgtattccctgttccatcatcacaaccactgaagtctacactcctcattagattcagggaacccagatgccagccaaagacatccctttccctcatgacccagttgaaaaaattctccacccttctgttaattctagaatatttaggagtaaagatcttttccctcagatatctgtcaattcccggccttatatctcaaagccccttttcatccaggtttcctagatcatttcttgtcgtccctgtgctataactcattaacccaggcataaaactcatcagctactaatgtcctcttccatcccagactcccctcacaccaataattcttgaatagagcaacccaaattgagaattttaagtaaaattgaaggtaaattt

SEQ ID NO: 196509 - DNA, 662 bp, Homo sapiens
tcttttttttaaccaagcaataatctaaaacaattaaaagcttaagtgcaacaatgggttagagccttgcctttaactcacaaaataataatgctttattggagacataaatatttaaaacactgaactattcttgaagtactcaaagttattacaaagacaaacagtattttagtagagtcaagattactttgcttgtgtcagagttcatcagtgttttgctaactggtaaaacaatggttttcttactgcagatctttattactggcaagaaagtcccagaagttcttttctctaacttatgactagaatgctgagtagcttgaaaatcaataggttctggtctggagctgacttattcattagtcacagtgctcagggcccatgatactttcagtggcctatggaattgttttaactttactttaaaaacagaagaaaaaaaatgaacatagtaataaggaacatataatatggaacctagcttgtattatatttgtctttataccaatgcagttgtaaaatttaatattttttcctggaggaagaggctcacaaaggccaaattgtccaagggccacaaaagtcatcatggggccccacctgtgttataggtcaggctcaccccccacgtgtatgtgagattcagtgatttgaatgcc

SEQ ID NO: 196510 - DNA, 865 bp, Homo sapiens
  misc_feature (865)..(865): n is a, c, g, or t
ggtgtctgccaccacgcccggctaacttttatatttttagtagagatggggttttgccgtgttggccaggctggtctcgaactcctgacctcaggtgatccacacgcctcgacctcccaagagtgctgggattacaggcacgagccacagcacctggcctttaataggctttcataacagaaaagtagacatcagactttctaagttcaaaacctggctctggtgcttaccagctagctgaccttaaacttaaactatctaaactttaatgttcttcctcataggaaaaatggggctaataatgtttcctgacataatgcatttaaagcatggatgcattaggtgctcaataattgttatctatccctttggcttagtaaaaaccattgtcaaagtttttgtgtatatgacttttaagttttctctaaattatatagacagtattttgaatattggaatcatggcaaataaaactgtccatctaaaaaaaaaaaaaaaaaaaaaaaaaaaaaaaaaaaaaaaaaaaaaaaaaaaaaaaaaaaaaaaagaaaaaaaagaaaaaaaaaaaaaaaaaaaaaaaaaaaaagagggcgggggggggaagctgcgactagaataaacaactcaaaaacacctggtagcccagggggcggccgaacgccaacgctgagacaagaacgcggctgacgaccacgccaccaagaagagaaccggaggagatagagcgtggcgcggggccgcaccaaaaaaaaaagcgcggaggacgacgacacagaggaaacacacacgacgagagggaccggcacacacccactgaccgccaagagggggcgagagcaaagaaaaaccgacacgaggacggagn

SEQ ID NO: 196511 - DNA, 512 bp, Homo sapiens
ggtgtctgccaccacgcccggctaacttttatatttttagtagagatggggttttgccgtgttggccaggctggtctcgaactcctgacctcaggtgatccacacgcctcgacctcccaagagtgctgggattacaggcacgagccacagcacctggcctttaataggctttcataacagaaaagtagacatcagactttctaagttcaaaacctggctctggtgcttaccagctagctgaccttaaacttaaactatctaaactttaatgttcttcctcataggaaaaatggggctaataatgtttcctgacataatgcatttaaagcatggatgcattaggtgctcaataattgttatctatccctttggcttagtaaaaaccattgtcaaagtttttgtgtatatgacttttaagttttctctaaattatatagacagtattttgaatattggaatcatggcaaataaaactgtccatctaaatcttgtcgtggtttagatttagaata

SEQ ID NO: 196512 - DNA, 617 bp, Homo sapiens
tggcagttgcttgtaaccccagctaccctggaggctgaggcaggagaattgcttgaaccctggaggcagaggttgcagtgacccgagatcacgccattgcactccagcctgggcgacagagcaagacttcgtctcaaaaaataataaaaataaagttaacttaatcaaaacagaggatgtattgactcctgtttagggaggaagagaaaacctctagtaaaggtcagagggagattttgactcagaaatgacttgattcaggggccggattacgggttgactgtctctcctcttctccctgtcttgaccttattctgttctactatagatgagctccatccttgcttaagtcacaaggatttggggagttgatatataactttttaatttatgtaaatttaaaattcagtaaggcgagggcagcccagatgacccgagcttgtgggacctctcatgaaaaaaaataaaaaattaacattaaaattcagtaagggcctgggtgctgtggctcacgcctataatccgagtactttgggaggccaaggcaggaggatcacttgagtccaggagttcgagaccagcctgggcaaacataatgagaccttgtctctaccaaa

SEQ ID NO: 196513 - DNA, 426 bp, Homo sapiens
cagcccctattcaagatggagtctctctggttcaaacatctctgacagactgatggacaataattcagtcagtttatatgcacttaacccctccatctttcattctgcaatcttaattacgaatgccgcataagagatttaataggccttgcaaagcaaaaccagtgatacaaacattttaaagcatacgtatacttagaaataatgcaaaacattagatagtaaattctgacaagaaaagctaatttgaaaaacagaaatagctttagacaaaatttaggtctccaaggtaaagtaaaaagtttccaagtatttttggaaacttcatttctcctttctcagtttctctacgattccatgctcccaaccaaacttcacagaggtctttctcctctgtaagctatcttacttggcattagccaattt

SEQ ID NO: 196514 - DNA, 341 bp, Homo sapiens
cctctgcctactctggttgatctgtggccacaccagtcaaaggaagcagctggaggtgtgtactgtgggggagactgactagagaggcccgcccggccgcaggcctttcttccaggagtggcctccatgtttgcagaagcctgaggcctgggaaactagggggaggagagtgtcctctcttgcacagcccaggaatgcttgttccctgggacccaaggaagactcgaacttaatcataattattgttttaattcaaagtctgtatttagagcccagatgctcttaatgtcaattatgttaaactattaatacatcctcttgcatacttcccttcacttggt

SEQ ID NO: 196515 - DNA, 219 bp, Homo sapiens
gaattttagcactttttctatcagtttatctgagctatgtatttattaaggattttaatacattgctgtaattactaaaaacatcttttcccattgattatttgcttttaaattccatacatgatttagaaaaaaacatataatgtattttattttatgtgcttcctggtgcctggtacataaagtatgctcaataaatatttgttgaatgatgtagtc

SEQ ID NO: 196516 - DNA, 577 bp, Homo sapiens
tacccgcctcagtctcccaaagtgttgggattacaggtgtgagccactgcacccagcctgaaggggtgttctaatgttgagtatgatcacacatgcatcagctctgttctggtactcgcatttcgtcaaccagaggctcccctcataaatgtcagattagtcccaggagacactagtctgcaatctgatttcccttgccattgtccctagctaggcggcagagctgagtttaactaaaagtttaagaaaactgggttttttgctcacccatctagctgaacattctcctgaacatctgcctgaacatcctcctctgaagaagccaatgagaattattgataatgtatgaacccccaggagacaaaccttttacaaataaactgaaagacaaggaagtaaagttatatacagttattaaggaacactcaaccacccctgctttttaaaaccacataatgaagctttagcacatttcacccttattctgtttttgtttctgttttaagctagagactctttgggtcagtggtttccaactggagaaagtacttttttgcctaggggactttggggaacg

SEQ ID NO: 196517 - DNA, 417 bp, Homo sapiens
ctcctgagcagctgggactacaggtgcacgccactatgcccagctaatttatttttatttttacagagacagggtcttgctttgttgcccaggctggtctcgaactcctgggctcaagcgatcctccccacctcagccttctaaagtgctggaattacaggcgtgagctgtggcgcccaacccaaaagtcatttttgattgtcacaacttggggagctagtattggcttcagtgggtagaagccaggggtgctgctgaaaccctagaatgcacagggctgccccgacagcgcagaatcatctgtcccaaaacgttaacagtgctgaggctgaggaaggctgccttaggcccaatcgtcacatcaggaatgaacagctagtcgacgcggccgcgaatttagtagtagtaggcggccgc

SEQ ID NO: 196518 - DNA, 540 bp, Homo sapiens
ctcctgagcagctgggactacaggtgcacgccactatgcccagctaatttatttttatttttacagagacagggtcttgctttgttgcccaggctggtctcgaactcctgggctcaagcgatcctccccacctcagccttctaaagtgctggaattacaggcgtgagctgtggcgcccaacccaaaagtcatttttgattgtcacaacttggggagctagtattggcttcagtgggtagaagccaggggtgctgctgaaaccctagaatgcacagggctgccccgacagcgcagaatcatctgtcccaaaacgttaacagtgctgaggctgaggaaggctgccttaggcccaatcgtcacatcaggaatgaacagctaatttggttggctctgatggcagcaccacatgattatattctttacagtcttcatctgtcaggacacatgttcaagtatggatgagtgaagtgacgtgttgtctaggacaggccttaaagtattccagaacaagagggacaggcagagctaaggaaacaaggc

SEQ ID NO: 196519 - DNA, 1036 bp, Homo sapiens
catgctgggtgctgggaatagcctgagtaggtaaaagccagaagcagggaggcagactaatgcaatcatgcaggctagaggtaatccgtttggaaaagtgtggtagtaaagctgctgttaagatgttgggaggttttgccaatagatctgcagacagggcatggggtaccagagaaagaaatgccaaggatcatgatgtgattttggcctgagaaaatgcaaggacgtatttgccaataacttagttggggaagactatagaagcaggtttcaggttaggagactatcagttcagtttatgtttgatatgttcgttatatagtcaagtaaagatgataagcaggcagcaggataggagtctcaagttcagggaagataatttgtgagtttgcagtatgtaaaggtgaagttatgatgaaatcagatgagcttaccaaggaagtgagtgcagctagaaaggagcagaaatccaagacttatccctgaggcattctaatacacaaagatgcaaggaactggttaaggaatctgggagtgagcataggaaagggagaatagaaaatctaatgtcctagaagccaagtgaaaacagtacaatgtctctaatactgcaaatatgtattcatatcactgaatcttagagcttttagaggccttggcgataacctaatggattaaaaacactgacacttaagaagttcaataaattggtaaaagtcacaaatcaaaagagtaacagagaagataaaaagtaagtctattccacactgctttatgttagaaagtcttgatctatatggaatatagaatatattgaaatacagatcaagaaaccagatcccaagagatgatctactgagggacaggatttactcagatatactactggaatagaaaaaaaaacaaaacaaaacctgtaactctagtctgttcatccagttactaagtaaaccactggccatacactaaatactgtcattcctatttgattttctttcaggtacctttttttctcccctttcttaacaaatcaatc

SEQ ID NO: 196520 - DNA, 636 bp, Homo sapiens
catgctgggtgctgggaatagcctgagtaggtaaaagccagaagcagggaggcagactaatgcaatcatgcaggctagaggtaatccgtttggaaaagtgtggtagtaaagctgctgttaagatgttgggaggttttgccaatagatctgcagacagggcatggggtaccagagaaagaaatgccaaggatcatgatgtgattttggcctgagaaaatgcaaggacgtatttgccaataacttagttggggaagactatagaagcaggtttcaggttaggagactatcagttcagtttatgtttgatatgttcgttatatagtcaagtaaagatgataagcaggcagcaggataggagtctcaagttcagggaagataatttgtgagtttgcagtatgtaaaggtgaagttatgatgaaatcagatgagcttaccaaggaagtgagtgcagctagaaaggagcagaaatccaagacttatccctgaggcattctaatacacaaagatgcaaggaactggttaaggaatctgggagtgagcataggaaagggagaatagaaaatctaatgtcctagaagccaagtgaaaacagtacaatgtctctctttatccctgctttctcttattccaggaggt

SEQ ID NO: 196521 - DNA, 334 bp, Homo sapiens
tgagtatcccttatccaaaacacttgggaccagaaatgtcttggatttagaatctttctggactttggaatatttgcattatatttactggtttagcagccctcatctgaaaatctctaatcttaaatgttccagtgacattttcctttgagcatcatgtctgcactcaaaaaactttgaaatttgtggggttttttttgtttgttttgagacaaagtctcgctctgtcacccaggctagagtgcaatggcatgatcccggctcactgcaacctccgtctcccaggttcaagtagttctcccgcctcagcaatggcctcccgggttcaagcgat

SEQ ID NO: 196522 - DNA, 494 bp, Homo sapiens
cagtcagtggagtgatctttttagaaagtaaaccaccctctgtttagataaaataggttaataaataagtaaatatcagggacagttttgaatgaaaattatagaaggaccattaataattggttaggataggagcaaggaacccgcatatattgtgtttaaatgctgatgaatacagaagtgaccatacatatgtgtgcatgagcatttgtaattgaaaaaaagcagagccaaggccgggcgtggtggcttacgcctgtaatcccagcactttgggaggccaaggcgggtggatcatgaggtcaagagatggagaccatcctggccaacatggtgaaaccccaactctactaaaaaatacaaaaattagctgggtttggtggcatgcgcggctgagacaggagaatcgcttgaacccgggaggcggaggttgcagtgagccaagatcgcgccactgcactccagcctggcaacagagcgagactccatctaaa

SEQ ID NO: 196523 - DNA, 561 bp, Homo sapiens
tctcaaacaaaatgttatttgctcctacaaatgaactagttttgttaacgtcgtatgctgaatgattaacttaattcattccatctttaatatattacttaggccaagggatttttttttcatggctactcttaagttcctaacatctgtggcaaataatattcttcttacctacctccccttaaatcagatatttattggataacattcagaagggaaaatattttactttattgatgggtgatgaggtgtacttgaactgcatatatattcttggtgctagctaaacttgttctcaggttaatttcattatttcttttttcttctgtctagagtaggtgcttgtacatacctctttataaaatctcaacaaatcatgccttttcaggagttttatttgattcttagtcttttttcttctgttggactgaagttgttttgttttttaatatgttgctttttaaatgccagaactgttaggaagggtatctcatagatactcatttctctctagtcccaattttatctggccttccaaactccagtccttctagtatggtt

SEQ ID NO: 196524 - DNA, 518 bp, Homo sapiens
ggtgaagggggaaactcacgtgggcacatcctgcagagggatcccacagaaggggagagccctgggttctctatccaactgcgtctgggctagggggcgcctctgtttcttggctaagtgggtttgagagaggtatgccggtgggtgagggagggctggggcagagtcacctgacttattcgaagaagcccttgagagagccgtggcttcttggaattgagagggaagagtgggccagacgcagtggtcatgcgtgtaatcccagcactttgagaggccaaggcgggcggatcacgaggtcaagagatcgagaccatcctggccaacatggtgaaacctcctctctactaaaaatagaaaaattagctgggcgtggtggtgcgtgcctgtaatctgagctactcgggaggctgaggtgggagaatcacctgaacccgggaggtagatgttgcagtgagccgagatcgtgtcactacactccagcctgggcaacagagtgagactctgtctcaaaaaaa

SEQ ID NO: 196525 - DNA, 235 bp, Homo sapiens
gtggttcgcccctccccactgtgagaacataagtacatttttttaagtcatataaatggacaccaagcaccggtaattcagtctctttaaaacctgcttaaaagttctagtaagatgtgctcaggttggaaactaaaaactaccttataagggtataaaagactgaaagcaggaagcggctttgacaaaactaaggaagttgcagcggcgctgctccactgtggggagaagggtg

SEQ ID NO: 196526 - DNA, 531 bp, Homo sapiens
atcctcctaccttggcctcccaaagtgctgggattacaggcatgagccaccacactgtgccttggaaaaactaattcttaaagctttacaacatgtgttattaaattaacattgtaagaaatcctactgtaaagaaatctgcttagctttttaatccaatgttttgtaaacatgactgattcctgtatccccttccttttatttttaacaataaggagatgtattctcttaagaaagaatacacagtccagagagaggacaagctcagggctagggcaggctccatgtggagaccattgagcctccaggaccatttctctgtgttttttagccccgtgagtcggaagagcttgcgggctgttgaccaggtgactgtatcagttttaggcaccacagccacgcaggatgatacccagaagaagaaagtccctttttggagcaaggaaaatgtgctcagaaatgcttctggcagtgttcccctcacatcttactggccaggtttgggcaggtgcccgtttgttacccgttgtt

SEQ ID NO: 196527 - DNA, 443 bp, Homo sapiens
gtttccaaggctcctcttgttattgatttctaattttattccattgtggttagataagatatttgatataattttgatttaaaaaatcttttgagacttgttttgtgtcctaaaatatgtttcattctggagaatctgaaaagaatgtatattatgcagctggtgggtgcaatattctgcaaatgtctgttaggtccgtttggtatatggtgcagtataaatttgatgtttctttgttgattttctgtccagataacatgttcaatcctgagaatgagaaatcccaaatattatttcacaagtgtctatctctccttttagatgtaataatatttgatttatatatctgtgtggttcagtgttgggtggatatatatttataattattatattctctcactgaatctatccctttattcctatataatgtcattatttgtctc

SEQ ID NO: 196528 - DNA, 139 bp, Homo sapiens
acggcgttgtcagtgtaaagatggtctagggcaatacttgctccaagatctatgatctaatgctttaatcacacaggatgcatctagttactcaaatcagagattctagaatcaccctgagtgttctcaggtaattgct

SEQ ID NO: 196529 - DNA, 387 bp, Homo sapiens
tgagttatacaggagagcattgatgttttctacctctgttctccattagctgcaaaaacttgccccttcacagactccatgaggggaaagataccacagaaagagactgcatactattttacttttccttggactctgaaagtcgaactttagcaaagtaaacttaccaaagacatagttaagataaatgaatgtgtccaaagcaaatcggaaaagggtggaagattgctcatcaaatgctttaaaagaagtcctagctataattcgtttcttggccttggatggctctcaggaagtggtgtgttggagccagttcttacctgctcttgctggtcacatgcatctcttcccagctcttcattcggtgacatcaaaattagtaggctg

SEQ ID NO: 196530 - DNA, 162 bp, Homo sapiens
tttgaggaatcagagtcccgctcgttgatatctagttgtacagttgggtgatcttttgtaattcctaggttggtaaatttgtcataaatggatgcagattttctgcatagctataaaaatagtttgtggtaaactgctttcttcatatctactcagaaactt

SEQ ID NO: 196531 - DNA, 418 bp, Homo sapiens
ttgatttctgaatttttatgttatgggggttgcctctttctgtccctatgacatggctcttggggtgtaggtgtgatgtgaatgctctgtagcgtcccttgggcatctggctagggttttgcctgacagccatgaaagcatgctagctgcatgaagtcctcatctgttccttccattcttatcctttccgagggaaggaatgaaggaaggactgagggggaaagtccctggagtcaggctgtggcctttctcccccagcttcccccttgccttttgtcttagccagagtcaagctactagtctgcaagttgttctgcagatggctcagcagcagacatccagctgggctgacttcacccacagagtgtctgtgtttgtgtttgacagccaagacagggagcaggaaagctgttttcat

SEQ ID NO: 196532 - DNA, 221 bp, Homo sapiens
cccctgcaggctgggacagtggcaatggagcatatggtgtgctggcccttcctttcacaaaggtgtggacactctaagtgccaaggctgtgggtggggtcccctgggcctgtgctgctctgattccctatcattgtagggttctcttttctccctgaagtgttctgactgtctttcttctctctaccccaaccccatttttttgttttgttttattttgat

SEQ ID NO: 196533 - DNA, 259 bp, Homo sapiens
caggaccatacattttctttcaaatcccttataagtttctggtgattttttcggttggttggttggttttggtttttgtttttgagacagtctctcgctctgttgtccaggctggagtgcaagaacctatctaaaaaaaaaaacaaaaaaaaaaccaagggccaaaaaaaggaaaaggacccttttggtagtggggggaaattgacggagggaaaaggatatttctagaacccgggaaacaaggacttaaagctgaagg

SEQ ID NO: 196534 - DNA, 336 bp, Homo sapiens
attcatattcaacgtgtggccaggtactatgtaaaacactggtgatacaaagatatatgatatatacatagttcttatcctcaaggagctctaggttttgtgggagaagcagacatggagacaaattggcaggcaattataattctggtattaaatagtttatgagaaacagacaaacttgtaaaatagtcttcaatcataaatgaaagcatattttaaataattaaaaatataataagacttacttaggtctttcctctgttcgcgaccagggtggagatctttcattatcaatgtttcctgtaatctataagggaacagatcgttgagaagctt

SEQ ID NO: 196535 - DNA, 148 bp, Homo sapiens
gtcgtctctacaggatcccgatgttatcgcccaacacaaggtgatgacagtgattgatgatgatgatgatgataaaaagaattctttttattcaactctgactcgtgtttattgtcacaatagtagttaatgtgttggggataaataa

SEQ ID NO: 196536 - DNA, 440 bp, Homo sapiens
gccacttcatactctacagtgtcctctgtgtgttcaagtgaaaggaagagtttcaccacgttgcccaggctggtctcgaatgatagcttacacttgtgttgtaattattaaatttaatacacaattgcataaactaatgaaatacgattgcatgctggtgcggtgactcatgcctgtaatcccagcactttgggaggccggggtgggcagatcacgaggtcaggagttcaagaccagcctgaccaagtgaaaccctgtctctactaaaaatacaaaaaaattagccgggctaaaaatacaaaaaatggcgcatacctgtaatttcagctactcaggaggctgaggcaggagaatcacttgaactcaggaggtggaggttgcagtgagctgagatcgcgccactgcactccagctagacaacagagtgagactccatctca

SEQ ID NO: 196537 - DNA, 565 bp, Homo sapiens
ctctgtactccagcctgggtgacacagcaggaccctatctcaaaagaaaaaaaaatcctctgagatagtgaaaggtgaaaggagttcaaaaggtgtaaaaagagtgggctgatgggtccaaagtcctgggctggagaggagtgttctaccagctgggggaggggcaccagggaggctgcttgtaagtcctagacttatcagatggaggcagcccaggggaaatctggggaaaatcccgtgaaacagaaggaatgaccaggggaaagtcctggaggcaggaatgaatttggtgtgctggaaagacaggaatggccagataagaggagagaggaggaactgagaggggagagtttccaggtcaccttgaacctttagaacaagggaggagttggaatctcattctaatggcagtggaaagccccttcgggaaagtgataggctctgatttatgatttaaaaatatcaccttggtaatgtggtggaagggatgcaagagtgaaaacacaaaggctatttatttgtgagactaatcgcagccacctgggtgagcaatggggccagcatg

SEQ ID NO: 196538 - DNA, 360 bp, Homo sapiens
tggggacagaaagcaaatattctacaaatgtgaatgagatgggccacgtccacttccacatttgactccaggactggcaatttctatgtataaggaacatagtactggtcaaaacaaataccgcatcaaggagttgagggccccaacccacaggtgtcatgttcctgccagtgtcttcactgagcattcaacaggctgtccccttgtcccatcaggctggcagcttctaggtgatgaggagcaaccaagcgagcccaatgactctgttgatcggcatcccatacaccatatacaaagatgaactcaaaaatggatcaaagacctaaatgtaagagcagaaactatagaagtccttgatga

SEQ ID NO: 196539 - DNA, 601 bp, Homo sapiens
taaagtagaaaaattttaactcaaaccattgtagtgagttggggactgtctgtaactccaacatctgtcatcttgctttttgcttctgttgatatagttgaggttttcctggatcttggtatgaggtgtgattttcaattgtatcctggacattttggctattatatttcaagtattagaacttcaaggttctgtatcttacttgaatctcatttgaatgggactcatctgacaccacactgatggggcaaggagcacaccatctaattactgccagttggaagtggaaatccagtcttagttgacaacctggttggagagggccaccttattactgcttggggagggcagaacttcaggctacccaataggcatctgctgataccatcatggctggataatggagggggacttagttaatgttccccactgggcttccattgacatcatggggagggggtgggggcttgttaggtataagtagtaattaaattccccatctctgcacttggcctctgaaattatcttgctcagaagggaaaggcatttcaatgctgaatggaggtggatatccaggttccctatgtgatctccaatgaca

SEQ ID NO: 196540 - DNA, 228 bp, Homo sapiens
gttttgccatgttgttcagactggtctccagctcctgagctcaagcgatctgcctgccttggcctcccaaagtgctgggattacaggcatgagccactgtgctgggccaggcatagattcttgaaggagtcagagtcaaaagtttagagcatggtcttgtccttgatcaagcctgtccttggttactttaaaggaaattggttaattttgacccagcttggtatgtta

SEQ ID NO: 196541 - DNA, 265 bp, Homo sapiens
taatctctctctccatctcacccgcctcatacacccagcatttgcccagaacatatattcaatatctgtcaactgactgatacaaatagctacaatcagaatagggaaggcaaaagaaagattaaaagaaaccgctggtggacatcaaccactaactaatcaaagggatgtcaacttctccatgtttcagttttttcaattataaaatgtagacagtaatgctacctcaaagggctattctaagtattaaatactacttatatta

SEQ ID NO: 196542 - DNA, 708 bp, Homo sapiens
aataatattgttactgatgtttttctataaattatacgtgtaccagtgagttaagacatactgatccatcagtagtttattctgtgcatttttggaagagttctaatgacctctgaggctaaagactgaaatttcagagtctagctaattggaacatatatcccagatttaaaatacatttatttggctgggcgtagtggctcacgcctgtaatcccagcactttgggaggctgaggcaggcagatcacctgaggtcaggagttcgagaccagcctggccaacatgttgaaacgccatctctactaaaaatacaaaaattagccaaacatggtggcaggcacctgtagtccaagctactcatgaggctgagacaggagaatcgtggggagcagggcaggcggcggaggttgcagtgagctgagatagcgccactgcactccagcctggcacggcaacagagtgagaaaaacaggaggtagagggcacaaggccccctgggacacagtagctagcagctgagtcccatctccataccttgttatctctaggtaccctgtgttctggcccctcttttttttatccatttccttctctttagatcttgtttaggaagattctgaacgtcctgaaaaataaactgccatttaatataggaccatgctttctgtcttttaaaaaataggtaaattaattttgaatatacgaca

SEQ ID NO: 196543 - DNA, 344 bp, Homo sapiens
ccctctaacttttcactaggcatgaccactgctctattttagatagagattcagtggggcaaaacctgagaattatctgcccggctagcaagaagatagctccttgcatttttgcggggagagcacttttgcttcaagggagtgtttcttcccaggattataaatctttctgtaacctcaggaaacactgctgatgaaaaccaggcatggtggctctggcctgtaatcccagtgactcgggggctgaggcaggaggatcacttaagcccaggagttggaggctgcagtgagctatgatggcaccactgcactccagcctaggccacagagacagatgctgtctc

SEQ ID NO: 196544 - DNA, 400 bp, Homo sapiens
agtattgctggtgctgaccttataaagttgtcaagatatttaagtaggttagtatgtggaaatcacttgggatagtgcctgataggggtggcttgataaatgtttaatactatttcctatttcaggctatgtttgtattagtaatagttatgtttaactactcactatattaatactactatgtttttactatgttttactattttatttttgtatgttttgtttaactactaactaaagttgtagttatgttattaataactactattaattagtattagttaaacaatactaattaatattattatgttctggccctccagtgcttaattgagtgtgggcaataggaaatttttttggaaggaaagggacaccataaacagactggcctttagaaaaa

SEQ ID NO: 196545 - DNA, 634 bp, Homo sapiens
ctgggattacaggtgtgagccaccgcccagcctattttttctatttttgataaagtgaactgaagtgacaaattatgtaaaaagctactgggccattatgaaatataatctggttgagatatgaagggctagtgggagtaaacgaaaggaagtgtgtgtggttcaaactcaccttgacacctatttgttgggccttcttagacaagtcacttattatttctatgtggaaatgtctttgtttctaaaatgggattaactatatgccatggccccatattgggactagatgcaatgatagatctgaagttgtgatctcattttgatggcactgaaagggaagacaaagaagcttaaggaggagaggaagaaaagtctagggtctgcctgggagctatgaaggaggagaaagcttggaaagagctcagtgcaaaggagctgagggttgaggagccaaggttatgaagaataaagatccactcacctgagacaggagaggggagacagttgttctaagaagtgtcccagggctggtcaaggctcaggagttcagggcctgaaactctcttcatggttctaaatggttggtatagactctgatggcaggtgggtcagaacataaggggtaccgagctcg

SEQ ID NO: 196546 - DNA, 451 bp, Homo sapiens
taaagaaaattaggtaactgtgatataggggtaaagataaagctaaatagggcctgctttgcttgaccaccaaaatattagctcagctgccttttgagagaatttgtgtaagtctacgtaatcttactaggcaaggaaaattcctcacagctggcttctgaacttctttgaatttcatgtattctatgatggcattcaagaagtttaaaatagtgttattcagaatcctaagtattcatcataactgatgctgtgtctgctgagtgacagaaacgtcactgccttaattctagcccccactaccacttacctgcataactgtattagcctcacatcccaaccctttaagtgttttagcttggggtattaggtgttctactgtacgtatctagtagtctttgctattcagcaccttgctgctcaactggctttccttatgtacggttctgat

SEQ ID NO: 196547 - DNA, 542 bp, Homo sapiens
ttttgtgccccctgtccctaataatatctcagaagccaaatgttaaaagtgtttataaaagggaaagaagaggtgtatcaaaggataacgtggagaaagatgaagactgagaattgaccattggacttcctaccttctggattattggtgatctgatgagagcattttttgtggagtagtggagaaaaatcttaattggagtttgtccatgagagaatgggaagaggtaaattagaaacagtaacgatagttgctctttagagaagttttgccctaaaggagagcagagatttggggctttaaagcaggaaaaagcatttcttaaatacccttaggtttttaatgaggtcacatttttgctgtggttttgttttgaaaatttatttgtgagtctctggtcttataattttacagtgtatttaaactccttaaggaatagaagaattatttttaaaaaccgtggtggcatatgcctgtaatccgagctactcgggagactgaggcaggagaatcacttgaacctgggaggcagaggttgcggt

SEQ ID NO: 196548 - DNA, 472 bp, Homo sapiens
gaaacatctcatttgaattactacatggacagatccatctacttacgcaatgcttaggaaattgctttcctttatttagaccagttctcagcagtggctgcatatttgaaccacatggcggagctttggaaagtcccagaaaacactcagaccaattacatcagaatgtctgggggaggaagcagggcgctagtaccttttcaagttccccaggtaatttctgtctgcagccaggattgacagatccctggttcagacagcatttccaggctggtgcagtctcggtctgtgttgttgtggcacagcgagcaaatcttgtgggaatagaatgatttttgacaatgtcttctttttggtaaagggtatgtgttaatgcataacataactaggataacttttgtaactttgtcagactttaatgtttatgcatcagaaagattcctttctcagataatgcttcctaattcctgag

SEQ ID NO: 196549 - DNA, 255 bp, Homo sapiens
tcttaaactatcaccagataatagttcatctctaagataattatttgtaaaagaaaattcatcagattacatttttaaatatttttataataaaaaataccataggtaggccttccatctaccctcgtgtgtgtctgggtcctcaaattggtcacaggatgatattaacagctgatttgtttttattgttcatatttatgtctcacagactgcatgagtatttgactcccaataaaactgaatattgaataccta

SEQ ID NO: 196550 - DNA, 242 bp, Homo sapiens
gtcacctggatcactgcaactatacccaactggtcccctgcttgtctttttctgtccagtgtaatcaccacattgctgcctgggtaatttaaaacagatgagaggatgtcgcatctgttttaaaatcttcagtgtcctgctctccacccccgcccccacattttagagtccaaacttctgggcctggcaatattaatgactactgtttattgagtatttatcatctaccagtgtcaagtgag

SEQ ID NO: 196551 - DNA, 645 bp, Homo sapiens
ccagctaattttttatatttttagtggagatggggtttcgccatgttggccaggctggtctcgaactcctgacctcaggtgatctgcctgccttggcctcccaaagtgctgggattacagacagacatgagcgaccacgcccagccccttcagatcttatgtggcctactccttgtcattcaagtctcaaatatctccttcctagagaggtcttccctgatcactaatccagagaggtgccctgtcactgttttaatttaattgcagcattcatcactgtattttatggtttgtttgtttattatctgtcttctcccactggcgtgtgagctccatgagagcagagaccttatgtgtgatgttggctgctgtaccccagtgcccagaatagtctctagcacatagaagatgctccataaatgtttgttgagtgaaaaaaaaaaaaaaaaaaaaaaaaaaaaaattctgggggctcttaattgtgtgggggggggaaaaaggggtttttggaaggggcccagtgggctcattagggggttctctggagcccacttttttttgtcacaaggggggaaaacttggggggcccccaatatggggggcggaattaaattgaaatagccggggttactgttttagattgaa

SEQ ID NO: 196552 - DNA, 1076 bp, Homo sapiens
ctctcttttgagagaaatatttcattttgaaaagaattatgctacaccaacttaaattttttaaaaatttgagatctcagtaattgagcacaccagagcacagaaaacattttgtacctttgcaaataaaattaaagattcagagaacctacataaaacatgggaaagaagggatgctttccataacagggtagaaggtaactttaaaatagtagactcataaggaaaattaaagaaatcctaatcagcaaaatacatgagattgttttttatggtccccatgtgaaaacgtttaaagctgtcaaggtacgtcagaagtttgcaggaaatgagctcataggatgtctcaaacagtgtacattcttttccatcattaatttccttccatgctaggggcatttcaggatctgcaatttctgaggatgtaaaaatgaacttatagcaacatctgttgtatctaatgtgccttttcccagaaaaccttgagctgtggatgggtataaggccaatgaacttagcacaaattcctacaaacacatcagctggcaccatcatgggtacttctttgaaaaccacatacatcattcgagccacatcttgggacattataaaggcctcaccactgcagtaatctgggtagtatttttctgggtactcactaagagggacaaagtctctgttctgaggatctctattgggtgtaacctgatgaagaactcttcctacatagatatcttctaggtgttctttcagattgagaagatagtctaccaagcttggtagattgacaaacgtctcttcatccaccttgagaatgaacagggcattagggcagaaagccacagcccactgtatcattgcaatgatcttcagggtttggttctcagaactgtccaagaagattccttcaattatatcattattcttacaggattctttgttgatctctttctgggtagttaccgaaacaggcattcccagagcaaacagtgtgagaatgggatgcccttggacactggtcacattgccccaagttttcctaatgaggtcccgtcttgttccatttcctgggctac

SEQ ID NO: 196553 - DNA, 291 bp, Homo sapiens
tttagaacaatggtttttgggtagtagtgcagtttacagaatggcatcatttataatccttttcttctactgaccagttacatgaatcacttaagaactaaccagatctgggtgcggtggctcacatctgtaatcccaacactttgggaggccgaggcgggtggatcacgaagtcaggagttcaagaccagcctggccaagatggtgaaaacccgtctctactaaaaatacagaaattaattagccaggcacagtggcaggagcctgtaatcccagctacttgggagactg

SEQ ID NO: 196554 - DNA, 445 bp, Homo sapiens
aaaggaggctgggaaattaagtccaactgcgtgcccaggaagctgaggaggacagcagcagcacaggggtgagccctgtggcttctgcaacactgactgttgttcatgatctatttcaccatttccctgttgttgggcacagtttgggagaggattattgttgacccaaccagtccagagaacaagttatatacctttttgccttttagattttttttttttattgatctctgagttgaattaatggggccaatcctaagggcctctgtttactcttatacagagaagaggaacagccctagctaaatcaccagtgtttctttgggaagaatctggtacaataaatgtcttcgggaatgactcgtgtcaggttcacctctagctgatcctggcctcagggcctggttggcccttgaactcaggcaggtgcaagtatgggcttaag

SEQ ID NO: 196555 - DNA, 443 bp, Homo sapiens
ttctgtactcatggtgttgcaggccagtgatgaacagggtggggaccagcagtggtacacaaacatacttcaaatagcactgctctcaaacaatgacaaagaacagactgcaactacacagagtagtgtgaatgaatctcacaagccaacacaagagtctgtattttatgattccatacgtgtaaagttcagtagcaaccaaaatactaacctgtgacattaacaagttagaattacccttgaggagcagaagatggtcatttgtagggggtatggaaagaattctgggattcttaatcttggcattgcatgatttttatgttggctatatgggtatgctcattttgtcaaaatttagctgtgtgcttatgatttgtgcacttttctgtatgtacattatacttaacatttacattaaaatttattgatgacctattaaacac

SEQ ID NO: 196556 - DNA, 203 bp, Homo sapiens
aaacagcaatctgggctggttttgattttgggaattctgatttgggaatcaattaatatcaatatgcaagccattgaagtaggtaagataacccagggagaatgaagagtatgaagaaaagacctgggcttgggataaggtctacagaagcaatttttaaagaacaagagtcagctgggtgtggtggcacacacctgcaatcc

SEQ ID NO: 196557 - DNA, 264 bp, Homo sapiens
tgctctgttcacaatagaatactttactcccttagtgattgatagtgaacatgactataagaaaatagtttttggtggcaaagtttaaaacaaaattatggtctttacctaaagtgtaaactttgtgtctaagtcttggagtggtgagaaagaaggaagggattcactttcatcttttcctctcgcctagaaggagaaatgtgtgggagggaatgaaccaggtgtcttcctggtgcctcctgggaatgtccccagcacacgtct

SEQ ID NO: 196558 - DNA, 370 bp, Homo sapiens
caactccactgatggatttaggctcatttaatccaaactcgactccatttcagccagaaccaggcacctctagaaaggtcaccctaactgccacatccagttcctgatctgccatctgcttcttttccatcacttgtggggtatttcccagcctaccactaatgtgagccctcctgagtcaaaagttcccctcttccaggcctcctgctcagctgacgtcctggaccaggcaggccacccttgttccacttcccctgggaagacacctgggtcttgtgcctgccctggattagggtgggcaaattagttcatccaggactagaagaatggaaataaacagacttgtgtcttggggctgactctgaaaggt

SEQ ID NO: 196559 - DNA, 386 bp, Homo sapiens
cactaagaaagacaacaagggctgttaaggaaatcatgacattgcatagtttgtgaagcccatcctgaccacaaaggtgttgaactgtgaagaagatctgcatctcagaactgatgaatgacttgattgcatgaattcatgattgattaatgcattggtgtgttaccttcattctaatctgataatttattctttttatttttgatctttattttaaaaactctatagcgataggataagttaaaaaagttttactgtgaaacgctttttgtatcatgggaatattgagtcttcacatttgtcagtctgaatcaagaacttgatgctaatttttgtcgtaaaagttcataggcattccttagctcttgattaaaaatatctaaaca

SEQ ID NO: 196560 - DNA, 461 bp, Homo sapiens
ttactgccgattcgctgagcgagggtttacacccttaaatggcgtgtaacatgagtactatttctatggggcgggatcacggtgcagatgggatcacagttgaggacatgtagcagataattgtaacaacagaagcagtcactcttcaccccacttcacagctttggggatgtggaatccatcttttttttaaccaaaggatgcccatggtgcagatctgaatgcaacggtcttccttacctttcatgatagcaacttaaggaatagcacataagaattttcttaattcatacaaagtttataatcaaatagaattactactgttattacacacacacacacacagtcctctcccaatcttaagacaaaagggtttcttagaaactggtgtggatctaatgccatccaagtattattggtggcgtttgtatgctgaactggaaggatatcctccaggcatc

SEQ ID NO: 196561 - DNA, 506 bp, Homo sapiens
cactgggattacaggaatgggccaccatgctcagccatagttttcccttaaaatgcaatttagctgccactttcttactcttgacctttcctttaagtttgtcattcacatcaggcctatgactttcttaaagagaggtgctcagtcttgtttttctttctttaaacttccctcttacagaaggtgttcagtcttaaatatctccatccttaatatctaatataatgcctggaatgtaagtacttaataaaggtttggatgaatttattgatgctgtaggtgatagattttgggcagcttaaaaatagacttttaaacaaaaatacccagatttcatttcaaaataatggggtactgtggaggtgcttagggaagtggtaggaatatgaatgagctaagtaatactagtctctacttttgtatatatttgaaatattccataatgcatagagaaacgtaagttctctatctctgacagttttcagaaagactgattaactatgtgg

SEQ ID NO: 196562 - DNA, 499 bp, Homo sapiens
aaataatacatattatttaaattaagtaatacatatatttaaataacacatattctttaaatatgtgtatactctttatatatactatatttatggtatgcatatgtatatatacgtatttatgacaaaaccatatatatataggccaggcatggtggctcatacctgtaatcccagcactttgggtggctgaggcaggtggatcacttgaagtcaggagttcgagatcagcctgggcaacatagtaagacctcattgctaccaaaaaaaaaaaaaaaaattagggctgggcgaagtggctcactcctgtaatcccaacactttgagaggccaatgtgggcagatcacgaggtcaggagattgagaccatgctggctaacatgctgaaaccccatctctactaaaaatacaaaaaattagctaggggtgggtggcaggcgcctgtagtcccagctacttgggaggctgaggcaggacaattgcttgaacctgggaggca

SEQ ID NO: 196563 - DNA, 178 bp, Homo sapiens
attagattgaatgttacttaaggtcttttctagcttaaaagtcatattgcttgtctacaaatgcatgcctaactctcctttgtaagggtgaccatggctcttggaaatgtcagggtataaatttttgaaagaattccagcgccttatgtaccacattgttctcagaactaatcttgta

SEQ ID NO: 196564 - DNA, 394 bp, Homo sapiens
ggtgactctagaggattcctccacactagtcaaagaagagaggaaaaggttagagtttcactgaggagagaggtcacgcacgttgtttagaaagttagttcactggtgctggcagcatcttacaacaaacagctggtgagttttgattaggagagccagtggttgttaggtggaagactgaaggctacaaattcaggaataacttacaaattacaacaaaggactgcttcaggagtggcacaaccactgccacttctgggcagagataaacttgtaaactgagagttatggttaggcctctgcagtttcgaattgggcttgtgagactgtgtcaggcacatgttcctgtataagcagctatctgtctttgtgtgatgctttggcttggaaaaat

SEQ ID NO: 196565 - DNA, 229 bp, Homo sapiens
ccttatgccagtggctacatttccagcctctcctgggtggtgtttgaggctcaataggggtagagtctcagggcagctgcagacatgacatagatgatattcctactattcctcaccccactctggctgcaaaaaggaagtgcagggaaaatgagtggggagttcctgtatgccagtctgtttcaatggaactatttttggaggaataaaaaagtatgctagattatat

SEQ ID NO: 196566 - DNA, 356 bp, Homo sapiens
aggaaggggaacatcacacaccaggattgtacgattttaaacagaggaggaacaggtagtagtatgatccaatttaccttgtaattgaatcttgttggcatgtatgtagagaatgaagtatgagggactagagtatcacatattcattagccttgtgcagtcagccctctgaattcatggattcaaccaaacacagattgaaaatatttttcttaaaaaaaccatctgtactgaacatgtagatttttttataatccctaaacaatacagtctaacaactatttgcatggcatttacattgtattagatattataagtaatttagaaaggatttgaagtatacagaaatatgtgcc

SEQ ID NO: 196567 - DNA, 135 bp, Homo sapiens
atgggtgtgagccgccccacccgacccccctacaggtttcagagggagcatggccctgccagcacctgggtttcctacttctggcctccagaactatcagagaataaatgtctgctgtttcaagccacccagctt

SEQ ID NO: 196568 - DNA, 527 bp, Homo sapiens
aataaatatcatttgggtagagtagtgtgtatttggtcttcagactatgaatctcacaatcacttgggacatttggtaaaaatttggggaccttgacaattttgcatgtttagttacttcccaggtgatgcttatgtactttaggatctcagaacactgagactgcataaaaattgtggctagggatgatctaattcctcgctactcaaagcatggtcctcaggcagtagcatcaacatcaccctgaagcttgttaatcagattctcacatgctatcactgacctcctgaatcacaatttgcagattaaaaagatctcccaggtgatgtgaatatagattaaaatttgagaagcactactgtagaaaaatggttcttaaccttggctgcacattaccatcacctggagaacttaaaaaaataaagactgctgcctgggcctcaccctagaccaattagatcagaatttccaggagttgaggtctgaacatcattaattttttaaagctccccagcggattttaatca

SEQ ID NO: 196569 - DNA, 207 bp, Homo sapiens
tgagcttgtgacctcacttggtaatgccctgtctcagcatggtgatgactaccttatgccttgtgtcttttccccatagaaagctctgttcatcccaaagccagatcatgggtactgcttccttctcgggtttcctgttgtaggtgctggggtgctgaggttctgctgtgtgtacttcccctgtctctctctgagcagcctcatgag

SEQ ID NO: 196570 - DNA, 420 bp, Homo sapiens
caggaaggaaatgaaaaagagaagaatatgaagtaaacgaaaataatgatgaaggtaaaaagatgaggcaaaagaaaatgaagattgcctggtgcggtggctcatgcctgtaatcccagcactttgggaggccgaggcgggcagatcacaaggtcaggagatcgagaccatcctggctaacacggtgaaatgccgtctctactaaaaatacaaaatattagtcgggcatggtggcgggcgcctgtagtcccagctactcgggaggctgaggcaggagaatggcaggaacccgggaggcggagcttgcagtgagccaagtgagccgagatcgggccactgcactccagcccgggcgacagagcaagactccgtctcaaaacaaaaaaagaaagaaagaaaatgaagataaaggtgaagaag

SEQ ID NO: 196571 - DNA, 286 bp, Homo sapiens
gcaacaggtttaggctgacaaattttgattttgaagaataatcatctcagattaataatttactgcattgttcctgtattttactacatgataaattctgtccctgtgtagaaattattatctggaaaattataaaataattagcctgttataaaattagatgcttttagagtacagtgtaattgaaaagtaaaagtgcatttacttacttaaaatgtcattttgctacttgatttttttataaaacaaatattggatagaaaaagtgttcttatccattgctttc

SEQ ID NO: 196572 - DNA, 223 bp, Homo sapiens
cagcttggcagggagtggggagtagaggactcaggaatgtgtaaccaccagaaccttcttagaaatgattccaacctggtctttggaacttagaatcccaaatgttggacctgaagatttcatccaagtccacacttttcttttccttttcttttcttttttctttttttattaaatcagaaaaagaaagatccagtttacatgactgtcagtcaatcatatg

SEQ ID NO: 196573 - DNA, 583 bp, Homo sapiens
aaaagtggggaacaaagttaaaatatagagttagggttacttttctttttgttagtttgtttatgctagtgttgttatcagcttagactaatgggttataagacagtatttgcaaaccagatggtaacctaaagtcaaaaaacatacaatggatacacaaaaaataaaaatcaagaaataatgccacctgagaaaatcagcttcactaaatggaagacaggaaggaagaaaagaagaaacagcaggccatcaaacaaccagaaaagaaataacaaaatggcacaactaagtccttatcaataataacattggatatcaatgaactaaactctccaatcaaaagacattgattggctgaatggataaaaaccaagatccaattatctgttgcctataagaaatacaattcttttataaagacacaaatagactgaaaataaaggaatggaaaaagatatttcatgttaatggaaacaaaaaaatagccagagtagctatactcatagcagacaaaatagatctcaagacaaaaatgataagaagagacaacaaaggtcattatgtaataataaaggagttgact

SEQ ID NO: 196574 - DNA, 518 bp, Homo sapiens
gatctagaggatcccgattagggtgaggaaagtgaggtgagtcatgccagtgcaaggttggattctatctttatttaaattccgatgtttgttcatcatggatttctgcattcatttttatttttaaaatattaaaatatttttatcttgattactgatagggtttagctctgcgtccccacccaaatcttgtcttgaattgtactcccataattcccatgtgttgtgggagggacccggtgggagataattgaatcatggggacagtttcccccacactgttcttgttgggaagctcccaacaagatcatagacatacgtggttcagtcctaaaacaatgtcacattcaaagaaatacaatttcgtaaatgaaattgttttaaataaatttttctttatcgttgtctttaaattctttagtctcacaccatagaaaatagattaaatgctaatccattcttaaactccacaacacctcttatttgtattctatttccaataaaaatcgggtaccgag

SEQ ID NO: 196575 - DNA, 392 bp, Homo sapiens
acagacacatgccaccacacccatctaactttaatattttttataaaggcaggatctcaccacgttgcccaggctggtctcaaactcctggactcgaacaatcctcccacctcagcctcctaaagtgttggaattacaggtgtgagtcacaatgcctggtctcatagtttttattctgatagtttatgctgttattcatgactccttcttctaaccttccctggctggtgttacttatgtagaaaaggaagacaggtcttgttagttgccttcaggaagactaaaaatcttgttcgggagagagaaaccatgaaatgaaactaatttattggccttgaagaagtgtcaacaacatttaagtcaagagcaggagaatggtgctggggaacaaa

SEQ ID NO: 196576 - DNA, 451 bp, Homo sapiens
gaccctgcttgaggtgctgacagtccagcagtaaccatgtagttatatggtcaactaacttttgacaagggtatcaagaccattcattgggggaaagaacagtctcttcaacaaatactgttgagacaacgcgataagccacatggagtgaagttggacccttaccttacacgtatataaaaattaacttagccactgcacctgagcttgtatttattcatctattttatttatttatttatttgagatggagtctggctctgtcacccaggctaaagtgcagtggcacgatctcagctcactggaacctctgcctcccagttcaagcaattctctgcctcagcctcccaaataactgggattacaggtgcctaccaccatgcccagctaatttttttgtatttttagtagagacggggtgtcaccatcttggccaggcaggtcttgaact

SEQ ID NO: 196577 - DNA, 343 bp, Homo sapiens
ataactgaccattacctcaatctctagccccttttccctttctgaagaatggggagtaggactgaaagttccaagctctaaccatggccatgggggctaccagctcccattctgaagctagcctagccagaagcctatccaaagttgcctcattagaacacaagatgattttatccccctcaggaaattctaagggatttaggccattctgtgtcaagaaccaggatcaaagaccacattatacaaaagatgtttctaatactcctagcacttaggaaattacaagggtgttaggagctctatggcaggaaccagggacagagaccaaatatattatatttta

SEQ ID NO: 196578 - DNA, 222 bp, Homo sapiens
gttaaattcatcacatcaacaggcttaaaaagaaaatcatatttaaattatatactaaacagattttttcaaatctcaataaattaagaaaaatttggtaaattcaacaactcatgactgtaaaacaaaaacgaaacaagaaacaagtttagtaaactaagaattgggtgaaagtttcctttatctgagataagtaggatgctataaacaccctacagcata

SEQ ID NO: 196579 - DNA, 626 bp, Homo sapiens
tcccaaagtactggaattacaggcatgagacatcatgcccagcctgacgtcttagatttaagtcttcaatctattttaattttatttttgtatatggtgagagataggggtctagttttattcttcagcatacggatatccagttttcccagcactatttattgaagagacttttttcccccaatgtatgttcttggcacttttgtaaaaaatgagtttactgcagatgtagatttgttgctggctggttcatcctcatttccctgaccactgaatattggagggccctaagattcaggctccaggcctttcctctttctcatgtatgtctccttggtgatctcatcctgcctgttggttccattggtctatgtgtctgtttttatgccagtaccatgctgtactatatactgtgtagtataatttgaagtcaagtaatgtgattcttcagttttgtcctttttgctcaatatagcttggctattctggatcttttgtggttacatataattttagcattttttttctaattttaattaaaaaaattttttttgtatagatgtggtctcaccatcttgccctggctggtttgaaactcttgggctcagacagtccacctaccttgg

SEQ ID NO: 196580 - DNA, 450 bp, Homo sapiens
ctcaaaatgttgagagaagggttctagaagaatccttgataactggaaaggtgaagtttttacattaacagaagaggtaaagagtaataatcaaaaataggaagatcttcagtcagtgatgctaatgtgtctgaagagtcagggtccccagtaggggaaggaagaggaagaaagtgaaaggaggctaaaattttcactggcattgtaggtagaaagactagggtttgagtggacatctgctatggaagtcaggtgacagtggaggccaaagtaacaaaagcaggcagggaaattctcagcagcatcagagtaatacaatgaaattcctcatagaaatactatcaaggaaagacagagaaagccattggacacctatgtcaatcaactagggcagctttgctaacgaacacactcttaaatctggcaatcgaaagctgcctgtttaaaaac

SEQ ID NO: 196581 - DNA, 494 bp, Homo sapiens
tgaatagttactactgccagtgctgctgttgctgctactatcactgctactaaagatgtttgtgtgtactctaagttccaagctggactgacacttaggccaggtgactcagcagtataatgagtgagttaaaaatttcttatgtataaagtctccacagataatcaaaagctggctgtttttggaaatcctaatcaataattgaagcacggtctgagagtgtggttgggaagtatccatgtgtgttcctggataacgcatcaagcttctctgcctctcccctcccccaggaagattggtagagtggctctaggagtctttcctgaggcccagctcaggactcatgacatggtggccagagggcacttcggcattgtcagatgaaacgcactgtgtaaagtgtttgttcagccagggatcttttcccctatgcctcctaatcaagtaactcttaacccctggcggaatttctctcccatagccctctcgttggc

SEQ ID NO: 196582 - DNA, 240 bp, Homo sapiens
aagagagataaggctaaagggttaggtaagaaaaaaaatgaaaaatatgaaagataaaggggaaaaaagagagttaggtaaggagcacatcttgaaggttttgtatatgagattaaggataaatggagtttgaattttattaatgggcaaaaaagagccacaagaggattttaagcagagaaatatcaccattgttctaagcaagaatgggaaaagtatcagatgggttccaaccatagg

SEQ ID NO: 196583 - DNA, 354 bp, Homo sapiens
attacaggcacgagctacggtgctggctgtgaatctagctctttcacttagcatactgctatttacaatgcagccatgttgttgaatctatcagtagtccctttttatgattgagaagtagtctagaatctactggagtcctggattaacagaagataacctcaaatgtttcttcaaagctaactagaatattagctagatgttaaagtctgtctcattggaaaatgacttacaattcgattttaattttaactgaaggtgatacaattcttgagttttctgttctagagtttgccgcagaagattctggtactctctctctttttcaactaggtgttccaaaagtctggttta

SEQ ID NO: 196584 - DNA, 239 bp, Homo sapiens
acttattctcttgggatttctctttctctgataaactagcaacttgttgagataaatcactggattccacatctttcattttctcataaaataaactttctattgacataacttggcaaagagtatcctaaattctgatcattctcattgagtctccaccatgaaacatttcagtgtgttgcttctttcctgtaactatataataaagtacagccttataatcttttagtcagcagtta

SEQ ID NO: 196585 - DNA, 439 bp, Homo sapiens
aaaatttggttcttgaataatatcttttcaaaaatacttacctttactccaccttcttttaaaaagaatttgaggtgagattctaaagtataagctatacttaagcatgagagaactcataaattatgtttcatatatgtggaacctcttgacattcagcataggcatttagtcacaatgaatgagctgttagctcctgggtgtgccttcttccagaaaacactggcagggttcaggcagcattgtctgagcatgtaatatgtgatttgtagaacaaataggttaaaaatcttttttatttcaataaaaatgactatctaattctgctgattcccatttcctcctgattatttcataaaagctgcttccagttctgaatagcttttaattacttactagttcttaaatactgttcccagaatcacttgggtggctttaa

SEQ ID NO: 196586 - DNA, 201 bp, Homo sapiens
gcaataggtcaggggcatttttttgtggaggatttctgtaagtagtaagataaatttaaatagtattctggttgtaaacaaatgttctgtagtcttgctttatgtttaaactaaatctattctaattaattcagtttcaacctcaacttaatattttaccatttgcttggactgttttcatttttctttagggaagaaaaa

SEQ ID NO: 196587 - DNA, 482 bp, Homo sapiens
agtagaaagactggccctgggaaaagcaccatttaagaggaagaagactaaagacagggaaagagactagaaaatacgaaaaaagataagactgaaaattatcaaggaagtcataatgcttggaaaactccattgctttcaatagatgcatatttaaattgacatctattaccaagacctcaaatagagtgggatgcagatgattcactgggctaacaaaatccaatttctttcacaagtcccaccttccaggttaatcagaatcctaggttaatcagaaaagtaatactccaaaatctcaaaaacctactgttactataggtataactgctctaagccaggggagatctaacctaggcaaatattctggaactttatagatgaggattatctattactcagagggtatatcatataaaacttcctaatatccaattagaaagcagcaactttaaaatacctagtgaagagagtccctatta

SEQ ID NO: 196588 - DNA, 432 bp, Homo sapiens
ctgaactttctctagatgggcacagatcatgaataactcagaaaccattagcatattgtgtgcttaattaaggctggaaagtgctgaggctttttgcaggcgcagttagcaggcgaactggtcagcagggtttctggggaacgtagatttgcgtgacaggggccctgtgttgctaaggaattactgcaggcactgagaaaagtctcagcgtcagacactcctccacctcccgggtcctgcttccctccctctcccctttccaggcaactcacagtttaggggtgtggttgtgtgtgttcaagctcttgggttttacatataaatgcctgagacttttctgcagggtttaaaaactaacatcttgtcttacagctcttttaggatttgtcttttagaatctccagtcctcacaggaaaaccccccaattaaaa

SEQ ID NO: 196589 - DNA, 331 bp, Homo sapiens
atgggtatggtatatgtggaaaaataagtacatgtccaataagaatgaattgaatgaaacttgtctgtagcctttggatccattcgctggagtcttacgctacttcaggtgaatcactgctatgctatctcatcaatgagagaaggaccaaagacattatatttcttgggttttattaataagcagataacttattaaaaagccaaataaaatacaatcccatataaatggacaattctatttctgcacttgtatataataaaagtgaaaatgtgatatttgaatctctaattaaacatcccctacacactatttctttttattgttaatg

SEQ ID NO: 196590 - DNA, 496 bp, Homo sapiens
gaaagctcttggaattaaattttgagatgtaaaggctggctgacaaattcacagaaaccctctttccgacaccaacttataaatcctaaggcatcctacaaccccgtgggtgctggtttctagtttgcaacgctctaacatagcttggtagagctcagtgggctgggaccataagcattcgggattgtgccactgaaaaactgatgtcacatcaaaaggaacacctttcttctaatatactaaaaaggttttgtacaggctgggtccagaggtcttagggctagccaattcctgctcccaggtattctaagaagccggagaaagctccctgcaggtaaggacccatcggcgcttcccgcactctgccgcgcgggaagcgaaggttggagtcctttccccacccccggagggtgggcggggccgaaggaccgcaccgccccagacccgccccctgcgcgtggccccgcccacagctgctcctggccgtgcggccgcg

SEQ ID NO: 196591 - DNA, 1082 bp, Homo sapiens
gcagagcaggtgctcaagagaagcccatcccccatcagtcccccagtgggactccccatccccaccagtcccactggatctacagggtctgctctcaacaccatcctccccctgcactgtcgatgggaagaagctgcgggctcagggtgctctggcagctgctgggacctgccgcacttttcccacgtggccctgccggtgtgtggacgagcctggcaggcctgctggtccatgctggcaggtaagtctcttggctacctcaggaggctttgaagtagagtctgggcaactgcaggtcagcctgctaagaggaggtgcaacttatggggccagccgtgtcggttccctcccatgccagccctcctgccaccagaccagcactgggctgcctgttgtggcttccggacctgggcttggacctaccatgggtggagattctgatgatttgagcaaccagcccagggcaaggtcatctccagagacagatgacggcccctctgggggcagcaggacatgtgcagggtctccaaggcgttgtgtggcaggtcttgctctcaggccagaccgaggttgccatcacccctgtcttcagtttacaccaggatcgagtttggaatctctatgaaatccacctttctctgctggaggacatgtggagttgcaggaggtggtcttaggggtagtggtgtggtatttgtccctgattgttgactgccagtggaagctccactggttactagatgtaaggggtcaggaggaaggactcactcccacacacttcttgtagtatgatatcggcgtgtcctgggacagcctgacgtgggctgtccagatagagacaggccagagccagcgccagcgccaagcttggataggcccacgctcaagccccatggactgtcagagggctctgctagagtggtctgggtgtccacgcccacacccctcccttgatggagccaccagccagacctggaatttgtaggcaggatgttcttcttggaatgctgctctttaaaacagcacaggccaggtgcggtggctcacgcctgtaatcccagcactttgggaggccgaggcgg

SEQ ID NO: 196592 - DNA, 544 bp, Homo sapiens
  misc_feature (40)..(40): n is a, c, g, or t
  misc_feature (152)..(152): n is a, c, g, or t
  misc_feature (194)..(194): n is a, c, g, or t
  misc_feature (378)..(378): n is a, c, g, or t
  misc_feature (386)..(386): n is a, c, g, or t
  misc_feature (388)..(388): n is a, c, g, or t
tgtatttaatttatatgtgtacttaatcacagatacattngtcaacatatttatctgtgtctcccagataagtttcttaatatctttagcctctgttactagcccgatctagaaacacttaataaggccaggcatggtagctcaagcctgcnatcccaacaatttgggaggctgaggtaggaggatcatctgantccaggagttggagaccagtttgggcaacaaagggaaaccacgcctctaaaaaagtttttttaaactagccaggcatcatggtgcaacacctgtggtgtcagctactcgtaaggctgaggtgggaggatcacttgggcccgagaggtcgaggttgcagtaagctgtgattgagccactgcacancagcctgngngatagagggagtactctgtctttaaaaaagaaaaaagtgaacaaagtgaacacctacaaccaactaatcttcacaaagcgtgcacaaataaacaatgtggaaaggatacctttttcaataaattatactagaaaaattggatatccgtatacacaa

SEQ ID NO: 196593 - DNA, 157 bp, Homo sapiens
aggagatcttggctctctcaaatctttgcactcttgatccaaattgaacagtcccatgatcttcgaattattcctgggcagttctgagcccaagcgaccagtttttacaccatctaagagagtactgccatgtgggtgccagaaggcctgttttgtg

SEQ ID NO: 196594 - DNA, 667 bp, Homo sapiens
ctgagccttgggagcagcctggggtgacagcttcaagttgtgcagcttttcccagacatgctgcctttccccatgtgagccctctgttaagtgaaacacactctttcaagaagcccccagatgagttagaatgctggaaataagttctgctctattccctcccgttcaagggagggaaatgagcaacactactgaaaagttctggtttacactgagattagaagtttatactataatgtaaataacactgctttcttcatctagaaagacttgctacaaaaagtcaactgaattaaatgaaggaggtacttactgatgtagtttatttttattttgatgtaaatgcctttgtggacaagaaaccccacggcagctcatctataagccacactgactagcactgtttcagagcacttttaatattaccttacttgaacttttcatggactattttctccatagttgcagaaataagaaaagaacgtgggaaagatagcactgattatttttagtaaggactactttttttctatctatctcataagtcaaaaggtgtttcatgtaacagaacctcacttttttgctttttaaaagcaaagtaaaaatagaacataactaaattcaactgttatgtaagttattttgtcttctcagacttaatgattta

SEQ ID NO: 196595 - DNA, 421 bp, Homo sapiens
tattccaaaactgaccacatagttggaagtaaagcactcctcaacaaatgtaaaaggacagaaattataacaaactgtctctcagaccacagtgcaatcaaaccagacatacttttcatctgttatactggaaacatgttaaagagttaagttgtatacctatgaaatttgtcattgttgaagcctcttgtgagaatgttttatatatggggaaaataggtatgctctatagaatggaactgcaacagagggcaatttatatctgctacaaatttaaacatgccggccatggtgggtggctcacatctataatcccagcactttgggaggctgaagtgggtggatcactgtaggtcaggagttcgaaaccagcctggctaacatggtaaaaccacctctctactaaaaatacaaaaaaaaa

SEQ ID NO: 196596 - DNA, 523 bp, Homo sapiens
ctcgtcatcccacaggatatctgacaatcactggagacattttttattttcataacaggggtcggggggcatatgctactggcacctagtggatagtcaggtttataatgcacaggtcaacttcaagaacaaaaaattatctggtcaagaatgtcaacaatgtggaggttgagaaccctactctagagcaactatttttttttaagtgtagctaccgagtcgaggaaataaaatggaatccttaaaaaaaaaatcaataaaaataaataaataaaagaagactggaaaagagaccaaaaggaacaaggaacatatgagacaaataaaaacaattgtcaagatgacagacttaaactcaatcctaccgataattaatattaaatgtaaatggactacaccttccaattaaaggtcagagattatcagactgagagaaaagacctaactatacaatgttcataagagatatattttaaatacaaaggcacagatgggttaagaatacaataatgaaaaaaagata

SEQ ID NO: 196597 - DNA, 864 bp, Homo sapiens
gcaatcaggaaaagcttcctggaagtggggataaatgagctgattctgtaggaataggtaagaattagatttatgggaatagagaaggcaggagaatattctgggctacaggaactacaagaattgtttacccagtttggctaaagcatgggcctggggaagggagggaagagaatagaaaataaggttgagaaggaagatgggggctggctggtgcaggaacctttgaggccaaagcaggttggatttttcctctctgtggacaaacagaacatttgaagatttctggacagtttagtgtaaggcagatgacgctggcagcaatagggagggtaggtgagcagtggagctgtggtgcacaactttatgggacatactggatgggcagcactcagccttcgaggccctgtaagagggaagggaagagctaggaggctcctgcatggatctttagggtatacctaagacactggcagggccatcagtactggacttgaaaagaacatgataaagctagccaagatacagttaacagaatctggcactgattagatgtgaaaggcaagaaaaagagaggcactgaaactagttctgagtttgagagaaaagggagatagtggtgtggtactggcagcactcaaagtacacacacaatagggtccgaatggaatcacaaacacatagccaaagcttgcagtacatggctctctccccatggacctggatgtcctgattggcaagttccatgtcttcagagcctagcctggaacctagcacaaagcaggcatatagtcagaaggaaaaaaaggaaggaaggagaaaggaaatgaataaatgaatgaattggatgagggcagctcctag

SEQ ID NO: 196598 - DNA, 468 bp, Homo sapiens
agggaaatgctgctaccccaatcctctcctccccctcttcctgccacccctcaatttatagataaggagactaagactaagaggtcaaataatttgttcaaggccactggcactaggaactaatggagctgagatttaaattgtggtctgactgcaaagtccccagcgcttaacccgtctatcagctcacactcactaagcacctttgtgccccacagtactcttgagagatgtacaacagacaaattagtgcagattctcagctctttaatcaagggacttgccatctggtttaaatggtgcatggtccacaatgctttgacataaatggcccagggtatcttcagtgggcctaagaacacttcctccaaccttatgtccagacacacaatggcacttcattacagtttgtgggagtccagtaatttttaatcactggaataaagactttgatgatgtgaactaaaa

SEQ ID NO: 196599 - DNA, 495 bp, Homo sapiens
ccacgagggtcccacgttcctattctctttgctgtggagcagtgtttgaaatagctaacactaaaagtggcaactattgttttgttttgtttttgtttttgagacagggtcaccctctgtcacccaggctggagtgcagtgatgcaatctcagctcactgcgacttccacctcctgggttcaagctattctcgtgcctcagcctcctgagtagctgggattacagatgtgcgccaccacgcctgactaatttttgtatttttagtagagacggggtttgaccatgttggccaggctggtctctgactcccgacctcaggtgatcctcccaccttggcctcccaacgtgctgggattacaggcatgagccaccgcacccggccgcaaatactggttttgttgagatgaacatcaaggtctcgtgtttagccaaagataaatactgattcatgacactccggaaaatttcatctcatccttgaaaatgaagactttt

SEQ ID NO: 196600 - DNA, 508 bp, Homo sapiens
tgcaggatacaaaatcaacacacaaaaatcagtaattttctatatactaacagaaaactacctgaaaaagaaatcaagaaaacaatctcatttacaatagctaccaagaaaagtaattcttaggaataaatttacccagggaagtaaaagacctatacactgaaaactacatgaaagaaactgaagaagacataataaataaaagggaatcctatgttcatggagtagaataattaatattgttaaaatgtccatactacccaaaacagtttacggattcagtgagatccctgtcaaaattccagtgtcatttctcatagaagtaggtaaaaaatcctcattcatatagaaccacacacacacaaaaccctgaatagccacaggaaaaaatgctcatcatcactggccatcagagaaatgcaaatcaaaaccacaatgagataccatctcacatcagttagaatggtgatcattaaaaagtcaggaaacaacaggtgctggagaggat

SEQ ID NO: 196601 - DNA, 823 bp, Homo sapiens
aatatggagatgccaaaaagaccaggcacacaaagctgaaggtgctggagatgccaagggaagtgtgtgcatttttgataactgtgtacttctggtgactgtacagtttgaaatactattttttatcaagttttataaaaatgcagaattttgttttaccttttttttaaagctatgttagtacacagaacacttcattgttgcttttgggggaaggggcatatgtcactaacagaaggtctccaaagctgcattgatgtggagaaaacacctttcccttctagttttgagagacttcctcttggctcccaggaggagggattccctgactttgacacacatggccaccttggcacaaaagccttgtggtatagaaaaacaaatttgtttttatgtcctcttctccctttccatctttcagcatagacttaactcccttaagcccagacatctgttgggacctgacccctagtcattggttaccagtgtgtcaggcaatctggactttccagtgatgccactgagatggcacctgtcaaaagagtagtggttccatttctagattgtagatcttcagataaattctgccattttcatttcacttcctgaaagtcagggtcggcttctaaaaatttgttaaacaatatgctaaatgtgaaatgtcacccctcactctaaactttccccgttcagagcatcagatgaagacttcattgggttttatagtggctttctgatttttggtagtccattgaagaagggagtttgaaagttgttgtatactgttaacgattatctgcccatgtcctgcctgaaataccgt

SEQ ID NO: 196602 - DNA, 243 bp, Homo sapiens
cgctctcttgctatgttccagcctctctggactctgtgttcctggagcaagccaatccgttcccaccccaaggtatcagcacctcctggaactttcttctcttctccagactttggtgtagcccctttttcttttatctaatgttcctaccccaatccactcattattttaccttaccccattttattttcatcattgacttcttctctgaaatgttcttgttcattacagttgtgtgtttat

SEQ ID NO: 196603 - DNA, 575 bp, Homo sapiens
ttttagagcaccgttagcaggtccttgtcttgtccctgactttcacaatgactctggttgcatttagtagtctttatcatgctggaaaataatcctctggctctcacatgttgggtgttttgaccaggaggcatcagctcaggctttggactcccacatcagcaccctgtaggcaccctcgcaccccagtggcctcctggtaaaggctgctggctttctctaatgaaacacaggccccattttcctggcaattaggatttataaattggggggggttttgatctgtgttcagataccacaccacattccaaaggcagttccaggtatttctgaccccacacctgttggtctcacctcagagagtggcagctgcacatgtcaaggttgggaggagccgctgccagacctgggctgtggcgaggttagagcccaatgggtcaccgggcagcaggtgcttcctgtaggtgtaacaagcgtcccaccagatctgtgaattcacagacaggctgtgtttccccatgcaccagcacagtgatgagagatcccaggcatttaaatgggttgtattctaggcc

SEQ ID NO: 196604 - DNA, 916 bp, Homo sapiens
gctcctgacctaaagtgacccacccgtctcagcctcctaaagtgctgggattacaggagtgagccagcttgcccggccccaaaacctgactttcagacacaccttcgaggtcctcactccccaccaggtgcagggagttttagaaataaagggccatgttggctcttgggaggaagacttgccgtgatcaggcgccctcctggactccctcaaggttactataaaaacctgtggtacccttaatccagcttctctcatgccagcctgttcctgggagaacctaactcgttccagggttgcaacatgggccaggccttccacagtagaatagacctcaggggtgcaccctctagaatcctggtgctgaatggctcacggatggaagtagttgcatggaaaataaaaaaagaggggcaggacatgctgtggttagtctacaccaaacaacagatgcccacactgccacctaatacctcggcgcaaaaagcagagtgagtcccctgaccagggcccggctcggggtcggggaaaggcgcttcacgggcgtgcggactccaagggcgcctcccttgtccctcgtgcacacacaacatttggaaagaacaggtcttctaaatgcaaggaaatcccccattacatatgcaaaagagatactgcggcttttagaggctgtgcaggagcctgagcgagtggcagcccttcactgcctgggacatcaaagaggaaactcctcagtgacattgggaaatgcaagggctgacaggaaagctaagagggaactccgggagcagtggcccagctagccttgttcccctgtgcccattctcttgacgtaaatccatcttaactacaaaagaactagcagctcagcgtggtggctgtaatcccagcactttaggaggccaaggcgagcgga

SEQ ID NO: 196605 - DNA, 379 bp, Homo sapiens
gagcaggtgtggagagggaggcattcttatggaggcttagtgaggggcagttgaggataggggcctcaagttagaggcagtatctgggctgagccatcagcgattcccagggtcctcaaggtcatgagcctgaattagatcacccagggtgtaggtgtcactggagaagagaagagatgaagaactgagccccagggctctccaaggtttagagtccagagagtagagaattgactaatagaagttcaggagatgaagctggaaagggaagggagaaaaccagagaagtgggatttcaggtgccaaataaagacagtgtttgaaaggaagagaaaggtgggtattgtgtgatggtactgttagaccaagtaaggtttag

SEQ ID NO: 196606 - DNA, 707 bp, Homo sapiens
aacaggtggttatgtcttccattatttaaacacatattttactgtgcttctcttatcagctactgtccttctctctgctccatttgcagcaaactccctgaaagagttgtcatatttcttgtttttttcttcttccattttatctttgcctaaataatcaggctttctctctctctacttcaccattgttgcttttatacatgtcaccgatgacctccaatggataaatccaatgatcagttttcaatcctcatcatactgccacatgcagttgataacattctcctccttgaaacactgtcttcattcggcttccaaggcacccaaaactcctccacccatttgtcttcatcctactttactggagctcttctctcctcttctctttgacttttgaatgctggagtatttcggcggttagactttagtgcttttccctgtctatactcacatacttgttgacattatgctaatgacttctaaatgcaaaactttatttccaaatataggctctcatcaagctaactgcctaattaatgatatttccactggaaggtctaacagacatctcaaactcaacttccgaaactgaactctttatctatctccccaacactctttcaactgcagcctttctaatctctgttgatggcagctctgtcctttcagttgcttgggacagcatcttgaattcgtctttggctgag

SEQ ID NO: 196607 - DNA, 437 bp, Homo sapiens
tttctgttgttttaagccacccagtttgtggtaatttgctatggcggccctagtagaaaaattcacacccccccactcttttacagaaaatgttaccgtgtgggccttggatctgggttgtggagtgaccatcaaagggcccagggaagcaacccagaattgtggaggtgtttacacactgtggtgtgaaccttaaccaactggaaacaggagggaaccagttaaacaatttcccctgccttcttcctcggactgttccatagtatgatttcctcttgcagtctttctgggaaagcctcagtgcctactggccacatctgtctagccaactgcattgtttcttcccaggtcattgtggagtggaagctagtacatcacatcacattacatggcattgttttgtgtttttattttgcctcattttcttttttcctcac

SEQ ID NO: 196608 - DNA, 161 bp, Homo sapiens
cacagggttgggaggggagttctacatctgccatcctcctctcttccccaatttcctcttgaagttcctatcactacacagaagtctcacttccaagtttcactctcatcctcttgactccctcatgtaattacccacattgtaatagtaatagctgccca

SEQ ID NO: 196609 - DNA, 354 bp, Homo sapiens
aaaataattgcttataacctgttacatagatttcctggtcaaccaggggttgaggcctgccatctgaaattgctgttgtagtccagctctcctgctgtagaggaggatgctgaggttttgcctcatattatgcttctcttagtcacaaatctgaggccaaatgcaactgtactgagggccacccctgcccagcctgcccctgctgttacacctgaggctttgttaagagtcttcctgggtcatgtctgacctatcctgtggttttatgcctacacatccccaccgcccatgcacacagctacacatgcatggctcccggggaggcccactgggctctctctggccatcaactgt

SEQ ID NO: 196610 - DNA, 541 bp, Homo sapiens
atctgctgtccatgatatagttagcagttaccttgcccagttgtctaggaacctagcatagagtcacttcctcttagtgcttctggttagtttcactgctgtgtcaaatctccagaaacaatgaaacaaagggaaaagggggatgaaactccaaattcgtccattttgatatttgtgcatgtccctggcagaggtgtacagtggaagtgttaggcagtaatgactgaaaagagatctgagaattgttcagattgcactgttttctccgttacttttgtcctttctgatgcctgataaatgagagctttgaaaggtgcacttttctccttgggtacttcttaattagaaattgagtatgttgaggacccctcggatggagacctaaagctgtgctgtcctccttctctcccctcattcttcttggccctagaaaccattaatcccaaatctccttctgcttcccaaatcacttcctgctggtggccctgtcagatgcagctaaggctggaaggtctgtggaaaattccaaaatggctgcttt

SEQ ID NO: 196611 - DNA, 598 bp, Homo sapiens
ccgagcagctgcttcagggaggcccgggagcccctagggcgggcagccccggagcctgcagctgcgacgcagactcggaaactacaactgcgcgtgaagccgactaaagttaacgcctgtgtgattgagtcagaagctccttcaggaacacaggagtggggccgactcctggaatccggccccgggtcgcttataaatgcgccaagaaaaaaacgtcaccgaaaaactttatacgcgttcttgctttggtccagaatggtaaaaagcctatcctttgagtgtgtcccgtgatggggttaactagcaacccttgaaactagtggaactcaaaagcaaaacaaaaagccattgtacccagccgccccgggacctgggccggcgcccttgggaagtctggcgtgaaaggaggggtggctttggtttcagggccgagctcgcctctcccgggttgggttcagcagccgggccgggtgggtcgtgggcaaccccgggaggcccccggtcccggcgcgcggcgaggccgccctcggacctggcacttgtcactcgctgtccccggcccgggcgtcagcggggagacgcagaagggcggagggag

SEQ ID NO: 196612 - DNA, 247 bp, Homo sapiens
aacttccttcaggaaatcttcatggattacctgaactacatcttaaactattagccatcaggctacatctgaaacacttagagatttgactgtattcctctcttcttgggggtccctaaaatacactgaagttcctgggcctgccagagagtgacattccttactcatctgtggttcttttttttttttttttttggcttttttgtttgtttttgtttgtttattgagacggagtctcactccgtcg

SEQ ID NO: 196613 - DNA, 313 bp, Homo sapiens
tctgcttacactgccaaacctctacaaccacagaggacaccaaaggagaatactggtggaacaagaacagtagggtacagctattcaccccaatagttgttagttatctaaccattcacaaaaacccgtaacacaaaaactacactgaacacaaaaataaatgtttaatccctttagctcttttctaagtatcaaaagataatcacaaatctatgaagaattgccaggcacagtggctcacgcctgtaatcccagcacattgggaggcagaggcaggcggaccaactgaggtcagaggttcgagaccagcctg

SEQ ID NO: 196614 - DNA, 488 bp, Homo sapiens
attcttgcagttaatctctttaccatctcaacatttcctagtttattactttttaaatccatttctgctgctgaagaagcactatccctataccttctcctttctcaaaataatccctttgaaggtgactttctgtttccctaactcatcttatactatacttcacatgaattatcttaatatatttgcatctgcttggcacaaatgtgcataatccacagtttctaccaaatagtctcagtctttcaaacatacaatctatacttaataccaatgaacttacttcatatccctcccagttttaagagtgtgtgatgtactaaatggttgtaaaatgaatggactttcaaatatgccttagttcctaatgtttattatggtttttaaagaaatttagtcagtctatttgagaggaaaaagttctattatctcatctcataaggtcattctaaaaattaaatatgtattttgtgggttagcagtgactc

SEQ ID NO: 196615 - DNA, 109 bp, Homo sapiens
cggcataagcagaggcaggaggagggagggcaaggtgccaaggatggctcctcagaacgagcagtgactcgggctgggctggagagccctgaacttgttctgtctaaag

SEQ ID NO: 196616 - DNA, 210 bp, Homo sapiens
atatggtgttttgagtattttagaacttggtgtagatctgtaatgcaattaatgaagatataaataatttatcagtatctcattagtttggggatggtggtagtaagtgtgcattaatgaaacatatgcattatataatgtatattttttaaatatttagacctgtaaagtaactcgtagttggctgataaaactttgtaaagcaaggat

SEQ ID NO: 196617 - DNA, 432 bp, Homo sapiens
ctccaaagtcttgttcatacaatttcaaaataaaataacttttctattccaaaacagtatttatttaagtgggccacacagtaatccaattaaacagtgactcagcctcagagggctgagccaatgttctcatcaattgacagaattccatgttcctatagtgtgcctctataacccttcaaaatttaattgaaaagtaagagatgtaaatgttcccagatgcccatggattctgtgaagagctgtgtttctcaatttgaagagatggaaggcaaggtatgtctaaatcaccaggggctcttttcaaccccacacaccctgacaattccctccccccagtgcaacagccctacactacaagagtatcttatgccttctcaagtatgtcaatgatagaaaaaaattttaagccactggccaggtgcagtggca

SEQ ID NO: 196618 - DNA, 110 bp, Homo sapiens
tccatactctgcagccaagaaaaacctccctctatttttgttttacaaggaaagatggtcacaacatattattggaccgaagtgtaggttataagacagtgtgtttaaag

SEQ ID NO: 196619 - DNA, 413 bp, Homo sapiens
tctgctaaaaattaatgtaactaattgtgctctattataactttttaaaaattaacgaatacaaataaaatgctggtcccaggatgctttttgttcatgaaagaaaaatgacattcaaaacactatgtagctggccaggtgcagtggctcatgcctgtaatcccagcactttgggaggccgaggcgggcggatcacctgagtttgctagtttgagaccagcctgaccaacatggtgaaacaccatctctactaaaaatacaaaattagccaggggtgctggcgcatgcctttaaccccagctacttgggaggctgaggcaggaggatcgcttgaacccaggggccagaggtttcactgagccgagatcgcaccgttgccctctagcctgggtgacagcgagactccatctcaa

SEQ ID NO: 196620 - DNA, 424 bp, Homo sapiens
gccccgaagtctgtgtccttaacctctgtgcttactgactctgcttatatctgcttatgaatgcttatattaccagcaggtacatcttatttttttccgtgttatggtactagcatttctaaaacatgttaagtatgataattttatgagtttatatatttagagacctaacaaaatgccagcagatatataaagtgtgcaaaatataagcaggatcacattacaatctaggactacttgtgacctgtacatatgaaccattactcagttgttgatgggtcaaggaggatggaggcacctcataaccagacatgcagacaaaacctcttccacctgctgccaaattccaccccctcttcttgtctctggttgttactttccattctcttttctgtctctttcaaggcttgatgagccttgggga

SEQ ID NO: 196621 - DNA, 614 bp, Homo sapiens
aggatcccccggggatagtgccacagcttcccagctggggtgagaaaactaatcttgaactatgtggctataaatattatttatcagaatttttatattcatttaaaattgagggtgtagagtcctttcattttaagatccagaaacagccttggtccaacatgtgctgtagaagaacttcatcttaatttatgtcacaaaataattcagcaccgtatatagaatttggtccctcaaatcatatccctcttatttgttatgattatctctctcatgccagcaaatttaacattaacagaattacattctgtgtagatccgcagatcgtaaagatacacatttctggttgcaaaagtgactctacagcctttatgcaattctgagaaatgtacctgctaaaagtcctaatcaaaatgacagttgaatttttctcctgtaatgcataatcaggtcaggccagcccaccccatcccatgcacagcacggtctggggctagaaggtaaaacatagtatggaagacaggtcaagatcaaggaaagacagttaaaactatcattaagcaacagggacctagtaacccacaaggctactttgtacatacatatcctcacca

SEQ ID NO: 196622 - DNA, 117 bp, Homo sapiens
gcacttaacattcatctctgaacaactcctaggagttgtgcactgaaattccatttcagatgacgagactgaggcccactgttttcacgtaactactccagcgcagaactgggtcag

SEQ ID NO: 196623 - DNA, 225 bp, Homo sapiens
ggggattgcttgagcttgggaggttgaggctgcagtgagcaatgattatgccactgcactttagcctgagtgacagagtgagaccctgtctcaaaaaaaaaattaagaaggaagtcccttggggccaggtggccaaagccacaatacactatgattgcagctgtgaatagcaactacgctccaccttggacaacatagacagactctgtctctaaaaccaatcaa

SEQ ID NO: 196624 - DNA, 339 bp, Homo sapiens
gcgcggacctctctgcttatggtcatctggagagatttccttcactttgcgcctttttctccatcgattgatttctttgttttacgtttaacaattaaagtcttaatttctaagagtgttttgtttcctcttcattatttatctagctttaagttctactacgtccttctaaccatactatgtctcagcaaaattatagtttgacatatgcataaatgaaaaattagtccatctaatgatctacagtaggcaaaaacttcaactcaatctgaactcattttttatgactaaaaatctgccctcgtctcatctattcctcagtcatcaggtgttttgtgg

SEQ ID NO: 196625 - DNA, 516 bp, Homo sapiens
ttatgaaggtcaaagcacccagaaatgaaaggacttagcctcaggtcacaggtctagtaaaccacagaatgaggaagagaagtcaggttttctagcaccagccaagcctgctctctcagggcatacataaaaatagaaaactccaaaagccagagctcctttggcctaaatcctatatttctttcttactggggtggtaggaaatggataatttgggatgttcatgttttgttagatgattctcccttctctctctcacacatctttccagttttcctagttttccagttttcttcctatgacagttttttttttttcccctcaaagtgtggtctttagacaacttgcatcaaaacggctgtggtgtctatttaactcgcaaatcctttgtacctcttcctacataagactgtcttgagggaagcctgccttttaacagatgccaacacccactgaaacttgcagcctctagccctaagggagtggacatgctcttctctggctgggtgaggtcaa

SEQ ID NO: 196626 - DNA, 152 bp, Homo sapiens
agaggttctttataagctgttgtgtactttggatgctccttagaaacatacaggcccctaaaatacttctgtagaccagtgcctctgttatgggagatttgtaaatgcttccttctctggcattgctgtcctaactgccttttcagaaggct

SEQ ID NO: 196627 - DNA, 168 bp, Homo sapiens
gtccatccgtccgtccgtccatccatccatccatccagccatccatccatccatccatccaaagaatgtgcaaaccaacccctatcttgggcaaggtgccaggaacagatgtggctccagccctcagggagcttgtccactggtggatgaaacagacaacaaataagt

SEQ ID NO: 196628 - DNA, 313 bp, Homo sapiens
agatggctaaggtcggctcttgcctgtgatagtaagaatggaggagatttgtttgacgtcatagactctggattataagaaggagacatgtcaagcagtaactacgtggcatgtggctgtgatgcgtctacagccaacctcctggtgtggccttcccaaagacaaggaagcgtcccattcaagtgtgtctcagtgcttgcatgacacagtgcctctggattttacgtcagttctgccttcagtgtaaagccctgattttcatagataacctaatctgtagggaaaaagaacattaaaaaaaaaaaagtatagc

SEQ ID NO: 196629 - DNA, 282 bp, Homo sapiens
gtgctgagattacaggcgtgagccaccgcgcccggcgacaattgggaatttttgaatgctgattggatatttgattacattaaggattttatgttcatttttaggtgaaaataatagtaaaatggttataatgagagagaaggagggagagtgagaaaaaagggggaggggcgtcatcttttaaagatatacactgaagttttcatggaggaaattatatggatgtctagtatttgctttaaaataattcaggggatgccaggcgctgtggcttgtcgacgc

SEQ ID NO: 196630 - DNA, 583 bp, Homo sapiens
tatatttttcagtaaactttccaagaactatgttgtaaattttcttttagcttatctactagggagatttaatatagtgatttttattttaggaactgaagaggagtttggaggtcttgtatcagctaatcttatacttttgaggaacagacttctggatatcttgctaaaactaatttatacatctaaagaaaagacaagcattaatttgcaagcttgtgaagaactggtgaagacactgggttttgaccggatcatgatgtttatggaggaacacttacattccaccacagttacagcagccatgaggattcttgttgtcctactaagtaatcagtctattctcatcaagtttaaagaaggactcagtggtggaggatggcttgaacagacagattctgtcttaactaataagattggaactgtattaggtatgggacttttctagtcagctgcttgaaaatgagctggtgtgttttgttttattttaaattttatgtaaacttatcctctgcggtttgatcaccagtaaggagatatttattttaattaatgatagaaggaagagcatacaagatttcaa

SEQ ID NO: 196631 - DNA, 419 bp, Homo sapiens
tttcttgcttctgaaacaaacaggacatttttagtcgctgaagtagctttccgcaattaatttgttgaattctgaaaaagaatataccctctattggaaaatcttagtgaaaggttcagacttgagaattcaacattttattagcatttaaaagaaaagggaaaaaatacagcaaaaaactataggttccaacttatttccaaaatctagcgggtgcatcccaaacctaaaaacatgcagtggaaatcaccatgtctgtatacacgtcatggactgaaacagtgattttaagtatgatttttccggtatgagtaaacttacattcaggttttgaatacttaaattttatgtgggggcataatttaatgctacccaattgctatgtctctgcattaacaggagcatctctaaaaaacacc

SEQ ID NO: 196632 - DNA, 350 bp, Homo sapiens
taaaaaaactgacataaataatgtataccctatttatgttcccgtcttgaaggagcaaatagagactccacacagtacttttattttaaaaataaaagtagaaagctcttagtaagggaggctttgtttggcaatgaaattgtttatgtgttaaacattaaactgcattccatggtatttgctgattggcacaactactgccattgaaattgattccctaatcatgatgataatgactgggattagcccagttcaatgggtgcgtgctttccccagggctcacaaaagccttctctagagatccaggcttccgtggtaatgaactaacaaggctgctgtattctctatgg

SEQ ID NO: 196633 - DNA, 513 bp, Homo sapiens
taaggctagagtttctaaacaccacccatttgtggacttgaacaattaggtaaaagaccagcaaatcgtctacgatataatttagttatcaaaatagttatgtaggctaagagatgttactttcagcatgatcaaataaaattgactgtcaagtcttaaacactattttctgtaagtgtataaaattatcaacattgtgttatcctagtaaaaaaaataaagagaaaggttagacatgaatataaggctgatatttctaattttttttaaaaggagaactctgtgtgataggaaaagcttagctgtgagataatatgagtatttctcagtggtaagttcatgttgaatgaatgactgttccattacggtactgagaagaaagtgggtgtgagagcctgaaaccaaagaatcttcctgttaagtggaaatggtcagcttgtaaaggagaagagacagagtagagtaactcaagtttaggggagcataaattaagagaaaataactgaggaagag

SEQ ID NO: 196634 - DNA, 550 bp, Homo sapiens
  misc_feature (35)..(35): n is a, c, g, or t
  misc_feature (173)..(173): n is a, c, g, or t
tgttctagaggatcccggattgggacatttcaagnatagtcagtagaattagaatgtgaagatgataagtgtagagggaaggttaatggttgatattgctagggtggcgcttccaattaggtgcatgagaaggtggcctgcagtaatgttagcggttaggcgtacggccaggnctattggttgaaatggtcgccaatccggcgaccatttcaacaatgaaaaaaaggactgaaagcaacttactacatgcttgggaggagtatcatttactgtatcagcaaagcaactttgtataagagagagaccgctggtctagaaggcagaagatatagactagaatcttctcagctttgtccttcactagttgtgttgccctagacaagtttctcaacctctctggagctcacatacctcaaatcaggaaagtgagctaaaaaaatccatttcaacaaccacccaactatctataatcactgcgcccgctcataaggggatggccatggctaggtttatagatagttgggtggttgttgaaatggtcgccaatccg

SEQ ID NO: 196635 - DNA, 409 bp, Homo sapiens
ttgtctttgtcctcttaactaacttctgatgtttctctgtgtttgatattgaactccctgaaatggtcgccaatccgcggattggcgaccatttcaacaatgaaaaaaaggactgaaagcaacttactacatgcttgggaggagtatcatttactgtatcagcaaagcaactttgtataagagagagaccgctggtctagaaggcagaagatatagactagaatcttctcagctttgtccttcactagttgtgttgccctagacaagtttctcaacctctctggagctcacatacctcaaatcaggaaagtgagctaaaaaaatcactaagatgtttctcttccaatactagaatccttctcctaccccagcctaaaacaagcttgaaaatgctagacattcatgaata

SEQ ID NO: 196636 - DNA, 631 bp, Homo sapiens
  misc_feature (5)..(5): n is a, c, g, or t
aaaancgcgtcgatgagctcgtcccccctgaagtgcgacaggagtagggcagaaacactgaagagggaggtaagaagatagtaggcctctggtggacactcatccacaaagagccgagtgtctagagtgaccagcatcacacatgtctgtggctcagcctggggctgggaccagtactggtcagtaaccaggtcagggacccagcctgggtaaggggtcttgtataggggtggaattggtgttcaacctgtggccaaggttggaggactagggcttggcttgtggctggaattgcaacttagtctgtattgggattagggctcaatctatggctggaaatagaaccaaagagagaatactttttgtttgaatagcctgaggagcaaactgttacctgtgttcacaggcccttggcattcttcagggctccgacacctcaggagcctgataccacacagacttgaacatttccatccgttagcactgtttctgaaagcacctaagatatcaccagatttctgacccacaacaggcttgagatctcacttaaactaagatgaggacctttgtaagagaccttcaaatagcatcttggcaaatgactataggatcctctttctagattcatagg

SEQ ID NO: 196637 - DNA, 414 bp, Homo sapiens
ttggcaatgaaccggtaatcctttaaaaattcatgtatatagttttttttcttggaaattataagaatgatttgatgagtggtttgatgcaacttatattacttggtaagcagttttaaaatattcatgtttacttataaaatttaaattttttatttgtattatctatatattatttaatgttactgttctggttgttaaacattttgagttatcttcccaggttgaatgatttatggattaaagtactattgtacattttcgtacattgtatcacgtgaataggccagattcctctttcctattctttggttaatttctttggtgtattcacaagcttatacttccatatattaaaaacatttatcttacctctgtaaagacaaaaaatgggaaataaaaagccatttatcc

SEQ ID NO: 196638 - DNA, 334 bp, Homo sapiens
atttgttgactgaaagaaaagaaaagccctcctctggctctcagggaaagaggaagcaggccacgaaggccagcctctcatgaagacaaggagagtcccttcgacttccatacaacttggtccatttgctgtgaggaagctgcttgactgtacctccccttatctgagaatccactgctaattgagattttggagattcctggtcccagacataactctctgtcttttcctcaaagacataagtaacattcagcttctaagagtaaaggctggcactgcttaataagataatgtaaaaatgtgtaagaccttggggagtgccccaaggtgcatt

SEQ ID NO: 196639 - DNA, 397 bp, Homo sapiens
gaattacggtgagccttaagtgagataatgtattttaagtgttgtcacacagcagataaccaattaatggtaataacaataaataaatattgtcacatataaaagattagttgtcaccagtggccactgagtttaaattcatctgagtgttatggaactcagatatgaaatgtctgaacacatgatcccatcccagaattgagagaataaggtgtatttgagggaagttatacacaaggaaggtgctgtggaaagtgaagaggacttataaagaaaagagcagacagagaagagagccttggacaacagtatatcactgaagaaataatggattcagggtggggcctatgaaagacaggcagatggaggctaggagaagaggaagctacaataagaa

SEQ ID NO: 196640 - DNA, 266 bp, Homo sapiens
aatgaaaggcctcacatatttattactgaacccagccaaccaatgcgttcataacagatgcagagagacaaaatatattcccaacaaaacatgtcaaactctccggatagtggtgacattttcagcctgatatggtaacatgattgtgaccttcagacagcataaatatgtgtgccatctcatgtgcaattccttatagacccagcttggttcttctccattgtctccttttggttttattttattaataaaatcctgattttatt

SEQ ID NO: 196641 - DNA, 87 bp, Homo sapiens
aggaacgctggaggccaggagatcaaggcggcagcaagccatgattacatcactgctctccagcttgggggatagcaagactctgag

SEQ ID NO: 196642 - DNA, 768 bp, Homo sapiens
gatgccaggcatattccatagtttgagtatactataatttaaaattttttccccaatttgtagacatttggattgttccccagtttttgctgctaaaacacaatactatagtgagcaactttatacacttttttttgtaaacatgttcaaatgaatctcccatcctctattacacagtatgtatttttcctctatggcactttctcagtttgtatgattatttgattaatatttgttcccttctttaggccatacatttcatgagtatacccattgttcataggtattttcctttgatttattaatatgcttatctgtgtatccatagtacctttgcccaataaatattagttgaataaatgcatttctataagtggaatcattgggttaaagaatatatacatttataattttgttagacactatcaaattgtataaaaatattttacctatttatatttctgctgctggtacttattttcacatttagcctcactggcccactcaacaacaccgtgccccccagccagctcttcaccccctctcctcttttccttttgttactttcttctacaaacatttttattgacacttacattccaggtttagtactaggtgtataggatatatcagagagcaaaacaaagatcctgggtgggaagaaatagacaattaacataataaggaaataatataggatgttagagagtgaaccaataaaagagtgaaaggcagttggtaatgctagaattggagttgagttgcaat

SEQ ID NO: 196643 - DNA, 183 bp, Homo sapiens
agccaagttatgccaagaaacaagaaactcagcgactggggtatattcacctactctatgaacatttactgaagcaatgttatgtgccaaggtaagtgatatgactatatttttaaaaatgtgttgggtaaaaggatctccaaatgttaagagagaaggataccatttatttcttctgcccaa

SEQ ID NO: 196644 - DNA, 511 bp, Homo sapiens
gaggtatccaagtgtgccaccaggatgtgaaaaatataagttcaaaccatgtactttgagagtttactgttctttctagattatttatatggtcaatacttttaccttttcctctttcctattccccttgcttgtaaatcccattactgttcattataccagtgtagatgtgaaaagtattttgtcaactttatcaaccttgttaaaaagttgaggaggagccaagcgcagtggctcactcctgtaatcccagcgttttgggaggccaaggcaggggcagggatggggaggattgcttaagcctaggagttcaagaccagcctgggcaacatagcaaaacactgactctacagaaagtacaattatccaggcatggtagctcatgcctgtagtctcagctacacaggaggctgagatgggaggtttgcttgagcccaggaggtggaagctgcagtgggctgtgattgcaccactgtactccagcctgggtgacagagcaagaccctgtctc

SEQ ID NO: 196645 - DNA, 458 bp, Homo sapiens
ttacctgatttcctcccatgtgagtgtgctataaatacagctcttccaaagcagaacacatcagattaaatacttgtgatctggcagggcacggaatagaatggcgtaggccagcacgtgaattggtggtaaactgaaggtcatcggggagaaaataacttctctaccctcttcggtgtagtatttaaggccagtgaattaaactaacaaaaggcacatctcacaggatacgagacatgcaattttattaacattttacatgcactggagttcacagaaaaggagtgaaagtcgaagtgggaggattgggggcttatataccattttaaacaaagaaaagggtgtctgcatttcacgagatgctgaattgcaggaaggtgactaggaagaatatgcggaagctaatggaagatgagggttattttagtaaggtgtgtttctgcatctcatctccatgc

SEQ ID NO: 196646 - DNA, 160 bp, Homo sapiens
tattcaaaacttaaaacatggacgaatccttaaatctcactctcctccaatttccatatctcagtgaatggcactatcatccagacagtagccaatcttttccatcattctcatatttcatctaatactattactaatctatttgatctacttaacattc

SEQ ID NO: 196647 - DNA, 411 bp, Homo sapiens
gcctcaaaatgaaaacaatctaaataaataaactatgatgtacctttacaatgggttttgcagcaatttttaacaatgaaatattgatacatgctacaacatagatgaattttgaaaacattatgctaaatgaaagaagccacagaggaccacatcatgtatcattttttatatgaaatgtccagaatgggcaaatattacacagacagaaagtagactagttgttgttcagggatgggaagagctggagagaaatgggaatgaccactaatgggtacagggtttctttctggagtgataaaaatgtaccaaaactaactggtgattgctgcacaactctgtgaatatcctaaaacctataaacacataaattgtatggtatgctaattctacctcaataaagctgttgtg

SEQ ID NO: 196648 - DNA, 425 bp, Homo sapiens
tacaggcatgagccaccgcgcctggcctccccttcttttatcaacagcattctcctttttctttgggaaactacctgcatgtagtcttgctaggactgctgggaaactggtacaccagtcaagactttttcccccagacctgagatcttgagaaatgacataaggtctgaaaactgaagttgatctgttccaatggtggcctaaagagatcactcccatcagtttctgctctccctacccacaggactgctctgacttctcttcttcttggagctgctgttagactgtccttttgtaaatggaacttcccctgtccttccagtaaattcctatattgcttatgtgaaccagtgtcctcatgtgttacttacgcccagagaatcctaatccatatactacctaccctaatctatacatgacctctc

SEQ ID NO: 196649 - DNA, 957 bp, Homo sapiens
tgtatttaaatgactcagaagctttcatccgtgatgccattttgccatcatgaagtatagagatctcatttatatcttccttttttcacacttcaagactattgaaggaattgatgccatttcagcctttaaaacaatacatatgtcatcaccaaatcatggaatcctaataagttgagatcatttggatgattctaaatttgctaataatagatttttttcacaattaccatgaaacagaagaatgatagtatatcctcagatccccccaggaatttgctgactgtcacattttcaggcaaattggccaaaatgtaggaaagtgtctggcatgtagtaggtacttggtaaagaaaagttttttatgaaattcatgccaaaaccatccagtaaagccagagatttccaaactttatacttaaagttccatcaactggacttcaatgattctatgtctcaaaaaaattaaaaagcattagggaaaatattactcaacttaaaccttgacaaagttgaattggaatattaagtaactagcaacactggtgccagaagtgagtaaagttatctgcagagtgcaaaattcgtcacggtccttgcccacagacttgtagtctacataagaaccaaaagggcgtgaagaaattactgtaaaacctatcacattaaggagcaagaggctatggaaaggacacccattctcacaatgagaaaggttgtccttgtagagaaactggaggccttcacccatagacgatccagagtgtgaaaattacagggccaggacacagagcagcttttggaagattcaaaccccagaagctgatagctgctcagactgtgaaagggatcctgaatccattctgccggcctcccccatcaagatggagttctctcaggaaaggacaaatggacaaattccaatttggttgtcagggaaacctctggcaaagcacc

SEQ ID NO: 196650 - DNA, 217 bp, Homo sapiens
aaggatggattgcttagcttaagagttcaagaccagcctgtgcaacatggtgagaccctgtctctacaaaaaatacaaaaattagctaggtgcagtggcgtaagcctgtagtcccagccactccagaggctgaagtgaaaggatttcttaagccccagaggtcaagactgcagtgagccatgttcctgctattgcactccagcctaggtaacaaagc

SEQ ID NO: 196651 - DNA, 709 bp, Homo sapiens
gttcttgtggatgaagcctccggctagcaggcttcagagagagtgaatgtgaatgtctactatcagggccttgaaaggtgtcagactctccagaaagacctagtgacggacagggattctccacagagtgcaagattccccaacagacagctttgctgggccatttcaaaatctgtcaaagaaatatatttcttcagggcctgctggccgtcatgtgatgctctactagagtctggtgggaatttgctatcttattgctatgaacagtctgtttggtcagccttaggagctctgtttttatgttaatgttggtcatgaactccaggaaaggagggtgtagtgaggcctgcccaaccccctctccctgtcatggcctgaactcgtttttcaggtttctttgggatccctttggccaagaggggagtccattaagttggttggggggcttagaattttatcttttgtttacaaaggcatattgagaactttggtcatttttctaagagcatcaggtaaccgcagggtttggggtgttcagcaaagcccgtgattacacacacactggaccttcagagaagtgtgccatctagctacgaccacagccatttctcctggtctaccccgtccatcgggacgcactgctgcaggggaagactcacccatcatgcaacccctcactgcaccctggacagtcacttctaaaatgcag

SEQ ID NO: 196652 - DNA, 204 bp, Homo sapiens
ttcatgacacattcaggtaataaggctttaaaaagagatacaagggggccaggatttgaggcagaaaagaaaggtggtaaatgctcagaatcggccacttctcaggcctcctctgcacacaccctggtccaagccaccatcctcgaggcccaggctactgcaacagcctcccctctggtctcaatgcttctgccccttcgccct

SEQ ID NO: 196653 - DNA, 147 bp, Homo sapiens
gccttggcctcctaaagtactgggattacaggcgtgagccactgcgcctggccacaacaccccatttctattttaataaaataaaatactgtgaaaaacatttacaatttttaaattttaattttaaaattaaacttatatttattc

SEQ ID NO: 196654 - DNA, 378 bp, Homo sapiens
gagaggatggggcaatacaggaactgagatacaggagttaatggagttcagtgtagagctagaaggcagcttgataaacttgggttttgtgagaaaataaaggggaaaagaaacaaacaaatgagtctggtagtcacagagggagagacacaaaaagaaattaagaaagaaactgagcaggaagtgggaaagcgaagggagcactgaggacaaaagtgctatgtcaggattgaagaatgtgtgagacgcaggaaaaggggctgtaggctaccactccctctgccctctctccattccaccctcagcccaaagacacagaaagcccagctgtcccttatcacatcgcctcccagacacagttccatttccctccctcat

SEQ ID NO: 196655 - DNA, 616 bp, Homo sapiens
agaggaagtagctgtactgtttgatgatgatatgatcatatacctaggaaacctaaagactcctccaaaaagctcctagaactgataaatgaattcagcaaagtttcaggagacaaaattaatgtacacaaatcagtagctctgttataccccagaagcgaccaagcttagaatcaaaccaagaactcaaccccttttctgatagctgcaaaactaaactaaactaaaataaaatacttgggaatagacctaaccaaggaggtgaaagatgtctacaaggaaaacaactttagtatttttaatgggttaaaatgagaggcagcaggtacagcagaagaagtcagtgcgtgggcatccgcatccaatgggtactgcacctttgatggtaaggctttggttttgacttactaaattactaggtacgattattttctagtttttgtcattaaaccttaaaactactaagtaaccccttccatttcttgttaaatattgtaaaatttcatactctcatttatgctgcctgacgttagagtgtttgtttctattttgtgactaccttaaataatacctataaagagtaaactgttagtagtgtttttgctgtaattaaatg

SEQ ID NO: 196656 - DNA, 307 bp, Homo sapiens
taaaaataaaataattagctgggtgttttggcacatgcctgtagtcccaggtactcgggaggctgaggcaggagaatcactggagcctgggaggcggagttgagatcctgccactgcaattcaacctgggtgacagagttaaaaaaataaaataagaacttatagaaatagaaaagggcattgaaatgaggaactcggtggtgggttccgcaggaggtagggtcctgtctggaaagatgacgagcaggtggtggctgcagtcgagtaggtgagccagggtgttccgggtggtggggacagagtgaga

SEQ ID NO: 196657 - DNA, 614 bp, Homo sapiens
cccgacctcaggtgatccgccctcctcagctcccaaagtgctgggattacaggtgtgagccaccgtgcccggccgacagctaggttttctaatgtgggtgataagagcatgaaagaggaattgggcatgagcccaaggtttttgatctttgcagctgtaaccatggacgctgcatctgctgacatgaagttggtattgacaacaatattcactgtggatagcaagagggttgttttggccatatgaagaatcagagaccaataagtggtggcatcaaatggataactagacatacaggatgggatatctgggagggtgttgataatggagacatccaatatatgaaagctaatgagcgaactacagtaagttagttatgggtccatttaggaggacatgcttcagattttggtggtaaatcttttcaggggccaggaaggtgtgactacaggctgaggagtggatctcttacttacgtccctgagtgatgttattgggcttcctaaacacctgagagggtgtgagtgaccatcatggcaggatgtatcagacagtagagtttggaaggggacatagacatccgaggagagaatagacgagatagatgcatgcag

SEQ ID NO: 196658 - DNA, 821 bp, Homo sapiens
agctattatatcattccctagagggaaaccccttgagttgatcatgcacagagaccactatcctccttgttttcacagtgcccccatcttgagacatttcctattgttacaactgggggtagggagtgcgactagcatctactgagcagaggtcagggacactgctaagcatgctgccatgcacaggccagcccccataacagcaaattatctgacccaaaatatcactagtgctgacgctgagaaactgctttaagtttgctcaaggacagaattaaagtaaatgcaaacaaactgcagtataccttgcctaaacataatacccaggaagaatgagatcttttaaccaacagaaaaaggtctgggctattctacaagtttagagtagcaggttttggcctggcacggtggctcacgcttataatcccagcactttgggaggctaaggcaagaggatggcttgagcccaggaggttgggaccagcctgggcaatatagtgagaccttgtctcgagaacaaaaaaattgttttaattagctcagtgtgggggtgagtgcctgtagtcccagctactcaggaggctgaggcgcgaggctcacttgagccctggagacggacgttgcagtgagccgagattgtaccacggctctccagcctgggtgacagagagagatcctgtctcaaaaataataataatataacaggtttttactggaaggtgtgtttaataacttaaaatcttcatcattatagtgattacttcctgtggcattttccttattgaatatcaacataagtacacactgtgagactctgctag

SEQ ID NO: 196659 - DNA, 455 bp, Homo sapiens
gctgagcacttgaaatgtggctagcatgactgaggaaacgaattttaaattgtgtttaattttaatctcaatgtaaactgccaaatatggctagtggtgaccaaaccggaactgtagctctagattccctaaattagggactttcaacgacaggcaattccctctaccccttgggggacaactgcccccatcttgagacatttcctattgttacaactgggggtagggagtgcgactagcatctactgagcagaggtcagggacactgctaagcatgctgccatgcacaggccagcccccataacagcaaattatctgacccaaaatatcactagtgctgacgctgagaaactgctttaagtttgctcaaggacagaattaaagtaaatgcaaacaaactgcagtataccttgcctaaacataatacccaggaagaatgagatcttttaaccaac

SEQ ID NO: 196660 - DNA, 399 bp, Homo sapiens
  misc_feature (381)..(381): n is a, c, g, or t
agtataagacatcatactgtaccccataataaacataattattatttcaattaaaaataaaaaataagtgtagcaggaggatattatttggggcaaatctgaagagtattttcaacacttcataagatgaaacacagtatactcaaggtcaataggaaggtcagaatgagcaaagcacaaaaaataaaggtaagagtagtaagatacatgaagaggccaggataggaaggagaaaaggcatagaaactgactgaatttagctaaatattaaaaaaaaaaatgccttatcaccaagtaggacttactctaagacacagaaggttagcattaagaaatctgtgaatagattatatcaccaaaaagatttatttctatagagantctaatagggaggtaccg

SEQ ID NO: 196661 - DNA, 991 bp, Homo sapiens
  misc_feature (990)..(990): n is a, c, g, or t
agctggtacgcccggattacgggatgcggctgcggcaacagcggggccgatgtgtagttggtgactgcctctccagatgctgaggtgcctgtatcattggcacaggccagtgctgaaccgtaggtggagtaggctgtgccttctgaagcagtatctattcacaatgaagttgcagtctcccgaattccagtcacttttcacagaaggactgaagagtctgacaggtataaatgctttccatgagaactgaaggaagaaggaaataggagttgcctccattgtgcacgttgcaaaacctgtctggaaggagcataggaaatggctttagctaagtgcctgactccagtagcttcttgctgttgccacagtttcattagtgttgattctcaatgttgtctgctgatgttgctaaagcagccacacagtagcattacaaagcctgtgggaattttaatagcaccttcataaatatatttagtagtatatgtagaaatatgacctatacagcactggctatctattagattcacctggggagcttttaaagcacacatgctcgggttctacctgcagcctactgaattagaatctctgggtgggatgaccatctatatttttaataaaagctccacaagttaattctgatgcacagaagatagacgaaccattactttaacatgactcaccttgtattagcttattctcaaagctactttcccattcttgaaattggatgatggctttttaggtacgtgccagagataaatggcccagaatatgttgattcttttagattgttttaggcagactttaagtagagggcttaaatgcatgtttggttttgccgatgcttcactatcttttttaattggagagagtgaaaattgctaaaaattgctgtccaatagaaatttatgagcccatatgtaatataaacttttttactaaccacattaaaaagatagaaatggtgaaataaattttaataant

SEQ ID NO: 196662 - DNA, 523 bp, Homo sapiens
catagtcctgtttacaaactgcataggatttatgcctcattacgattccccaccctaaatcatcatgcttcacactaagagagaaaagtctaaaggaaatactttgttatctcaatctgctaagtagaatgtttttaacttagcacatttgttaaataatttttcagagagctgcttacttgggcacacataatagaggcaaacttggtacttaccctaatatgaattaatgtaaggtttcattatcttttaactgttggcagtgatagaactaccatttttcatctcacatttttgctatttaaagcactcataggccaggggtggtggctcacacctgttatcccagcactttgggaggccagggcgggcagatcacctgaggtcgggagttccagaccagcctggccaacatggtgaaaccctggctctactaaaaatacaaaaattagttgggtgtggtggcgcacatctgtaatcccagctactggggtggctgaggcaggagaattgcttgaaccca

SEQ ID NO: 196663 - DNA, 207 bp, Homo sapiens
aaaaaatatctaatcatatattctatttgttaagtattctcatttacctttttctttcccagactgagtttaggaattttctcaggtctgtttttttatggctgaggtgggagaatcatttgaaccccataggcagaggttgcagtgagctgagatcgtgcggctgcactccaccttgggcgacagagcgagactccatctcaagaa

SEQ ID NO: 196664 - DNA, 509 bp, Homo sapiens
gacaatctaaccctggactcatgtcacttgtcagtgggctcaacagttatcctgtctggattggttaattatggataagtaagttgactgccataccagtttgcctcagatagtcctaattttcatcaactgtccttgtaataattatgaagtgagtgcctttcattctcaaacatgtcttagtttggatgataaatcatgtggtcatcttaagaaatcacttaagatttctttcttagaaatcttaagttatttcttgctcttacatgatatcagcagaaaaaatagatactgtggctcctgcctaaaaaggcccattttttagagagaatagacaccgtgtcactaaattcagtactgaaactcccaggagacatggattttaagaagttttgaaattacttggtgagaaatgtacctcaaatatgacctggaaatagggactgcctctattgcagatttttaactttacaaaaaaagcaaaaggtctcaaatgtctttgtgaaagg

SEQ ID NO: 196665 - DNA, 329 bp, Homo sapiens
cgccacccaacacatacaaaccatagaccccgcccaacctcccggcccctggccccacttgctaccccctcctatgcctgggggctgctgcctccacgaagccgggctctttctcctccgggtagccgcggctccatctgcagcccccgaggactcctcagccgggataaagggcggcctcccccgcctgccagcgcccaggatgctcagccgtcagctgcggggaggcgctgatttcattccggcgcggctttcgctgcgggcggcgaggggcggacaggccggggcccgcggggcggggcgggacgggggagggaggcagcggccgc

SEQ ID NO: 196666 - DNA, 153 bp, Homo sapiens
gctgtgacacacacccaggggagtatacagcggccttgggcatgggtaaaggaacttaccataccctttctctcatctcacagaacaaaagcaccctatgagggaaaaggagcacaaatactgttgccgtctggacactggtgaaaagtcact

SEQ ID NO: 196667 - DNA, 453 bp, Homo sapiens
catgagattccaggcaagatgtatcctagaggctaatttattatatagggatgatgttcctctctttttccttcatagcactggttgtcatgacatttcgacccaaaacattgtattttatttatttattttttaaaagagacagagcccctcacagagtcacccagtctggagtgcagtgctgcaatcagagctcaccacagcctcaatctcctggactcaagagatcctccctctttagcctcctgagtagcagctggaattacaggcatgcaccaccacacctggctaatagactcaggacattttcatgtaaccctgtggactttgtttatgttctttactccactaatgacataggctgttagtaaacaaaacaaaaaacattgtaagaataaagagtattgtgtttagaatttcaatactccattgctgggccaaagaatattccta

SEQ ID NO: 196668 - DNA, 305 bp, Homo sapiens
ctgtcagccttccgggaggtctgtcctcctgtggcagtgaggggaattgatgggggtttcaagcagccaggaggcttgccctgcactgctcctgcccagccgtccaggaggttttgtgtggctgttgccaatgccgtgcctcctaacccttcctgctgggatgcaggctagagagctgcgacacttacctgctggttgggaggtcaggttagagccgagtggaccaggtggaggccatggatgaggaggcactgcactccagcttgggcaacagagcgagactccatctcaaaaaacaaacaaac

SEQ ID NO: 196669 - DNA, 238 bp, Homo sapiens
tttttttttttttttgaggtggagtcttgccctgtctcccaggctggagttgcagtgagctgagattgtgccatgcctagcaacagagtgagactgtgtctcaaaaaaaaaaaaaaatgtagctagctgtttggcctaggtattacaaatttcaatgtttgttattgtaagtttctatattcaaaaatcacttaagtatgttacacaactattttgaaactgttagtgaaaaataatc

SEQ ID NO: 196670 - DNA, 717 bp, Homo sapiens
aagcatggctggtttgtgagggtcgcctcttagaggtgttgcagtaggtgggatccgaccgctgtgtcttaccaagctgtgctgttttagattcagtggtcatgacgtaatcgtgcccacatattgctgtagaaagaatgtgatgtgtgtgctcctgggtatctctgggtggtggccaatataacactgagataaaggtgataatggctaatacatattgtgtctatcatgttccagtcgcttgcctaacattaactcatttagttctcataacaaactctttgaggaggtacttttattatctctatatatgtggaaactgaggcatgggagtttgatttgcctgaggttaaaccgctgggaagtgtccagttggtattgaaaccactctcaaagttctctagtgttagaaagggctaagtgggcaggaggcagcggctcatacttgaaatctcagcacttcggtgtgcagaggtggaaggattgctcgaggtgaggccaggagtttgagaccagcctgggcaacatattgagacgttgtctctacaaaaaaatttaaaaaatgaggcaggcatgttggtgctcacctgtagtgctagctactcaggaggctgaggcaggaggatcacttgagtccgggagtctgaggctgctgcagtgagcaatgatggtaccactgtactccagcctggggcaagagagtgagatcctgcctca

SEQ ID NO: 196671 - DNA, 483 bp, Homo sapiens
gcacctgcatattccgtaccatgatgcatttcccttgtactgtaacccaattcctttaatctctacaatagtgtttgcccaatttcattctgcctgcttcaaagttatattcaatatttggtcaacaatattagtgaaccaacaacaatatctaaattgttccttttcatttatatcctattactttttgttgttatttttccttctttttgctataacataataagctaattcatgcttttgtcttagttttggaaggaattatatcctaacatttacgcaatatcccttttcctaacttaaaataactatgagcttgccactacactagtaaatttgtaatcaacttaaagataatgtcttaaaagtacaattaaacatgtcataacaggagaaaaccctggtaattacgaatagtgccatgcttgctggatttttaaatagtagtataaggctatgaaaactcgccacccagtgatgcaa

SEQ ID NO: 196672 - DNA, 301 bp, Homo sapiens
tgcacactctcctttctttaattatcccttagatgttggtacccccagggttgtctcttaggcagtcttctcttcttattccaaccctctgagggttctcactcagcccatggcttcagttacagtttgtgtgttgacggctctctcctctgtgcctctagtccagatgctctttctgagcttcagaacaacgcatcggagtgctgaccgggcagctcctcctaggtaccctacaggaactcaagtcagattcctcctccttctctctaaacctgcgccgcctgtgttccctctgctggtg

SEQ ID NO: 196673 - DNA, 415 bp, Homo sapiens
cagtgcgttgtcgtttacctttttgttgtcgttcaagcacacaaccttctaaaagggaacacagtatttttaaaactgggtataaaggtaataaattttttgttcttttatagattcctatattattccataatatagccaaccatatatttttcatgtatatgtgcaagtataggttacttagccataatagtgttatttattcattcactcaagatgaatttacacataggttctggcccatgttgcttatagcttattagaagagactaaaccacagggggagggttaacttctaaactacaatttacaatagcaaacctcctttatagacgtttgttttcagaagaagggaaatagagaaaggatacaagatgccatagcagaacaacaaaatgtatagactaccgtgaga

SEQ ID NO: 196674 - DNA, 603 bp, Homo sapiens
  misc_feature (383)..(383): n is a, c, g, or t
  misc_feature (447)..(447): n is a, c, g, or t
ggcctctctctgggaagcgcgttgttgttacatggtggctgccctgcccagggaggaggcattacgcccagaggggtggcaagttatcagtgacaagagagggaagagaaatacaatttctagaaaatttgccttttgggactgaccttcaagaaaaactgagagagaaatctccaaggtcaacaggaaagcaaagccactagatgtcaccacagccagtgctccggtcattaagtccccagatggaggaaagagcacatcagcatgcctgcacagacatggaaaagctggctaagacatgcacatgggtccaaggcactgcagaattccatttttcctacagttaatatttatggcacaaaaatgcaatagctacagtttangactgattcattgacacgtgacacttgaaactgtccctctaaatgtggatattatccacatgtnactggactaagcatccatgcaagacttggagaccttctgcaggcgcagcctgtacccccaaaccctgctctatcggatcccacctcgcaaggtgaaggccgcattctctcaggacaacctggtctgctatatcccctgggaaccatttcgccttgg

SEQ ID NO: 196675 - DNA, 741 bp, Homo sapiens
ttcttatttggggctgtttgtatccattgtggatttttatatgagctaagtggagaagggcaggatgccttgtgttaactgattgcggtagcttgaagagacataatgagaactgggcagcattaaggtcagagaagcccctgatagaaaatctagaaatatagaaggaaaatgaaatggcttaaactgatttgtacgccagccaaacgaaatatcctctctggcctagctacttaaagtgtcttcaagccagcaacatcacctggggcttgttagaaatgcagaatctcaggccccacccagaccaattggatcaggaacagcattcgtttccaaagcccaagttaatttgtatgcacattacaaatttaagaagactgccaacttgcttgagcccaagaatcattccaggcacttgataagactttttgattccctggtctttctcctggttgtatagctgtgagatggggcctggaactccatgtctaacaagggtcctcagtgattcatttgattctcaagttgtagccagcataaagtagtctaaggaaatcaaactttagggtcacactggaggtaagtagtgaaattttttcctaaaatgcattttccaatctgtagctctccagatgacattgggagcctcattttttatccaaaaacaggcactagcaacctaaagtcctgtttatggtgtaattctagagtgagctgacttggcttgcatgaaagttttgg

SEQ ID NO: 196676 - DNA, 191 bp, Homo sapiens
agtccctacaacaaatgctgacaaagaaaaataacagctcaaaattaaaaggctacagtccacagggaccacatctctgtcaacctggggatttgaagattctcattaaccacagggatagcaatgaatccatcaacccccatagcctgtcttcttttgagatgacacctcagagtcacagggtaggcacc

SEQ ID NO: 196677 - DNA, 491 bp, Homo sapiens
  misc_feature (1)..(1): n is a, c, g, or t
ntcagtcggtaccgtctgttatcgccaacacctccattaagctgggccccaatgccgcagacctggctgaccacccggagctcgggcctcatgcggtagtgaactggtgctggggaaaagggtcgctggcaagggaacactgagggtgtcttgcctgggtggtcagggaaggcttcatgagagagaagactgcttcagagacacaagggctactgccccgcctcccccggccgcagggctgacacacaggccttctgcatggacacgtggcccacactgtcactggcttctcctgagggttgacagcaggcagaagccaaagttgccaatggatggtacccacctccaggcccaggccacagaaggaatgcaacaagcagcccagagcgggatacatgcttggggtgggggcaagggggagccaaagcagggaaaaggcttcagtgatgggccaaagggccaggcaggcccaaggggttggggagaataca

SEQ ID NO: 196678 - DNA, 129 bp, Homo sapiens
gatgatctgcctgcctcagcgtcccaaagtgctgggataacctcgtgagccactgcacccggccaaaaaaagactgaaagaaaaataggctttgaaagggtaaaacaggaggcaacctaaggtagacca

SEQ ID NO: 196679 - DNA, 312 bp, Homo sapiens
agaaaagtaggtgggagtcagaaaaacatgaaatgagaaagaaaagcataatctgagtgagttctctctctttttttttttgttttctatgtttatctttccacagctttttcactggctctgttaaaaagcaaatatcactgcaaacttcatttcattttctctcaacagatgaaataaagcttgttaaaatgtttttcccttctgtcaggtgcaaactccatgttagcaggtttgaaaactttcacatgttcagatagcaatggaggttttaacttggccaacatcaacaaacaaaccatgagtccctca

SEQ ID NO: 196680 - DNA, 596 bp, Homo sapiens
ggtgagcaggttgtttaggttgttggttgtccaggcaagatacccagggcccttgggctggccatgtgtacatctggacggcagcctgaatggttcccttgtcccttggttgtttggggccctgagaacatgagaacccactgcaccgtccatagaatctgcagacccatagtaagtcaggagggacacagacccctggtaattttccccaacgtggcttgccccccatgcagaataaccacagtaacttgtggccctggttggttctcccaggatattcacttggacagagaattcagggaaatcttacatcccccaaggcctgaggagggccctggaatctgaactttccagaaaccagcagggccgccagggtcaccccagcccctggccactctttctcctcctcttggtccggagccacctgcggccaagcgttctgcctgggtcttggctcttggcgtttctttgcagctccatctctccgagtgctcccatctgatacacgtttcaaaagttcaattccagggtagccaaaagtgtgaagctgccatggagaagggctaaaaaacaaccaggaattccaagcggcctgc

SEQ ID NO: 196681 - DNA, 370 bp, Homo sapiens
ttaggaaaatatggtacgtttaataaaagacaatacaactcctgtttatacagtactttcacatcccagctggttttcacaacaacccgttttgggcatcacatgaatggaacctcagagactttcagttgtagagaaaaatagacacagtcttgaagagcagccataggtgacagacgagtcgtgcagcccctgtcagtcacatatcccacagccatcgccctttcttttttgcttctctaagactgattatgtcagggggcattgtgctcaccaccaagggatgaatcacaattagcacttttccctggtgtaggggtgggtgtaagacccatttctagccaatgtgatttatggagatttctgaaaa

SEQ ID NO: 196682 - DNA, 454 bp, Homo sapiens
tcttcagagccaggggatcaggaaacagcatgggtcatgttgagagacacaagctcacctctgcccacaggacgaaacagcctggcgggcacaggcctcacatccaactcctgggggtccctagcctgccctccctgaccctccatcctcacccagatcctccgctgctccccgggagccctcggcttgcacagctttcacctgggctgggaaagtctctcttctgcacactcgctgccatgtttgccaagcaccagacctttaagtaccatgtaccatttttttttcatatctgcataccacatgtactgttatttgcttgttagttttctttagagtgactctctttatattaattgattttacaagtgaaacgaaatgatgaaaaccagaatcacttgctataaatagacgatgcctgagtaacggaatacaataaaaacaaaatactatc

SEQ ID NO: 196683 - DNA, 209 bp, Homo sapiens
tggcctccgcatgtctcttgcaactcatttgtagacagcccagaaactagcagctggacttcatttttgttccagcagtcaccattttatagtgtttctctaagtcactgtgagtttcactgatgacaagtctaaaactccacaggtattcatatttagtgggttaaatcagagagaaaggattatgcttaactttctataggttcatg

SEQ ID NO: 196684 - DNA, 316 bp, Homo sapiens
tgtattatttttcgctactgctctctcttgggaggagtcaaattaagtgtgaatcctttaagtttagtaacgcagagaagctaaagaataaggacacaaacattcacctccaaaacacaaaaccaggccagtttgctaccaaataacggaaatccctcccctcaccctcgatcccaacccagattaagatagatcccccaaagtgacttttacatcttttcctcaacctggctttacaaaaataaccaggaaacgtgtgcccccaaaatttcagctgtcttttaccagcaaagagctcatctattttcatcactgt

SEQ ID NO: 196685 - DNA, 358 bp, Homo sapiens
tttaaaacttagcgttagccccattacacgttcccttctgagtcacagaggatgatttgcacgataagctgagcttgccttgaaccaggactcacgtggatttgcatgagaaagaactgggcagagattgcaatattaacagctgtttaaataattcaatggagaggctaaggctgaaggaaattatgggctcattgttaaaagtttttaattatcccaacagctgtcccatcacatggccttactttgttaggcagtggaggccatttgagagatcggcctgagttggcgcactggaacttccaacattaaggcattgcattgctaatattcctcaatttaggaggcagtcaagcag

SEQ ID NO: 196686 - DNA, 247 bp, Homo sapiens
cacactactggccagatctccccccacctccaaaccagaaactctatgagagcaggaccatgacctgccactcactaaaggaatgggcaggtggtaggcagcacagaattaaggaggaagcacaggaggaaaagaatccccaaggtccgccagctttgacagggaagggaaagtctagtctcctctcctctccagccacaggtacctggaacctcatcctctagaggaatcttccttggccagtagt

SEQ ID NO: 196687 - DNA, 474 bp, Homo sapiens
cacactactggccagatctccccccacctccaaaccagaaactctatgagagcaggaccatgacctgccactcactaaaggaatgggcaggtggtaggcagcacagaattaaggaggaagcacaggaggaaaagaatccccaaggtccgccagctttgacagggaagggaaagtctagtctcctctcctctccagccacaggtacctggaacctccctagtgtcactaatgggcgtggactggggagtgcaaacccagacgcctcactcactgggcacacacccttgacaccctgaatcccaccaattccgttcccacgcacttaactgggcaaccctctgcaagctagaggtgttctgaggaccagcaagcaaccgagcagccaaaatactggaagcagaacctgtgtctggcgttcatctccaggcccacaacggggcagatgaaacgcgccctgttggagggggccgcgcg

SEQ ID NO: 196688 - DNA, 1248 bp, Homo sapiens
caagcatttgcaatgcactgcacggtcgacatctacgaggatcccctacgccatgctcgcaagtccaccggcggcaaggctccgcgcaagcagctggccaccaaggcggctcggaagagcgctccggccaccggcggtgtcaagaagccccatcgctatcggcctggtacagtggctctccgcgagattcgccgctaccagaagtccaccgagctgctgatcagaaagctgccttttcagcgtctggtgcgtgagatcgcgcaggacttcaagaccgacttgcgcttccagagctccgcggtgatggcgctgcaagaggcatgcgaggcctacctggtggggctctttgaggacaccaacctgtgcgccatccacgccaagcgggtgactatcatgcccaaggacatccagctcgcacgtcgtatccgcggcgagagggcttgagtctcaaggactcactgattacatacccaaaggctcttttcagagccacccacatgcgcgctgaaaagatctgtttctctcaggaattcttcctggtacttgttttgcctgtagtagatagggcccatttccagacgttatacaatctgtttcgtaagactcagcctatccctttttgaatgctaattttgggagtcttaacatctaataatgtccggcatttttccgtaagcattgagtgtagccaaaagttccttcgtgtattgctctcccatctccgcagcccggttttgaccggatggtgcttctaattttctgctaacctgtactgtggtgtgtgtatatttcttgccaacacgccagaaataaaactaaggttgtactgaagttggaaaaattcaggttaatgtagctcatgctggctaaagtgaaacgttctctccccgccccccgttcctaagcagtgttaagttttctttgaattttttcaagccggattttgggcctgcttaaaccacttaaatgtagttaatgacagatggtttgaggtttaaaagtcttctggagaaagcccgccagagaacattccctttgaagccccatgtaaaaatacgtgtgggagagaaagtgttttctctgacttctgctgacagtggctaaaactctgaactgtcaggagtattcaaaataagactgccttgtaggtaagcctgtggtagtttttttgagcacaggataaaatacttgagtctttgcttaaatgttactttctcaatgaggctttgtatgactaaataaaatctg

SEQ ID NO: 196689 - DNA, 1360 bp, Homo sapiens
  misc_feature (3)..(3): n is a, c, g, or t
  misc_feature (7)..(7): n is a, c, g, or t
ggnacancaaaaatttgagtccttcgccaatccggttactgttgggtaggccttcagcatacttttgtccaatcagcttcagactctcactataaataagcggctagctttctctttctcctgaagtgaatctagctctgaaggcatggcgcgtacgaagcagactgctcgcaagtccaccggcggcaaggctccgcgcaagcagctggccaccaaggcggctcggaagagcgctccggccaccggcggtgtcaagaagccccatcgctatcggcctggtacagtggctctccgcgagattcgccgctaccagaagtccaccgagctgctgatcagaaagctgccttttcagcgtctggtgcgtgagatcgcgcaggacttcaagaccgacttgcgcttccagagctccgcggtgatggcgctgcaagaggcatgcgaggcctacctggtggggctctttgaggacaccaacctgtgcgccatccacgccaagcgggtgactatcatgcccaaggacatccagctcgcacgtcgtatccgcggcgagagggcttgagtctcaaggactcactgattacatacccaaaggctcttttcagagccacccacatgcgcgctgaaaagatctgtttctctcaggaattcttcctggtacttgttttgcctgtagtagatagggcccatttccagacgttatacaatctgtttcgtaagactcagcctatccctttttgaatgctaattttgggagtcttaacatctaataatgtccggcatttttccgtaagcattgagtgtagccaaaagttccttcgtgtattgctctcccatctccgcagcccggttttgaccggatggtgcttctaattttctgctaacctgtactgtggtgtgtgtatatttcttgccaacacgccagaaataaaactaaggttgtactgaagttggaaaaattcaggttaatgtagctcatgctggctaaagtgaaacgttctctccccgccccccgttcctaagcagtgttaagttttctttgaattttttcaagccggattttgggcctgcttaaaccacttaaatgtagttaatgacagatggtttgaggtttaaaagtcttctggagaaagcccgccagagaacattccctttgaagccccatgtaaaaatacgtgtgggagagaaagtgttttctctgacttctgctgacagtggctaaaactctgaactgtcaggagtattcaaaataagactgccttgtaggtaagcctgtggtagtttttttgagcacaggataaaatacttgagtctttgcttaaatgttactttctcaatgaggctttgtatgactaaataaaatctg

SEQ ID NO: 196690 - DNA, 1456 bp, Homo sapiens
  misc_feature (3)..(3): n is a, c, g, or t
  misc_feature (7)..(7): n is a, c, g, or t
ggnacancaaaaatttgagtccttcgccaatccggttactgttgggtaggccttcagcatacttttgtccaatcagcttcagactctcactataaataagcggctagctttctctttctcctgaagtgaatctagctctgaaggcatggcgcgtacgaagcagactgctcgcaagtccaccggcggcaaggctccgcgcaagcagctggccaccaaggcggctcggaagagcgctccggccaccggcggtgtcaagaagccccatcgctatcggcctggtacagtggctctccgcgagattcgccgctaccagaagtccaccgagctgctgatcagaaagctgccttttcagcgtctggtgcgtgagatcgcgcaggacttcaagaccgacttgcgcttccagagctccgcggtgatggcgctgcaagaggcatgcgaggcctacctggtggggctctttgaggacaccaacctgtgcgccatccacgccaagcgggtgactatcatgcccaaggacatccagctcgcacgtcgtatccgcggcgagagggcttgagtctcaaggactcactgattacatacccaaaggctcttttcagagccacccacatgcgcgctgaaaagatctgtttctctcaggaattcttcctggtacttgttttgcctgtagtagatagggcccatttccagacgttatacaatctgtttcgtaagactcagcctatccctttttgaatgctaattttgggagtcttaacatctaataatgtccggcatttttccgtaagcattgagtgtagccaaaagttccttcgtgtattgctctcccatctccgcagcccggttttgaccggatggtgcttctaattttctgctaacctgtactgtggtgtgtgtatatttcttgccaacacgccagaaataaaactaaggttgtactgaagttggaaaaattcaggttaatgtagctcatgctggctaaagtgaaacgttctctccccgccccccgttcctaagcagtgttaagttttctttgaattttttcaagccggattttgggcctgcttaaaccacttaaatgtagttaatgacagatggtttgaggtttaaaagtcttctggagaaagcccgccagagaacattccctttgaagccccatgtaaaaatacgtgtgggagagaaagtgttttctctgacttctgctgacagtggctaaaactctgaactgtcaggagtattcaaaataagactgccttgtaggtaagcctgtggtagtttttttgagcacaggataaaatacttgagtctttgcttaaatgttactttctcaatgaggctttgtatgactaaataaaatctgtataatccccacctatttttttcaccctagaatttgtcactatatgctgtaccagagtttgctgatgtattgcttgtgtgttctaaaatacaggct

SEQ ID NO: 196691 - DNA, 110 bp, Homo sapiens
agcattcaccggcagcaaaagagagctgaataggaacattaacataagactttattgaaagccagtgtgtaacaaagaaaattacaatgtggagagtaatttgcatctaa

SEQ ID NO: 196692 - DNA, 649 bp, Homo sapiens
ccatggggaagacttaggcctggaaagacctaagagaaagaggagaaactggtggatagaaatcagagaacagaggaccagatctaaccaacaggaagcaagtcccagatgtgagtgttatgtgtaccaaagcttctgctgtttactgtgtgatatgctcacacacagaggagatgtcatccggagacagtgatgctgatctgtttcatggtatcttacatggagcttatacctggcactgttggctaactgctcccagccctattcctggaagagttggtgtgaactccatgaacatgacatgtcaggggtggctgatcataaaggtgggaggggatgtcccagtgcccggaggcatatatacccactgatccttactccactcagacaggaaaccagtgaacattgacagggttgttcttgtgtccagttgcatgtgctatatttgtctgtacaacactctgctttctctcttttaatccgttgccaataaaacaggaaacagcaagaacatttgagattaaactgcccctagcattggtgatgacagagtggatcctgcatgtgcttccccaccagacacaaagccccaaataaaaagtacatcccttctcctcctcgctttgagacgggggcaggcgtggggaat

SEQ ID NO: 196693 - DNA, 923 bp, Homo sapiens
ggattacaggcacgtgccaccacgcctggctaagttttgtatttttagtagagattgggtttcactatgttgaccaggctggtctcgaactcctgacctcaagtgatccacccacctcagcctcccaaagtgctgtgattagaggcatgagccaccacacctgggctaatttttgtatttttagagactaggtttcactatgttgtctaggctggtcttgaactcctgagctcaagccatccgcctgcctcagcctcccaaagttctgggattacaggcgtgacccattgcgccctgcccaatcccatacttttgaaggtgtcgttccagcatggctcctcaggcacaggcccaccacagacagcagggcctatggaggcctgagcagagtttcctcatacttccctttttgctgcctcactctgggtccaccacagggtggcctttttcaggcttctcttcctggttcagttcatcgaccaaagacatggctccatttgctaactgagacccaaccaaaataaacattcatggagtggttgggccttttgttgtgaccccttaggtagaggaagggagagatatgcccaggttctgtttggtgtttctacctgtcaatagagataccacgttaatcattaacagccatgcctcccagttagtaagcaagacaactaactggaactagactttttacacaagttagagatgatcttcatcggatgcgtcaacaatgcctgaagcccagtgtcttagaaacaacacttgcccagggtcaggcgtggtggctcatgcctgtaatcccagctacttgggagattaaggcagagaatcacttgaacccgggagatggaagttgcagtgagccgagatcgcgccactgcactccagcctgggtgacagagcgagactccatctcaaaa

SEQ ID NO: 196694 - DNA, 596 bp, Homo sapiens
tgcccacgtcagcctcccaaagtgctgggattacaggcgtgagccactgtgcccagcctctttttttttttttttttaaaacatagttcaagtgattgattaccttgaaaagtaaatgcaattagggccatgtatacagttttattccatgcatacagcttgtaaaataggatttcttaggttactatagaattaaattattctgtaatttgttgcaggatagcgttgtgataagtctgtgagcccacaagagttacctagagacttttcagataaggtagacacatcagtaatacagtaggatttacctcaggagaatctgctaatccttattttcttttattattgagccacctacaggcttgcccatcagtggactcagtcactagtattggattgctgataaagagggattgaaatatggtggtctttgactcaccttagattttgcagtatactttaaaaaacttaatttggctagaatgtataatagccctaatgctatgtgagccgagaatgactaaacaaacaaaatttaggtgattgatttactgtcatacgttttgctaagtgaactttttctttgtgaggagggg

SEQ ID NO: 196695 - DNA, 476 bp, Homo sapiens
tggaagtaccatgttgttgctattttcatcctgagcaattataagttggtaaagcaagagttatgtgccttgaaactaatgccacctcagtctagctgctcactcagagcaagtgcagaggaaggcaagggaaccaatattctccatacacttgctatgttttacgcactgagtgaagatttttctcatttaattgcatgtaatttcattctaaagagcagacaaacaatttcattcgattagatatacttcctcaataaaggcttttgaatgaaagcaaatttcattttgctgatcaggctacactacgtgagtgtgtccttatagaaataaattaacctggaattaacattacgtatttttgttgttgttttcaaagacagagtctcatcctgtcacccagatttaacctttctcagccacatctgcaaaatggggatggtaaaaataggtaatgataggagctatttcacact

SEQ ID NO: 196696 - DNA, 166 bp, Homo sapiens
agagaggggtagacgaatttgagatgtattttggaagtagaacagataaaatcttgtgaattgcatatcggcataagaaaaagtgaggagccaatgatgattccaggtttcaggcttcagtaactggataaatggtggcaccatttattagtatgggaagatcagc

SEQ ID NO: 196697 - DNA, 543 bp, Homo sapiens
ataaaagttattcttatgccttatccgtggcttgtgaaatggttttatactgccctttatctataattattcctcttctctatcttcactattgttctcatagatcaatgggtcttaaatctgtctgcacattagaatcagctggggagcttttaacaattaccagtgcccagatctctccccagaacaaacgagaatctctaggggtgaggccaggcatcagtatttttaaaagcttcccgggggactctgatgtacctccaagggcgagagccactgtcaaagctgctcaaggagtgctatcccagcagagacgtcaccagagctataggtgctgaccaccagccagttaatggaactcccacctggggtggagctccacacagttacaaagatgatagaaaaatctctttagggagctgacaatcttatgtggaaaatataattattagagtaaatacagtaaactcaagtgacaggcatgctgacacagatgttagtttatttactgagtgataaataatttggggaaaatgaccttag

SEQ ID NO: 196698 - DNA, 303 bp, Homo sapiens
ccatacacactgtaggataataaaggtgtgtgctgtttaaagctgctaagttttgtggtaatttgttctgcagcaatagataacaattacacctacacagaagaaataaaaagaaacatgaccaatgaaaactcatttgtgtaaaaaaaaaaattcatatatatttctctcaccactcagaattttaaaagattcctcttcccttaactcaatataataaagctaactctttattattaagactataagaattttagaaacaggctggttgtggagactcggcgtgtgcagggtaccgagctc

SEQ ID NO: 196699 - DNA, 500 bp, Homo sapiens
gaatggagacaagcaagacacaatctaaatagtattttatccaatctgttgtgtataactggtcagagctccgtagaatgaaaggagatttcaagtagcacctcaaagctctgaagcacaaccaaaacacagcatcatttcagaccgaagcagtaaccaaacattcctactttgatatggttcaaggatgctatcatcaatattgaatcatctgctcacttatccaggaagaaggggggcttagttactactgtactatgattgtgctcaatcaacacgttacaaaaatcaagctgccataataataataataaaggctcctatacacaggaccaattatcttcagttcttcacctccaagcatccagtgtttacttccacatgtgctcaatgtttagctaagacatataagtgaaatatgtggtatttggttttctgttcctccattagttcatgttgccacaagggaagtgatttcattctattttatggctgcatag

SEQ ID NO: 196700 - DNA, 220 bp, Homo sapiens
taccctatatttgctttttaaagtatattaaagagccaccatatctagggttagctaggaaaaagcaatggcaccatcctgggagtccacccctctgaaagatttttgattagtctccatgttgcaaagtcctccagttattcatgtacattttatccttttagtagaagataagggtcttggcttttcacccacaagttgtacagaagagtgtaaagaa

SEQ ID NO: 196701 - DNA, 832 bp, Homo sapiens
atccttaattaaattaatccccccccccccctttcctgagtgctgagcgcgaacccgaggagatgaaccctttaactaaggtgaagctgatcaacgagctgaatgaacgagaggtccagcttggggtggccgataaggtgtcctggcactccgagtacaaggacagcgcctggatcttcctgggagggcttccttatgaactgactgaaggggacatcatctgtgtgttctcacagtaagtgtcctttcatttcctgcctcctgagtcgacagagtactttgtttctgtaatacattttgtggcatcacaaaaaccacttattttcactctaggctgaatggcatccctgcatggggagggctggagcttctgttctagatcagtcccaggacatggttctagaatgttctgtgggagatccaagaggtttgttaatttgggagggcatcttggggatcctagtctatttctgttgtttttcactgaggcttgttcagcctgggcctagactggaacagactggactccttgggctcttgcaaactaggggtaacccatggtcacagggcccttctggcccttacctgtgtggcgtcatacgattggggcaaagcacagaggaaattggggtaaaaaacagaaggtcgtagtttgctttctttgtttctcgatgagtgtaaggttagtgagcaaaggcaatctctgcctggaggctgagaatcacagcccgaagggaacaagaatgaataggagacctgtatattcttcattctgctgaggtgttagcagcagcatttcatgggagagggtgttggcagctcatactggtag

SEQ ID NO: 196702 - DNA, 1528 bp, Homo sapiens
gcgcatgcgctgcgctgcctttcccgggcgctgattcctgagtgctgagcgcgaacccgaggagatgaaccctttaactaaggtgaagctgatcaacgagctgaatgaacgagaggtccagcttggggtggccgataaggtgtcctggcactccgagtacaaggacagcgcctggatcttcctgggagggcttccttatgaactgactgaaggggacatcatctgtgtgttctcacaatatggggagattgttaacattaatctcgtgcgggacaagaaaactgggaaatccaaaggattctgtttcctctgctatgaagaccagaggagcacaattctggccgtcgacaattttaatgggatcaagatcaaaggaagaactatccgagtggatcatgtgtctaactatcgggctcctaaggactcagaagaaatagatgatgtgaccagacaactccaggagaagggctgtggggctcgtaccccctcaccaagtttgtctgagagctctgaagatgaaaaaccaacaaaaaagcacaaaaaagacaaaaaggaaaaaaagaaaaaaaagaaagaaaaagagaaagccgaccgggaggtacaggcagagcaaccatcctcttcgtcacccagacgcaagacagtaaaggaaaaggatgacactggccctaagaagcacagcagcaagaactcagagagagctcagaagtcagagcccagggaggggcagaagctccccaaatccaggacggcctactctggtggagcagaggacctagagagggagctgaagaaggagaaacccaagcacgagcacaagtcctcaagcaggagggaggcaagagaagaaaagaccaggattagggacagagggcggagctcagatgcacattctagctggtataatgggcgttctgaagggcgtagttatagaagtagaagtaggagccgagataaatcccataggcataaaagggcccgacgctcccgggagcgggagtcttcgaatcccagtgaccgttggcgtcactgaagacttcagctgcacagtagatttggaaataattatgttttttaaatgcagtcaaattcagttgggtggttactatttttgtatctaaaacttctggggctggattcttttaatcccttgactatttagagtcattgggagggctgcagtttcaacagctagatatcctggatattgtttgcaccatccattgtccctgtaccagagtatgtatcctgaactttggttcataaatatggctcttgaacccatagaccccagttgaagatggaattttcaggaaagggaaaatactagataattctagaattctagtcttcgtgttagatgtttatagcccagcatcttgggacctttccagttactaggtttggacagcttgatgtgaacgaatgggataggatttttaaaatcagccagctccatgcccaaaccttcctgtttgcagaactttttaatgtcttttctttttcattaaaacttttttgttcgata

SEQ ID NO: 196703 - DNA, 1745 bp, Homo sapiens
gcgcatgcgctgcgctgcctttcccgggcgctgattcctgagtgctgagcgcgaacccgaggagatgaagtaaggcgtcagcttccttttgaggaaggagcagcgggccactgggggtggtccaccgggactggtgtggtagagcgtctgcggggccgaggggcgggagcggcgcggggactggaacagctcgtcccctagttttgctcttcctcagctccggccggttcgcacttacttgtctgcttttctgcctaccctccccaccccccccgccaccgtgaagccctttaactaaggtgaagctgatcaacgagctgaatgaacgagaggtccagcttggggtggccgataaggtgtcctggcactccgagtacaaggacagcgcctggatcttcctgggagggcttccttatgaactgactgaaggggacatcatctgtgtgttctcacaatatggggagattgttaacattaatctcgtgcgggacaagaaaactgggaaatccaaaggattctgtttcctctgctatgaagaccagaggagcacaattctggccgtcgacaattttaatgggatcaagatcaaaggaagaactatccgagtggatcatgtgtctaactatcgggctcctaaggactcagaagaaatagatgatgtgaccagacaactccaggagaagggctgtggggctcgtaccccctcaccaagtttgtctgagagctctgaagatgaaaaaccaacaaaaaagcacaaaaaagacaaaaaggaaaaaaagaaaaaaaagaaagaaaaagagaaagccgaccgggaggtacaggcagagcaaccatcctcttcgtcacccagacgcaagacagtaaaggaaaaggatgacactggccctaagaagcacagcagcaagaactcagagagagctcagaagtcagagcccagggaggggcagaagctccccaaatccaggacggcctactctggtggagcagaggacctagagagggagctgaagaaggagaaacccaagcacgagcacaagtcctcaagcaggagggaggcaagagaagaaaagaccaggattagggacagagggcggagctcagatgcacattctagctggtataatgggcgttctgaagggcgtagttatagaagtagaagtaggagccgagataaatcccataggcataaaagggcccgacgctcccgggagcgggagtcttcgaatcccagtgaccgttggcgtcactgaagacttcagctgcacagtagatttggaaataattatgttttttaaatgcagtcaaattcagttgggtggttactatttttgtatctaaaacttctggggctggattcttttaatcccttgactatttagagtcattgggagggctgcagtttcaacagctagatatcctggatattgtttgcaccatccattgtccctgtaccagagtatgtatcctgaactttggttcataaatatggctcttgaacccatagaccccagttgaagatggaattttcaggaaagggaaaatactagataattctagaattctagtcttcgtgttagatgtttatagcccagcatcttgggacctttccagttactaggtttggacagcttgatgtgaacgaatgggataggatttttaaaatcagccagctccatgcccaaaccttcctgtttgcagaactttttaatgtcttttctttttcattaaaacttttttgttcgata

SEQ ID NO: 196704 - DNA, 1312 bp, Homo sapiens
acaccagttggacaggtctgctttagtgacagaatttaacaagaaggtaaaggatgtagttcaaatcatggttctctgtagcttgtgttcaaatagtttgacagtttggtatgagggctgtcttcactgaagcatcgcctgtcttgcttagatcaaaggaagaactatccgagtggatcatgtgtctaactatcgggctcctaaggactcagaagaaatagatgatgtgaccagacaactccaggagaagggctgtggggctcgtaccccctcaccaagtttgtctgagagctctgaagatgaaaaaccaacaaaaaagcacaaaaaagacaaaaaggaaaaaaagaaaaaaaagaaagaaaaagagaaagccgaccgggaggtacaggcagagcaaccatcctcttcgtcacccagacgcaagacagtaaaggaaaaggatgacactggccctaagaagcacagcagcaagaactcagagagagctcagaagtcagagcccagggaggggcagaagctccccaaatccaggacggcctactctggtggagcagaggacctagagagggagctgaagaaggagaaacccaagcacgagcacaagtcctcaagcaggagggaggcaagagaagaaaagaccaggattagggacagagggcggagctcagatgcacattctagctggtataatgggcgttctgaagggcgtagttatagaagtagaagtaggagccgagataaatcccataggcataaaagggcccgacgctcccgggagcgggagtcttcgaatcccagtgaccgttggcgtcactgaagacttcagctgcacagtagatttggaaataattatgttttttaaatgcagtcaaattcagttgggtggttactatttttgtatctaaaacttctggggctggattcttttaatcccttgactatttagagtcattgggagggctgcagtttcaacagctagatatcctggatattgtttgcaccatccattgtccctgtaccagagtatgtatcctgaactttggttcataaatatggctcttgaacccatagaccccagttgaagatggaattttcaggaaagggaaaatactagataattctagaattctagtcttcgtgttagatgtttatagcccagcatcttgggacctttccagttactaggtttggacagcttgatgtgaacgaatgggataggatttttaaaatcagccagctccatgcccaaaccttcctgtttgcagaactttttaatgtcttttctttttcattaaaacttttttgttcgata

SEQ ID NO: 196705 - DNA, 1843 bp, Homo sapiens
gcgcatgcgctgcgctgcctttcccgggcgctgattcctgagtgctgagcgcgaacccgaggagatgaaccctttaactaaggtgaagctgatcaacgagctgaatgaacgagaggtccagcttggggtggccgataaggtgtcctggcactccgagtacaaggacagcgcctggatcttcctgggagggcttccttatgaactgactgaaggggacatcatctgtgtgttctcacaatatggggagattgttaacattaatctcgtgcgggacaagaaaactgggaaatccaaaggattctgtttcctctgctatgaagaccagaggagcacaattctggccgtcgacaattttaatgggatcaagatcaaaggaagaactatccgagtggatcatgtgtctaactatcgggctcctaaggactcagaagaaatagatgatgtgaccagacaactccaggagaagggctgtggggctcgtaccccctcaccaagtttgtctgagagctctgaagatgaaaaaccaacaaaaaagcacaaaaaagacaaaaaggaaaaaaagaaaaaaaagaaagaaaaagagaaagccgaccgggaggtacaggcagagcaaccatcctcttcgtcacccagacgcaagacagtaaaggaaaaggatgacactggccctaagaagcacagcagcaagaactcagagagagctcagaagtcagagcccagggaggggcagaagctccccaaatccaggacggcctactctggtggagcagaggacctagagagggagctgaagaaggagaaacccaagcacgagcacaagtcctcaagcaggagggaggcaagagaagaaaagaccaggattagggacagagggcggagctcagatgcacattctagctggtataatgggcgttctgaagggcgtagttatagaagtagaagtaggagccgagataaatcccataggcataaaagggcccgacgctcccgggagcgggagtcttcgaatcccagtgaccgttggcgtcactgaagacttcagctgcacagtagatttggaaataattatgttttttaaatgcagtcaaattcagttgggtggttactatttttgtatctaaaacttctggggctggattcttttaatcccttgactatttagagtcattgggagggctgcagtttcaacagctagatatcctggatattgtttgcaccatccattgtccctgtaccagagtatgtatcctgaactttggttcataaatatggctcttgaacccatagaccccagttgaagatggaattttcaggaaagggaaaatactagataattctagaattctagtcttcgtgttagatgtttatagcccagcatcttgggacctttccagttactaggtttggacagcttgatgtgaacgaatgggataggatttttaaaatcagccagctccatgcccaaaccttcctgtttgcagaactttttaatgtcttttctttttcattaaaacttttttgttcgatatgcctctttccacattttttccttgcaatgtatttattatttatttgtatttaggtgaaattcacataacataaagttaaccattttaaagggaacaattcagtggcatttggtactgaacatccacagtgttgtgtaaccattgcctctgtctagttccaaaacatttttttatcatcccaaaatgaaaccctgtagccattaaacaagagctccccgtttcctccctcctccctgtccctagcaaccaccagtggacttcctgtttatgggtttgcctattctggatctttcataaaaatggaattacacaat

SEQ ID NO: 196706 - DNA, 497 bp, Homo sapiens
agcaggacaattgttcagaggcacatggagtttcacacctccagtataatgagacgcactggatccaccgatgtaaatttagagtttttcaatatgtgcaattatgccaccatccaaaatgccaaaatgctgccacattcacactcgtcatcagatctttaatggctgcccaaaaaagttatgagaaagaggagagtggctgatgggggaattggagactggagggagcaagttttacctttttggtttgaccatttaaattgaagtcatgcatacagggaaagttatgcatatagaaaaatgtacacttcatactgcgtgcattcaattaatttgcgccaaatgaatgcacccgtgtcccctgcacccagatggaaaatgccaccagcacccttaatagcccccacctggacccctgaattggagtgaattttgaaagaagagggaaagaaagtgacatgtcccaattagaacatatgggacaggcactttctata

SEQ ID NO: 196707 - DNA, 544 bp, Homo sapiens
gaattttcaaaaagactcactcccacaccatctaggcgggcctgactcatcgtgggtatccttttggatcctcagggatttcatggtttattcctggggctccacttgatgtttcttcaggctggctcgccactgtccgctcctaggattgtgggaatatcccatagagccctcagagtagacaggtgagagttcaatgctgacacacatccacagaggactccttctccgccaagatgaagggacttgtcaccagacaatggtggcttcactgtgacgtgagccgctgttcaccactggtgcctggtgacctggctgtcacatgcgcattcaccaagcaggctcaggcacctggctgtcagggctgtaagcctggcaaagctcaggaaaatggtacagccagagctggcctagtctccagaaaaaggctgcctgcagcaacccactgcagcatgctaatagtctcgaacatagagccttcatgagccatctccgtggtagggtctcacaggagaaggaggagtttcaagactgtgaggtgggc

SEQ ID NO: 196708 - DNA, 243 bp, Homo sapiens
actcctcccaagggttccacttaaaggcttccgtgattaaaaggcacagggttcaaaggtccatcccctctccaaagtggaaaacagaagtgtgctaaggctcttcttttccttgtgaatgtccccatagcccatagtggcagagagggacagaggtcactcatctcctgatctagggatcagagacatgtagacctttttttttttttttttttctcctgaggtgatcttcggaggtgatct

SEQ ID NO: 196709 - DNA, 408 bp, Homo sapiens
gcatcattcactgacagttcccttccatatcccctggtccctactgtttccagtgtggatcagctaatttgcaaccaccactatctgcatctgtgcctacctcagggttcgctccaaaatgcagaagactgctctgcctgtggcaggacagaagtgacattccctggagcagccctcaactcatggctgccaggagttagtgtataaattgccccaaagctctctataaagtggttttatttttgatgtctcatttgacctatacaacaattctggaaggaagaaagttatattaaacaaggccaacagtggagtgtaatccctgtattcttttttgttctctcatctatcccaagaatactgctcagaaaattatagatgctcaataaataattgatgaataaagga

SEQ ID NO: 196710 - DNA, 235 bp, Homo sapiens
gagcagaggccaggccagcttcactgagatcccagaggttctgactggggccgcccagagttgggcatccctggcttctagcatttgagatctcacccgggactggttggtgcaagtaggggatgaagctagggtggtagctggtcttgttccaggttgcaaggacagaatgatgttcctggcacataaactgctctcggcgaagatttgtttcatgaactgaatgaatggtgtg

SEQ ID NO: 196711 - DNA, 430 bp, Homo sapiens
caggaattaaaaaaaaaaaaacatttctgtgcattcactcaccaggtgtcgaaggctcaaactttcatcttaacaataatgattataattaaagcaacaatagatactggccaagaagaccttaatgttcccctcagctggactacattgtagacatttttcctgactgtagactctgacttaagagcatttatttactttagaaaacttgtcattgtaaattctttctttgttcctttgagacgtaaatcttttttaaggccttctgctagtttctaatacaagaatgtcttcctcaaggacctgggagctatctttttcagacacaatctcaggaagatagctcctatttcctagcccctgtgagagggtaagcctaatgtgggtgagtggtgccacataatatacaaagatgatctaaccatgcaga

SEQ ID NO: 196712 - DNA, 331 bp, Homo sapiens
tgttgcccaggctggagtgcagtggcacgatcttggctcactcaacctctgccttcctgggttcaagtgattcccccgcctcagcctccccagtagcggggactacaggcatgcaccaccatgcccagctaattccttctgtaattcttgagcaagtgtttgctctggaaacaagcctacaatttattgggtaagtaaaggaatccatcaatggttttctacataccagagagtaatagcttaatatacaccaacacaaagattgcaggtcattcagagctgaaagaatgttagttgtccagggagcatagaaaatgactgcaaagcttta

SEQ ID NO: 196713 - DNA, 237 bp, Homo sapiens
agtgctgggattataggcatgagccaccatgctcagcctccttcagttctcagtttaaacattacatcctctgagaagctccagtcgaggtcaggtctcctgttgtgtgttctcagagtgccctgcacagttccttggtagcacttatcacagcgctaaattgatgaggaactctatgggaaatgatctgtctcatgtctgtctcccctgctggatgaagctttgtgagaataggga

SEQ ID NO: 196714 - DNA, 678 bp, Homo sapiens
catcatggccatcaccaccaccctcctcctcctcttcatccttctccttctcatcatcaccatagttgcccgtgcacaactctagtatcaaacacaacttctttagtgttgcactggcaataatgtagtcaagttagtaacacagaaacaacttttgtggtgctaaacagaaaaggtcttctttgcaccaaataaaaaataaacagtaaaagcatccagatgggccaggggtttgttcatgtacttacagaacatctaggttctcatcgatattttctgttctggctcattgccttcctggtcagacttgggtttgggaaatgtctctattcagcttcatctcttgaggccatcgggaggcataagacttgggagagaaaatgccattggtccagggggtgtctccagatgatcttcccggaaagccatgaccaattctgaatgtctctctaggagtaaatacatgaattaacacagctgcataaatatttcacttatcgtatgcagcttcagcaggattaattatgctctaaaattagacgtgtaaagagcacagtgctgagcagtacctaattattcatcctctagaatggagtgtttatctcttgttacacagtagcttcagtggacgattatgagtctaatgagtgtcaaaagtataaaaaattttcctaatga

SEQ ID NO: 196715 - DNA, 645 bp, Homo sapiens
gcattccggctgctgttatgagattaattccttcagaggtttactaattaatggatgttgaattatcccaaatgcttccctgttacctaatgagaagcatcctttggtctacaggtggatgagttgcaactaagtcaggagtaattttttttttaacctggaagtctattcagtggataagattaaactagattttctttatttaggttggtaagtagaaccagccgatgatgcttctttgaaaagtgttcatttgggagtaaaacggtttactcagacacaggttggtggctctggtcactttgaagagtacagccagtagatttttggataaatggccaaatactacacaccttaggatttgtgggccataaggtctctgttgcaactcttcaaacctgtgtacctaaggcaaaaacagtcacaggcaataagtaaatgaatgtatatggctgtgtttcaagaaaactttaatgagaaaaacaagttaagggtcagatatgttccagggtcaacagtttccagattcttgatctagattgtccttgatggtttggaaaaagtatatagataatcaattactgatttatttatttatttatttatttatttatttattttgtgtgtgagagagagagagcaaag

SEQ ID NO: 196716 - DNA, 935 bp, Homo sapiens
  misc_feature (607)..(607): n is a, c, g, or t
  misc_feature (611)..(612): n is a, c, g, or t
  misc_feature (628)..(628): n is a, c, g, or t
  misc_feature (672)..(673): n is a, c, g, or t
  misc_feature (714)..(714): n is a, c, g, or t
  misc_feature (771)..(771): n is a, c, g, or t
  misc_feature (794)..(794): n is a, c, g, or t
  misc_feature (806)..(806): n is a, c, g, or t
gccttccctcagcttgaaacacctgctgcttcgcggcggtggctttgtgccacttttcccagggcttgggcatcattctggacccatgttcggtgaaccggttactctcagagctgctttcgggcgcagctcctgctgcagccaggcccgttttaagagaggcttccaggtccagccctcccgctgcagcctgcagggagcgagccggcctgtcccgatgacatagacactaggtttttacagcaattctctgatgaccttgatatggtagaacgctgtgtatttcaagagtaagctctcgtttgaggagactaacaattcctgttttcgccagatttcttcttgaatggcaacctaaatgccagtccaaagaggcccccaatagactgttcacccttcatgtcctcaactctggggaagttaagtaatcaagttgaagaaacacttccactacttaaaaaggtacctgcaaattactttcacatttgttcagctatcctaatgggattttcacttagtaaatctgctactcaggtatctgctatacatatggattcaaaagtggatgatcacttaatacgagggactgaaaaaagcaggttggaancagnnatcagttatttaaaanaccaagaaaataagattagaagacacaaatcaagaaactttaannggattgaagggactggcacaggatctctttctgggaaagcntggttcagtggtatatgtcaagaagtgatggactagaaatgacagatgtggatgagnattgtcgtatacaagaaacaaangcttgatagggngtgttgaaagagaacttaagcttttaggaacctgaaaatgagggagacatggctattggcatggggatccacttaccggttgttggtaataacaggagttaggggaaagtcaataaggattctggatac

SEQ ID NO: 196717 - DNA, 888 bp, Homo sapiens
ttatgggcatgagccaccgcacctggccttccctgcattttagagagaagtgggtgaagtgtattgaaaaggctgttttgaagtcagtggcttccaaatcaaacaatgatgctttctccttgtcttgatccattttaaactgctataacagaataccgcaaaaatggctaattcataaagaaaggaaatgtaattctggaggctatgaagtcccatatgaaggtgccagcatctggtgagggttttctctgtgttatcccatagcagaaagcaagagcgtgagagaaaggaatggggaagggggcagaacttgttatttaataagaaaatcactcccatgacaactaacccattcctggcataatggcattaatccattcatgagacagagccctcataacctaatcacatcttaaaggtcccatctctcaacaccgctgcattaaggactaagtttccaacacatgaactttgggtgacccattcaaaccccggcactcctcaatacctttcccactggatgcatctgcaaggattttcatcacctcaggctgtggcaccagacggtggagcctcagattctcaatcgggacaatacagacaaccatcatgccacagtggggcaagtatggcattgtggcagaaagaaagaaggaaagggagaaagggtgggggagggagagaaggaggcaggaaggacggaccaggcaggaaggaaggaaagagggaaggaaggaggaaggaaggaaaaagagaaggagatattttaaactacagtctatagtcctaattcattctcagtacatagaaatgttcctttctttggggccactgctggtagccatctacatcctgattgcgttctccagagaaacagaaccagtaggg

SEQ ID NO: 196718 - DNA, 161 bp, Homo sapiens
aggttttagtatttaaatgtaaaataacttttgaagtctttaagatcatcaccttgactgaacgagagctaataggttttattcattcctgcaaaaggaatagaatagaacttgtcatactgggtcagtaccagttatgggtcaactaagcaagtagacgt

SEQ ID NO: 196719 - DNA, 233 bp, Homo sapiens
ttttgcagtgtttctaaaatgtttgaggaagaatgctgattgtcctagatcagtcatctgtgatcagaggatagagcttaggttctacaaaccatgttggcaggaacaggatcagttaacatcaaagggatgctgagtgtgtagtcgccgaatagtcagtccacttgccttctccctagccatctatttgttaacaagttaataatttgttaattaataaatgtttttttccc

SEQ ID NO: 196720 - DNA, 495 bp, Homo sapiens
gaatagtcataaaaacaccacatatttgaggcagggagcaaatcaaagggcgtaaaagaaaaaacgtcaatacatgttaaattagtgttacccattgcacagtatttcattgcactggcctagtccacaagctcagaaactcagggtcatgtttagaaactataagctcagaaccagatgacactctggaatgctaccctctggctttacagaagaggaaattgagacccaagaaggcgaatggcttccctgtagttcatgagattccacagtgctgagagacattagtactctttctggtcaaagtaattaatttatgtatggctggtaccttgggacaagggcaatgacattaaatgattctgaaaacacaaaagcaaaaaaccagcttggcatatataaaatacctccaaattaaaacttaacaaatataatatcagtgtgcaaaatgaatggaaagcaagataatattacagtgcttcatgataagaaaag

SEQ ID NO: 196721 - DNA, 337 bp, Homo sapiens
catgcagccctagggtgcagctgctccaggaaggaggcaggacctcctgcggtccctcagctcagtaaatggcatgcatgcccctttcccagcatgctcctttcccaaagcttttcctcctttggttcctgggtgagattttctctttggtttgttggggaaactaaacctaaaagtagttgacaggctgggcgcagtggctcatggctgtaattacagcacttcgggaggctgaggcgggaggatcccttgaccccgggagttccaggatgcagtgagctatgactgccactgcactgcagcctgcctgggtgacagagaccctgtctcttaaatt

SEQ ID NO: 196722 - DNA, 755 bp, Homo sapiens
ataacagcctttctaacaggtgtgaggtgatatctcattgtggttctaatttgcattcacccgattagtgatattgagcattttttcatatacctgtaggccatttctgtatcttctatggaaaaatgtctatctatgtcctttgcccattaaaaaaaaaatttttttttttttttaactattgaggtctgacatgttttggatattaaccccttatcagacatatagtttgcaaatatattctcccattgcataggttgtctcttcactcagtttatgtttttaaatcttttaatttataggtttccactgcatctttttcatccctgggaatttatgtgttgaaaccagaagtagacttttaaatctaatattgtgccttacttgtacaaataggctctagcaataaataggctactaaaggcagtcacattttgtatgaggtcttctgtttcttcttcctggaccatatatcaaattcagaaactggaaaaaggccaagtttgaatttcaactcactacatttcattttaaggcttgaataagtaaataatgctaatggaacttggtgtaccactttgatgaaaatccaaaccaggcttattgtgtatcctttaggctgcatgggatgttacaatgtttatgtttggagactacaatttatactctacctgcttttaaaaatgttttgaaaatgatcacaacataaatatatataataaagacagaatctttttaaatcatgaaaggaagag

SEQ ID NO: 196723 - DNA, 110 bp, Homo sapiens
agtcagtctcaaaaaagaaagcaaaacaaaacaaaacaaaacagaacaaaaaaactctgtgttatcagagagggatatagtcttatttttttaaatggatcaccaatatt

SEQ ID NO: 196724 - DNA, 513 bp, Homo sapiens
gacaatggaagcaaaagatggggacatctttgcaaggaactcagtgatcaggtcttctgtaaaaaatacccaccagatgggtaagaagtagccactggctctaaaattagacaaagaaatgcacctgtttatttgggatgaaacacaatactataatgaaatgcctgagactgggtcatttatatgggaaagaggtttaattgactcacagttctgcatggctggagaggcctcaggaaacctacaatcttggcagaagttgaggcaggcatggcttacatggtggcaggtgagagagagagcgtgagagtgcaggaaaaactaccattcataaaaccattagatcttgtgaaaattcacttactatcacaagaatggcatgggggaaaccacccccacaatccaatgacttctcttcctccacacatgggtattacaattcaagatgagatttacgtgggtacacaaagcctaaccgtatcaactactttcatgtgaattattgcctcaggt

SEQ ID NO: 196725 - DNA, 496 bp, Homo sapiens
tgcctcacagcactcaatacagagcttcagaagattccagaacaccaccacacccaatcatttgcagggctcccaccttacgtaagtgtctcaactctctctctcagtctgtgtggccgttaaaactccgtctctggcagagagactgggtttgagtttcagttctgccacttactagctgtgggaccttgggttgtttctaaactgctctgagggctgcgtgtggcggctcatgcctgtaatcccagcacttcgggaggctgaggtgggcagatcacaaggtcaggagtttgagaccagcctggctaacactgtgaaaccctgtctctactaaaaatacaaaatttagccaggggtggtggtgggcacctgtaatcccagctacttgggaggctgaggcaggagaactgcttgaacccaggaggcagagattgcagtgaaccaagatcgcaccactgtattccagcctgggcaacagagcgagactccatcttgg

SEQ ID NO: 196726 - DNA, 373 bp, Homo sapiens
cagccagaggattggatgaggtcatcgacggagagaatgcagagagaatcctggggctcaccaacatgaagaatttgggacaagaaagaagatccagcagagaagactgaaagaaggcagctaatgaaataggagagaacctggagagcacagagtcttagaggccaagaaagtggtttaatataatccgtatcaaagcatttgtggtttatttttgttaactgacaaaaggattctaaaacatacctgaaaagtataattcacacctaggataatggatcattctgtcacattgttcctttttcacagctgatatgaacatgatattttcatgactttgtaaaataaaaatggaatctttctaattttttta

SEQ ID NO: 196727 - DNA, 413 bp, Homo sapiens
gcactggtggagggagccctgcggggcagtcctcaaggcctccggatgggtgtgagaggcaccggggctgaagcagcatctgggtttgaggaagccacagccccttggctctccactgcagtctcagagcagcctcaggctgagtaagtggctgaggccaatcctttaggaaacggcaccacgcctggctaatttttgtgtttatactagacctggccaacatggcgaaacctcgtctctactaaaaatacaaaaattagctgggcatgatggcgggcgcctgtaatcccagctacttgggaggctatggcagtaaaatcgcttgaacctgggaggcagaagttgcagtgagccaagaccacgcccttgcactccagcctgggcaacaagagcgaaagtcatctcaaaaaaaa

SEQ ID NO: 196728 - DNA, 245 bp, Homo sapiens
cacgggcacggaaaggtgtggctggcttccttcacctttctgaggctcactggaaacttggggtgatccatgctacttgcccagccccaacaccaccccttcttgctgtcatctcagtgaggcttttggcaacacagttccagaagggactggaaaatgcaagtctgctctgttctgggacacccaaactaaaaagggacttcactcatccctaccaccccacctctgcccaagacactctcccc

SEQ ID NO: 196729 - DNA, 364 bp, Homo sapiens
aatctttaaaaatattagaactattggctaaatttatcatattatgtatgcattctgagaactgtatgagtatctggatcatatctatcatcttctcaagtatttgttttataaaatacttagtaaaaatgaaactaaatcttgagcagttttaagtcatggttaatccttctccattgtaattcaaataatgtaaagtaagtctgaatttattaggacaaaacagtcatatgcaaatctcaatcttgttataagaaggaattttctagtttcacaaaagaaaccacaaaatttaattcttttctcgaaggctttaacattctgcatcacaatttcaataaataacggtcattctaaacaaaca

SEQ ID NO: 196730 - DNA, 289 bp, Homo sapiens
cttacaagaggtcttgcactgagcctcccagtgggcaaggggtttaaatcccatggcatctgactccactctttcatttacttttgcccaccaatttacaacaatctccatgccactttcgacattaaccccttccatacttccaaaatcgccaagttggctactaacacattttacacgtgaggaaactgaggttcagagtgatgaactgacttatcaacaccacacagccagtcagtagcagagccagattctgaactcatgcctgttttactccaaagcgacccag

SEQ ID NO: 196731 - DNA, 456 bp, Homo sapiens
gttggactcatgtcccaagtgcctgatagagcgcctggggtgaggtagccagccaaacagtaaatattgaacttcagagactcttaaacttgtagaaacagaaaaaaaagaaatatgtgtatgacttttttctgaataagaatatgcagttgttgcaaaaaaaaagaaaaaaaaaagagagaagatactgcagtatattaagaagaaaattgtggtcacctgtaatcctaccacccaaatgtagctataattgacttttttagaaaacaatatatttatatccaaaaaatgttattatatgtttgagtgcacatgcacacacatactataaaaagcagaatgtatttaggtgcatgtactgttttagaatatttttttctcttaatgcattgaggatatatttatatatatctcaaaaattgtatctataaaatacatgactcaagggacatcatt

SEQ ID NO: 196732 - DNA, 497 bp, Homo sapiens
actgtggtgctcaggtttatattcactctgttgagatggcttactggaatgggagcattggtgtggggctcagcgcagttaaaggagtcataattgcatctgttggtgggccatatcctttccaagagaaaccttgtgctgagttcatacctcttcctttgaagcatccagaaagaaggcagtctttcttgctaatctgttttgaagtatgctcaattaggttggattagggatgatttaaacaaagtaatttagacacagttcttctacagatacattatggtttaaatacctctaggacatcccgtgaaggtgttcagtagagagttaagtgtgcataaatgaaggtcagggagagagagctgggctagaaatacagatgacatctgcatggttattgaaactaggagtagacacgatggattatcctggaagtctaagtagcacttaaagggctggccagggaggaggatttcgtgaagcagtgaatggagaga

SEQ ID NO: 196733 - DNA, 464 bp, Homo sapiens
cagagaagtctaagatcaaggcaccggtagattcagtgtctggggaaggtttgatctctgcttcacatgtggcctcttgttgctgtgtcttcatgtgggagagggagtggaagggcaaaaaaggatggacaggctccttcaatcccttttataaaggcataatcttattcatgggggccccacactcatgacctaactaccttgttaaagccccacctgctgataactatagccttggagattaagtttcaacatatgaattttgggggaacatgttcagtccatagtaaaaactaagaaggtaaagaggatgaggagttggggagtgataaaaatggcttctgtgggccaagcgcagtggctcacaccagtaatcccagcatttgaagtgtctgaggcgggaggattgccagagctcaggagttggagaccagattgggcaacatagtgtgacccctcatggc

SEQ ID NO: 196734 - DNA, 216 bp, Homo sapiens
gcttagaaaggtgctgacaggcttggcttttcacccgagacgttttacatctttaaatatgtttgtaatttgagtggtctgcacactccagattttgttttgaaagggaaactttataaatcactgtattattattagaaataattaaactaaaaactaagatgtggttgcacacatgtttacaacgatgtgaaaaataccggctgtcagcaccag

SEQ ID NO: 196735 - DNA, 423 bp, Homo sapiens
tgactttcacatttgaacatttcaaacaaacagctttcaccagttgtttgtaaggacaaacgtggaaaaacattaaaagaaaaccgttaagtgtaaaaatgccaacattgaatttgaataaaagaagagtcaaccattctaaccagaggtgaaactttaaaatttttgctttcagctttcacaataaaacaggtaaaaattgcctatctgcaacattcggttttttaaaatttatccaactatgccctttttatgttgtacttacattcccttggaaggaataggtgggtatattcatcgaaccttgttattattaatattaaccattagtattgacagcctaatattgagtgaatccttttgatgagagaagcactactgatggtcattatcatggtgtaataatattaaaaatcatttgta

SEQ ID NO: 196736 - DNA, 458 bp, Homo sapiens
tctaacacagcaacactctaaagtagattccagtattatcctcattatttaaggaagaggaaactgaaacttaaggagcacacaaagttggcccaggggcacccagctgaaggtggcaacacggaggcctaaccccaaccctgtgtgattaaacacatgcccttcaactctgttcagctgctccaaactcctattgcctgaatggggctcacagaggtagtttgataacacattacagattatccttgaaaaacctgttctgctggcaagggatggggacaaacctgcctcacttgttttcctgagtccttgcagccctggcctagctggtggagcctgtttgtttttcttttgcctaatcttattcagacatagttgagctgcttaactactcagcctggctttcccagacaaccctttcatcaagggaatgtcccaataggtaaacatgagggcag

SEQ ID NO: 196737 - DNA, 425 bp, Homo sapiens
agagtttcttccacccttattctccagccccccagtgttattagttccttatgtatccttctagagctgctttatgcatatatagccgtaaatatgtttttcccccattaaaaaaaaacaaacaaacacataggctgggcatggtggctcgtgtctgtaatcccagcactttgggaggctgaggcaggcagatcacccaaggtcaggagtttgagatcagcctggccaacatagagaaactccgtctctactaaaaatacaaaaaattagccgggcatggtggttgcatgcctgtaattccagctactcgggaggctgaggcaggagaatcgcttgaactcgggaggcggaggttgcggtgagccgagatcatgccattgcactccagcctgggcaagaagagcaaaactcttgtctcaaaaaaa

SEQ ID NO: 196738 - DNA, 407 bp, Homo sapiens
atgaaaaatgactggactttggaataaaatagacttcaatatgagccccagttctaccgaacaacagctgtgtgatgcagagcaaacgactcaacccctattaatctagagatggcttaaaaattcgactttcaaggtgttgggaggtttagtattaatatatgcaaaacattttgcacatgctgggcacatagtgagtattcagtaagtgttattactatcgtcagtatcgtcaccatcagtgtcatcctcgtcatcattacttttggtaccaagcatatctattaccaatggagtccattttgactatacacagtgaatctcctttacaatgttatttgcaatggaatgaaattcagtctatggacctcactagatgaatcatataaagtagtatatgtgacagc

SEQ ID NO: 196739 - DNA, 411 bp, Homo sapiens
ttggcgtttgttggtatggggaaagcatttacttagaaatttgaaggctggctttagacaatggcctgaacttgcaggaacataaacatgctttaagatgttccgagttgcttgcggtgggatgggatgggaactttggtctctgccgcagaggcaggctagaagctaggcaggcaggaacctgtgcaggggcccctgaggatggaccatgccttggagagcagtcacaactcttgagcccaattaattagctaccttttaatctgcttttattttcctttgttatctctgggccttttcgtttagccttactttaccatttcagctttgttgcagctgtgctgtagggaattaaggaaaatttttaagtcaacttgagtttcatttgtgcaagagcaaaagtggccccct

SEQ ID NO: 196740 - DNA, 610 bp, Homo sapiens
tatattatagagcactgctgggaataccctcatgcattcagcttctcatctattacatttttctcaagagtgagatcactcagttaaaagttgaacatccttatgttttttgctccattctgatgttgctgtcaagaagggtatatcaatgtactaaaagcccataaaacactttccctttttcccacattgggaatctttctgctactttatccacactgtgcacatcttacaactctaaagtcagttagcatacatgaatgagagtaccatatattgtcttaaactctttagttttgaataaccagaaaataccattgaccttagaaatgattactatttatgagattcgaggccggctgcagtggttcacacctgtaatcccagcactttgggaggccaaggcaggtgaatcacttgggctcaggagttttagaccagccttggcaacatggtgaaaacccgtctctacaaaaattagccaggtgtggtagtgggcacctgtagtcccagctactcaggaggctaaagtgggatcccttgagacagggaggcggaagtttcagcgaaccgagatcgcaccactacactccagcctgggtgacagagt

SEQ ID NO: 196741 - DNA, 595 bp, Homo sapiens
ctattatttaaaagtggtctcccaaaacatgtaatgatttcccccaaaaatgtaatgatttcctctccttactttgaatgaaatgggctctaaatgctccactcccattctcctcacccaattatactggcaactatgtctatacaggtactctggcccgagctcccagttcctgaatattgagatcaaagatgtatatatgggaaagtagtagagcttggaggtttgctagagaacagtatagcattttctatagatagctttacagaaacacagccaacattcagcattttaaaagcagctgaggctggccacggtggctcatgcttataatcctagcactttgggaggctgaggtgggcggattgtctgagctcagaagattgagaccagcctgggcaacatggtgaaacttcatctctactaaaatgcaaaaaattagctgggcgtggtggtgtgtgcctgtagtcccagctactcaggaggctgagtcatgagaattgcttgaacccaggaggcggaggttgcagtgaaccaagatcacaccactgcactccagcctccagcctgggcaacagagtgagactcggcctcc

SEQ ID NO: 196742 - DNA, 316 bp, Homo sapiens
cacactcatttaatttaatctccatagtccaccccattttgtaaaagaaactgaaggtgaagtttggagagattaaggcacatattttaaaaagtatcagggcctggtgcagtggcttacgcctgtaatcccagcactttgggaggccaaggcaggtagatcaggtagatcactcaaggtcaggagttcaagaccagcctggccaacatggtgaaaccccatctctactaaaaatacaaaaattagcttgatgttgtggcacatgcttgtaattccagctatttggaagggtgaggcaagaggatggcttgaaccc

SEQ ID NO: 196743 - DNA, 427 bp, Homo sapiens
gctttctgcccagaaagtggaagcgcttcccttaaggcaagagcctgtatgttcccttcagctaagctctggcataaagtcactttctttttaccatccttgtgtttgtcatttaaatttgcaagcaacaaggggcatgacgtgtattcctaggactgagcccttagcctgtggggtctgatgctttctccatttactgtcacaattggattgcactgtaggacacccagctggtacccaagatttggtctgtgtggggaaaaaacccatgtatctggtaacagaagtgttctgtgttgagtgttgagagtatactataagacagttgtttttcctattataacattttgtctttcaacttttttcttcatgtcttctgagacataaaagttgtgaattttgaggaaataaattgatttatttttca

SEQ ID NO: 196744 - DNA, 453 bp, Homo sapiens
attccacttctaattctaattttcttgctgtttccaccaaatctcccccaaggtcttgaaccccccaaagttattcatgacaggggtatcaacttcctccaaactcctgttaatattgatattttgacctcctcctgtgaatcacagatgttcttaatggcatctagagtaatgaatcttttccagaagactttcaatttactttgcccagatccatcaaaggaatcactatccatggcagctatagccttatgaaatgtgtttcttaaataataagatttgaaagtcaaaatgactccttgatccatgggctccaaaatgaacgttgtgttcctaagcatgaaaaacattaatctccttgtacatcttcattagagcccttagatgaccaggtgcattgtcaatgagcagtaatattgtgaaaggaatctttttttattttcttctgagtag

SEQ ID NO: 196745 - DNA, 621 bp, Homo sapiens
ggttgagtgtccgggtagctgtgcgttgttgtttaccacgatgcagaacactagggaaggaacaggctctggcgagcggcatcagagtgttgcctccagtgctttaagctagagatgcctgtcaaacatccaggtagaaaagtcacacaagtgattggtcgcacaagttcaggagagaggaaataaatattaaggcaccattggttattgatactgtgtagataaatctacgggagggaggatcctccagggcacagctttcacagtggcttgtgtctccgtgggtcatgaagtcaatacagtgggcaccagcaattttcaaaaaacgaaatagaattgaaaacaatatctcggtagtaagggctgttgtaaaatgtttccttttatgccaactgataggggaattttgccctatgaaacattttttaaaaattaaatttatgtgaaaagagagctgtgtcctagatcacagtatgaaacttctttttttaaactgcagatcacagtttaaaagccactgatgtagaaggagatgtagttccaaaagagatcagagactgagttgattccggggccatttcaacgtgcagaggcttgggatgggtctgggaccagcaaagg

SEQ ID NO: 196746 - DNA, 318 bp, Homo sapiens
  misc_feature (318)..(318): n is a, c, g, or t
acacagcccctgcctcaggacagagtgcctgggttcaatgccacctcccagctttgtgatctgaaacaagtcactcaacctctctgggtctcatggcctcagctgtgaaggggacatgatattactaccacagttccacaggctgttctttttttttttttttttttttttttttaaaaattttttttttttggatttttaaaaaaaaatggggtttaccgggtttaaccaggaaggttctaaattaaaattccggacccttttaaagttggggaccggaccccaattcaaaacacggggcaaacattttcccggggn

SEQ ID NO: 196747 - DNA, 460 bp, Homo sapiens
gatctgcgcgcctcggcctcccaaagtgctgggattacaggcgtgagacaccatgcccggccctcagtctcttttaagcaaggatcaggggagtaatcagatggcccatatagcgctcctgctattgaaggagcgcagatgtcgctcagatagcgacaggaagagaagtcagtttccccctgcaggtaggatcagtacttttcctaagtggctgcacttctttgaggtgcaagcatacagtgctgtctttctgagagccctggcatgacaccaaggggaggcccccttctgatgtaaacactgagcttgctgggttgcataaggcctctcaggggtgatataaaccgagggggtaaaggtgaccgtgttgctcccaggaactgttttcagaagatgcacaggtgcagcaggaggattcctgccagaagcaggaacagagagggcagggagaaaaaggagg

SEQ ID NO: 196748 - DNA, 480 bp, Homo sapiens
cctcccctacaaccctggtgactactgttctaagaatttgactattccaagtaattcatataaatgcaatcatacaatatttgttggccttttatacctggcttatttcactcagcataaagtcctcaaggttcatccatgttatgacatgtatcacaatttatttttaaggttgaataatattccattgtaggtacatactacattttgtttattcatccatcaatggacatttgggttgtttctaccttttgactactgtgaataatgttgctatgaatatgaatatgacagtacaaatatctgttggagtccttttttttttgagagagagtctcactctggttgcccaggctggagtggagtgatgccattacagttcaccgcagtcttgacttcctgggctcaggtgattctctcacctcagcctcctgagtatttgggactatgggcacacgccaccatgccaggctaactttt

SEQ ID NO: 196749 - DNA, 778 bp, Homo sapiens
tattcaaaaagagacccttttgtatgcttctcctttctcagccataattataatgtgaaccttctgagtacagtgttattctaagtttctcggggcaagggagcagttcccatttaagaccctcttttgttgtgtctttattaatagactcaaactttgtgtcccggattttctttttctttttccattttcttttttaattgaaaagagattataaagacttcagatattcatttgctctgcaaatggagaggagaaataggaaaataacgaaataggctttcactagtgccactctgtctttgataatgctcgtgtttgagaaagacttgatgatgtgggtggaagtgtgatggcaacttaaatttacttagagagttggttttcagtggatgatagtcttcctcacctcctcatctctcccaatccatctcatatagaggtggagctatttctccagctgttagtagtagttgaagcattaactgctgttgatatagaaagagtcttttattcttttttttggtatttgggtatgatgcagttctttttacttcactttagagtaggtaccagcgtgggatgtttcctgtgcagtcctttttaaccaaatggttttttctggcatagtactggcagtgttgcttggctaattcctaatgtagtcaagttagttctgtcagatgtattcggaatttagttggaattgtttagcattaaattacggaagcatctgaaagttggttttacgaagttctttttaaaaattttctaaact

SEQ ID NO: 196750 - DNA, 720 bp, Homo sapiens
tattcaaaaagagacccttttgtatgcttctcctttctcagccataattataatgtgaaccttctgagtacagtgttattctaagtttctcggggcaagggagcagttcccatttaagaccctcttttgttgtgtctttattaatagactcaaactttgtgtcccggattttctttttctttttccattttcttttttaattgaaaagagattataaagacttcagatattcatttgctctgcaaatggagaggagaaataggaaaataacgaaataggctttcactagtgccactctgtctttgataatgctcgtgtttgagaaagacttgatgatgtgggtggaagtgtgatggcaacttaaaccaaataataatttgaaaacaaaaatggaggaaaaccttcatagaagagtaaattagtaagttattggtatgaccttgatttctattctctatgataggaaagactttagtatttacatttttatcttatggtttctaatttttctcatatactttgaagcatttacttgtcatgttcagcctgttcatacataatttgaaaaagtttcccgccccgaaaatctacattttaactgttgtggtgttcattttcctttacgggcccaaagttttaaataggattgaaaattctaattgtcacattagttggtaacatttagttttaatatatgaaaaaggaaatgtttttctgctg

SEQ ID NO: 196751 - DNA, 450 bp, Homo sapiens
atccccacacatttgctggagcccacaatggcccaggccctcgagcattattttgaactgaaatacagtagacttgaaaatttcaagaaagactacttctggattctatttggataacttttcccgttgctttgatcttacagtcttttaaatagaaaactaacacgtggtccttgaagaaaagttggaaaacggtcagatagaagaaaaatcaataatccaaggccatcaccaaagcagaattgcattttgcatttacatatttccttcaaacttttattcaagtatcttttgaattgttgtaattatgtgtgtctggaattttacttttttttcctgaaacttaatcctctaacgtaaatcatttttatgttacgtagtcatttgtaaacttcacttttagtgtttgtaaatggtccattttgtgaatatagtttacttgactattct

SEQ ID NO: 196752 - DNA, 111 bp, Homo sapiens
taataggtgaggggaacaatgccttaggaaaaaagaacttccctagatcacacagtaagcccatgatcagctggaaggagatgaattctttttagtccttgccgtagacat

SEQ ID NO: 196753 - DNA, 172 bp, Homo sapiens
gaggcagagagatggggtcagggcactgtctcttgcaggcctttgtgagggctcagacttggacaatgcttgagctggggagacatgggaggttctgaggccagataacatggcctgaattatattttaaaagagtcacattggctctagggtgcaaagatagacgtgagag

SEQ ID NO: 196754 - DNA, 433 bp, Homo sapiens
aggcaggtaaggggggactactgtactttctgtatgttatcttcaattcttagtgttggctgtagaatatttttttcagaggccaaaatcttattccctcagggtaacataaagacagagatcggctggtcatgatggctcatgcctgtaatcccagcactttgggagggccaaggcggacagatcacgaggtcaggagatcgagaccaacctggctaacacggtgaaaccctgtctctactaaaaaatacaaaaaattagctgggcatggtggcaggtgcctgtagtcctagctactctggaggctgaggcaggagaatggcatgaaccctggaggcggagcttgcagtgagccgagatcgcgccactgcactccagcctgggtgacagagcgagactccatctcagaaaaaaaaaaaaaaaaagatcagca

SEQ ID NO: 196755 - DNA, 864 bp, Homo sapiens
gattcttaggtttatattcatgtctttgcctagttttggcatcagggtaatactaacttaaaatgaaatggaaagtgtttcctcctcttctgtatctggtgtagaattggtgttaattccttttaaagtattttgttgacttctccacctgggcttggagatttctttttttcttttttctttttgagttttataaactgtgaatttattttacttgataactaaagaactattcaaattatctattttatattagatgggttgtgatagtttgaggaagtggcccatttagtctaaaaatgtgtagaggtgttcatagtactctattttgctgtctgcagagtctgccatgagatctctgttgcattccagatactggtaatctgtgtcgtctctgtttttctttgccttttttcccccttctgcttgctttgggtttattttgctcttgagatgggagcttaaattattggtttgagattttttctcttttctaatgtatgcatttagtgctataaatttcccttcagcattgccttagctatgttccatatatttggatatattgtagtttcatttttcattcagttcaatgtatttttttattttccttgagacttcctgtttggctcttaggtagtgtaaatttctgtttattcctgtatctgctgtacatttaagtcattgctaattatttaccatcctaaataatattgtcagaaataacatcctttaatcaggcacggtggttcatgcctataaccctagccctttgggagaccaaggcaggaggatcccttgagcctaggacttcaagacctgcctaggcaacataacgagatcttgtctctacaaaaaaagaaa

SEQ ID NO: 196756 - DNA, 1219 bp, Homo sapiens
  misc_feature (865)..(865): n is a, c, g, or t
gcggtgcgagcgggtgcgcgcgcagcgggccggcagtggcggcggagatggaggagggaggccgggacaaggcgccggtgcagccccagcagtctccagcggcggcccccggcggcacggacgagaagccgagcggcaaggagcggcgggatgccggggacaaggacaaagaacaggagctgtctgaagaggataaacagcttcaagatgaactggagatgctcgtggaacgactaggggagaaggatacatccctgtatcgaccagcgctggaggaattgcgaaggcagattcgttcttctacaacttccatgacttcagtgcccaagcctctcaaatttctgcgtccacactatggcaaactgaaggaaatctatgagaacatggcccctggggagaataagcgttttgctgctgacatcatctccgttttggccatgaccatgagtggggagcgtgagtgcctcaagtatcggctagtgggctcccaggaggaattggcatcatggggtcatgagtatgtcaggcatctggcaggagaagtggctaaggagtggcaggagctggatgacgcagagaaggtccagcgggagcctctgctcactctggtgaaggaaatcgtcccctataacatggcccacaatgcagagcatgaggcttgcgacctgcttatggaaattgagcaggtggacatgctggagaaggacattgatgaaaatgcatatgcaaaggtctgcctttatctcaccagttgtgtgaattacgtgcctgagcctgagaactcagcctactgcgttgtgcctggggtgtgtcccgaaaggtatagccggttccctggagtctgagattggcatggagctcatgnctgggtgggcagaatcttacctcctggagggatcgggactcacacgcaaccagagggcatacaggatagggcgcaagagggcgtccccggagccgaaggcgaaagtgccgcaggattgaggctcgacgagagacgttccaaggagtaaggaaaacaaaaatgtggcgccacccggggagggcaaatgaggaacccagaggcggggcgaacaatcaaaacaacgcaaagaaaagacggtcgagggcacacagtcaacaagaacgaaacacactcagagacgaaagtatgagaacaaaagaacaagagcgaacacacacgcacggcgtgtcgcggcgacagagcaactaacacggg

SEQ ID NO: 196757 - DNA, 1185 bp, Homo sapiens
  misc_feature (861)..(861): n is a, c, g, or t
gcggtgcgagcgggtgcgcgcgcagcgggccggcagtggcggcggagatggaggagggaggccgggacaaggcgccggtgcagccccagcagtctccagcggcggcccccggcggcacggacgagaagccgagcggcaaggagcggcgggatgccggggacaaggacaaagaacaggagctgtctgaagaggataaacagcttcaagatgaactggagatgctcgtggaacgactaggggagaaggatacatccctgtatcgaccagcgctggaggaattgcgaaggcagattcgttcttctacaacttccatgacttcagtgcccaagcctctcaaatttctgcgtccacactatggcaaactgaaggaaatctatgagaacatggcccctggggagaataagcgttttgctgctgacatcatctccgttttggccatgaccatgagtggggagcgtgagtgcctcaagtatcggctagtgggctcccaggaggaattggcatcatggggtcatgagtatgtcaggcatctggcaggagaagtggctaaggagtggcaggagctggatgacgcagagaaggtccagcgggagcctctgctcactctggtgaaggaaatcgtcccctataacatggcccacaatgcagagcatgaggcttgcgacctgcttatggaaattgagcaggtggacatgctggagaaggacattgatgaaaatgcatatgcaaaggtctgcctttatctcaccagttgtgtgaattacgtgcctgagcctgagaactcagcctactgcgttgtgcctggggtgtgtccgaagttaagccgcttcctgaagctctgagattggaattgatgccaangactgggtggcgcaagaacttacacactggagagctgggacaacaaacagagggcaacacgacaagcacgcagaggctagtccagagacaagagaaaaattcaagacataatagagccggagccaactagccaagaacgacaaagcaacccacccgcgccccggagcgagaaagagccacagccagcgcctaacacccaaagaaagcgggagcggacacgagacaccaaacacgcccacaggtcagacacgaagcaggaccaatgtcaacaaccagagactacctgagccactggggctacgtagctctgcgaaacgaaaagac

SEQ ID NO: 196758 - DNA, 200 bp, Homo sapiens
gtcagggatcaaagcaggcaagccatttgcccagaaccacacagctgttgccagagttgggatccaaatgcaggactgtccttggccataccgccttctggatgtccctacagtggctctgcccagtcaagagcccctgttgcccggggagacccctcttcacatcctcatgacaatgacaatcccacgagttaaacatt

SEQ ID NO: 196759 - DNA, 1026 bp, Homo sapiens
acaaaaccctcactttgctactgaggaaagttattcaatggccagagacaccctgcggcttttgaaaagaggtttcaggctgacaaatatccatatatacatatatatttatatttaagcctaaaacgactctttgatccctcccctaagacctccttcccgtccgcctaggcctcggtatcccccaccaggtatgagaaggaggagtcttcattcttcccaggcggggagaccacgccttccctgcctcctccctccgcggggggtcgcgttggaggtcacccccgccccctaggcgctgggttgggagtgacgcggggtgggctggagaggtttcctgccgtctgggaagcgtaaacggaccgcccacctgtcgggcctcggccgcccgcacctgcttgtgagaagcctgcggctggggcaccgcccccggtccccgcccgggtccgcgcattgggagcacactggccctttaagagcgcggcggccgcggcgcgcggggaggagggctgggagcgcccggagccgcgctgaactcgccggggacgtcgggcgcccgctccttggctggctcgcttgctctctcgctcgctctctcgggtcggctccctgcgcctcctcccgggactgcttggggacccgggcccggtcgggcgcggcggcgagcagaatccccgtgcaggaggcgcgcgctccgggcagcgcccggccccgggcatggacagagggagctgggcgcgcagggagcgccgcgggaccgggcggccggagcgctgagccagacaaaggctccggagttgcgcttgctctcgggagccgggccccaggcgctgggcgccgaggctgcggaacctcgccgggggcagctccggtcggccccctttcccgccggctggttccgagctcccggacctgccctgcccgcttctcctcgggcttgggaatttgccgaggcgacctaggcggctccggcggggaccgggagcccgaggtccgcggcgcgcctgccgggccaggagccaggga

SEQ ID NO: 196760 - DNA, 575 bp, Homo sapiens
gttctccagcatcactttcactgatgtcataaaaccctgcatcttttgcaggatttgcagtttccttttgcaactgatttgctttccgttcaccttgtgttgtgactgtggtatattcaggagcgtgagatccataaagacatggaggggacattagcaggtgagctgtttgagcaggaatcactttagaagtggccagctcatttggggtattttgaagacaatgacttttcttccttggggtacttgggtaacaggtagtggtgaagtggatactgaagaagcattttaagatgtgtctttgttctgggagatgctgctgagtagtcgagaccaatctcactcctgagacaggcagggtatgattgagacacggtgtcagggtgctgtgggctctcggttttcctcccgtacatctgcttaggtcctttgttatttctcctctgcctcctgggttccgatggtttgggggtgccagcccccacctgtgggcctcttctcttcctggtgatgtcacttgtgtcctttgtaccatccccacctctggattgcacccgggtatggccactgtctct

SEQ ID NO: 196761 - DNA, 387 bp, Homo sapiens
accattattacaacagcaaaaatatcaaaaaggaaataacctaagaccagtttaaacagggaaataagcgaggcgcggtggctctcgcctgcaaccccagcactctgggaggctgaggttgaaggatccctcgcgcccaggagctgaagaccagcttgggcaacatagcaagaccccatctctgcaaaaactttttttcattaactaggcatgatggcacgcacctatagtctcagctactgggagagctgaggtgggagggtcactcaagctcagggggttgaggctgcggttagttatgatcatgccactacactccagcctgggtgacagagtgagaatctgtctcaaaaaatacacaaacagccaggcatggtggctcccacc

SEQ ID NO: 196762 - DNA, 1032 bp, Homo sapiens
agcggggatgactggccgcaggcggccgggcgggctgtaacccgccgctgaactagcgcttctgtgtccagaggcttcggcctggccgccgtcgcctgtaagctacgaggaggagatttacgacttggccgggcgcagcaaaggccagactctgcgcgaacaggcgctgcgcaccaaccggcaggcacctggcgggcaccatcgcacggtggcgcagaagcccctcaatggccagcgccagctgcagccgcggccgcgcagtcgtcccacctgagcttgggcgaatgtggattgggaaagtcgacattaatcaactcattattcctcatagatttgtattctccagagtatccaggtccttctcacagaattaaaaagactgtacagctggcagcctgttatcgattacattgatagtaaatttgaggactacctaaatgcagaatcatgcgtgaacagacatcagatgcctgataacagggtgcagtgttgttcatacttcattgctccttcaggacatggacttaaaccattggatattgagtttatgaagcgtttgcatgaaaaagtgagtatcaccccacttattgccaaagcagacacactcacaccagaggaatgccaacagtttaaaaaacagttgaaaatggtgaacattgttattttacaattctaagaaatatgttgataaggtaacttttccggtcacacacaacagactgattttcctgtggaagacctcacaggagttctcttgaaccaggagactattttgagctgaaatacctggagccctctcaagctatttgggcctttcaatttgaaacccaggtttggatgattctaagctctatggcagagactgtaatcattttctcttcaccctcaggttggggactcaccctcagggttgggagtgactgctgtctctccagcccccaccaattacaccatgttctggttgttaaaatccagtgtatgcatgaaatgtaataaaagtatcttcgcagcactaagtagagagttccttgt

SEQ ID NO: 196763 - DNA, 980 bp, Homo sapiens
agcggggatgactggccgcaggcggccgggcgggctgtaacccgccgctgaactagcgcttctgtgtccagaggcttcggcctggccgccgtcgcctgtaagctacgaggaggagatttacgacttggccgggcgcagcaaaggccagactctgcgcgaacaggcgctgcgcaccaaccggcaggcacctggcgggcaccatcgcacggtggcgcagaagcccctcaatggccagcgccagctgcagccgcggccgcgcagtcgtcccacctgagcttgggcgaatgtggattgggaaagtcgacattaatcaactcattattcctcatagatttgtattctccagagtatccaggtccttctcacagaattaaaaagactgtacagctggcagcctgttatcgattacattgatagtaaatttgaggactacctaaatgcagaatcatgcgtgaacagacatcagatgcctgataacagggtgcagtgttgttcatacttcattgctccttcaggacatggacttaaaccattggatattgagtttatgaagcgtttgcatgaaaaagtgagtatcaccccacttattgccaaagcagacacactcacaccagaggaatgccaacagtttaaaaaacaggtaacttttccggtcacacacaacagactgattttcctgtggaagacctcacaggagttctcttgaaccaggagactattttgagctgaaatacctggagccctctcaagctatttgggcctttcaatttgaaacccaggtttggatgattctaagctctatggcagagactgtaatcattttctcttcaccctcaggttggggactcaccctcagggttgggagtgactgctgtctctccagcccccaccaattacaccatgttctggttgttaaaatccagtgtatgcatgaaatgtaataaaagtatcttcgcagcactaagtagagagttccttgt

SEQ ID NO: 196764 - DNA, 437 bp, Homo sapiens
gattccctgcctattctcaataaaaaactcaaacttaggaaagccagtgaggtttgtattcgccttacatcaggggtgggttggatttaccatttctttgactccttcaatcttttaggtaacttttccggtcacacacaacagactgattttcctgtggaagacctcacaggagttctcttgaaccaggagactattttgagctgaaatacctggagccctctcaagctatttgggcctttcaatttgaaacccaggtttggatgattctaagctctatggcagagactgtaatcattttctcttcaccctcaggttggggactcaccctcagggttgggagtgactgctgtctctccagcccccaccaattacaccatgttctggttgttaaaatccagtgtatgcatgaaatgtaataaaagtatcttcgcagc

SEQ ID NO: 196765 - DNA, 1033 bp, Homo sapiens
agcggggatgactggccgcaggcggccgggcgggctgtaacccgccgctgaactagcgcttctgtgtccagaggcttcggcctggccgccgtcgcctgtaagctacgaggaggagatttacgacttggccgggcgcagcaaaggccagactctgcgcgaacaggcgctgcgcaccaaccggcaggcacctggcgggcaccatcgcacggtggcgcagaagcccctcaatggccagcgccagctgcagccgcggccgcgcagtcgtcccacctgagcttgggcgaatgtggattgggaaagtcgacattaatcaactcattattcctcatagatttgtattctccagagtatccaggtccttctcacagaattaaaaagactgtacagctggcagcctgttatcgattacattgatagtaaatttgaggactacctaaatgcagaatcatgcgtgaacagacatcagatgcctgataacagggtgcagtgttgttcatacttcattgctccttcaggacatggacttaaaccattggatattgagtttatgaagcgtttgcatgaaaaagtgagtatcaccccacttattgccaaagcagacacactcacaccagaggaatgccaacagtttaaaaaacagagacaaggtcttgctgtgttgcccaactggcctcaaactcctgagctcaaagtgatcttcccacgtcatgctcctcccatatcacgtcactataggcacacaccactgcccctgttttattttgaacagttctttaatttttaggatattgtttcaagttactgtccttattggcaattttcccaccagtgacccccgtaccttgttcccagttccctctgccatgcccaggcaactttcagttgctgagctgaggctttaaaacttacatactgcttaaaaataggcaacggagaaattgattttcatctctcttttgtagtttacccttctactctcaagtaatattcgtatttgtgatacattatttaaaaataaaagtaaagaacctta

SEQ ID NO: 196766 - DNA, 1466 bp, Homo sapiens
gccacagtgctccggatcctccaatcttcgctcctccaatctccgctcctccacccagttcaggaacccgcgaccgctcgcagcgctctcttgaccactatgagcctcctgtccagccgcgcggccgtgtccccggtccttcgagctccttgtgcgcgctgttggtgctgctgctgctgctgacgcagccaggcccatcgccagcgctggtcctgccgctgctgtgttgagagagctgcgttgcgtttgtttacagaccacgcaaggagttcatcccaaaatgatcagtaatctgcaagtgttcgccataggcccacagtgctccaaggtggaagtggtagcctccctgaagaacgggaaggaaatttgtcttgatccagaagccccttttctaaagaaagtcatccagaaaattttggacggtggaaacaaggaaaactgattaagagaaatgagcacgcatggaaaagtttcccagtcttcagcagagaagttttctggaggtctctgaacccagggaagacaagaaggaaagatttgtgtgttgtttatttgtttttccagtagttagctttcttcctggattcctcactttgaagagtgtgaggaaaacctatgtttggcgcttaagctttcagctcagctaatgaagtgtttagcatagtacctctgctatttgctgttattttatctgctatgctattgaagttttggcaattgactatagtgtgagccaggaatcactggctgttaatctttcaaagtgtcttgaattgtaggtgactattatatttccaagaaatattccttaagatattaactgagaaggctgtggatttaatgtggaaatgatgtttcataagaattctgttgatggaaatacactgttatcttcacttttataagaaataggaaatattttaatgtttcttggggaatatgttagagaatttccttactcttgattgtgggatactatttaattatttcactttagaaagctgagtgtttcacaccttatctatgtagaatatatttccttattcagaatttctaaaagtttaagttctatgagggctaatatcttatcttcctataattttagacattctttatctttttagtatggcaaactgccatcatttacttttaaactttgattttatatgctatttattaagtattttattaggagtaccataattctggtagctaaatatatattttagatagatgaagaagctagaaaacaggcaaattcctgactgctagtttatatagaaatgtattcttttagtttttaaagtaaaggcaaacttaacaatgacttgtactctgaaagttttggaaacgtattcaaacaatttgaatataaatttatcatttagttataaaaatatatagcgacatcctcgaggccctagcatttctccttggataggggaccagagagagcttggaatgtc

SEQ ID NO: 196767 - DNA, 1207 bp, Homo sapiens
  misc_feature (1)..(1): n is a, c, g, or t
  misc_feature (5)..(5): n is a, c, g, or t
  misc_feature (1028)..(1028): n is a, c, g, or t
ngacnacaaagatggaatggagacttctgcttctggccaagttggagtaatagggactagatttgtcctccaccttaaacaactaagaaactggaaaaagtattttaaactctagcttcaacattggatatagtgcagtacagtacattgatccctgagagagagaaaatagaagagatgagccctatgattgctccagtttgctgcctgagtttgtcaactgcagagcagggaaggaggacccaggcagagcctggtagtaagtttgaagaagtcagggtggctagacatcacaggacagactagagaataggttgctgcacagagagaatgccttggatatctgtgttcaatcttcagctaagtacttattagtacatgtatttgaggaaattatgcaaagcagggcaaagaacttcccaaaaggaataatctctgtagctcacacagagcttgcaacacttggtgtttccatcagctagtgtgaaaatcccttttaatagagggagcattggttagaacaggagtcccaaacccccagcactggtccatggcctgttaggaatgggaccgcacagcaggaggtgagcagccagcgagaaagcattaccgcctgagctcagcctcctgtcagatcaacgatggcattagattagcattggagcacaaaccctattgtgaactgtacatgccagggatctaggttgcatgctccttatgagactctaactagtgcctgatgatctgaggtggaacagtttcatactgaaaccacccaattcccaacccctaccaccccacccccaccttgtctgtggaaaaattgtctttcatgcaaccagtccctggtgccaaatctgtgggagatcactggcttagaatcttcaaaagagtattgcccccaatgtaaactatggactttgtgtgataatgacatgtcaatgtaagttcatcaactgtaacaaatgtgccattctggagagagatgttgatagtctaggaggctatgcatgtgtggaggcaggggntatatgggaactttctgtacttcctgctcaattttgctgtgaatctgaaactactctaaaaaataaggtctattttcttaaaggtcattttgcctccatagtgggaaagaaaatagcagttgactaatagctgctcttatcctgcctaaaaaaaattaaaaagccagcttggaaagatg

SEQ ID NO: 196768 - DNA, 682 bp, Homo sapiens
ggaagtgacatccctggaagttaatgtcacagattttggagtatctgcttagtgttggagaaaggcgaacttttctgtttcgtttgcccaactgccttgacttgagcacagaaggccattttgcatgaatgcttttatctaaattctgtctttcccattactttccttgttttccacccccatctccattttactttaaaaaaaaatcagaatagaatttgtataattattatggacttgtgtgtggggggtatctttttcttaaggatgtgttagaattactattatttaaaaaattcttcttgtctttatttttctattgccatctgttcatttaaatattctcagattgtttatggttttggttttccctccatatattttctggcatttggctctccttttctgacacaataggtcaggctttcaaaaatctggtccctatgtaatttgactttttcagtagtcaacataccgcccatgccttccgaagtctttcatctcttaggtctttgagcagatgttaactgtttaaatattttgttgttttggtgtaaagaaaattgaaatataagacgtcagtgatagcatgctttgcttacaccagagcagattgctgcttacaagttgaatatgcaaacatctttaaaacatggaacattcccttatgcattttaaccat

SEQ ID NO: 196769 - DNA, 431 bp, Homo sapiens
tcaaatgtttaaccactgtggcagggcatggtggctcatgcctataatcccagcactttgggaagctgaggtggtaggatcacttgagcccaggagtatgacaccagcctgggcaacatagggagaccccatctctgctgaggtgtgggaggatcacttgagcccaggagtatgagaccagcctgggcaacatagggagaccctatctctacaaaaaaaataaaaaattagctgagcatatggtggcttgcttgagcccaggaggtcgaggtgagctctgatgatgccaatgcactccagctgagaccctctctcaaaaatgcatatatatggccgggcgtggtggctcatgcctcatgcctctaatctcagcactttgggagaccagggtaggtggatcacttgagatcaggagtatgagaccagcctgg

SEQ ID NO: 196770 - DNA, 350 bp, Homo sapiens
aaatggaaataaactgatgttgcctattgacatttacttttttttaaattcatttgataaaatattttgaattaccattattaaatgccataatctgccatggctattttcttttgtctgaagaataatttaaaaactatgagaagtaaaataaatctattaatccaggcaactatgagaagtaaaataactattcatccagttattctttaaaagatctttaacaacagcagatgaacttctgatcaaaactcaggcacacagctgctttatcgaagggtgttgctagttcctgattcaccctaagccatctccatgccatagtgtactcctaccccagttcttcactc

SEQ ID NO: 196771 - DNA, 434 bp, Homo sapiens
aacatctacgaaaaatgcacagctaacatcacatttagtgatgaaggattgaatatttcccctaagaccagaaaaaaaacaaagatgttcactcctgtcattcctattcaacattatactggagatgctagccaggggaattaggcaaggaaaacaagtaaaaggtatccaggctggggaaaaaaaaataagtcaaactgtccttgacataatcctgaatgagaaaaccctaaggaatatacccacacactcacatgcacacatacacatggacacacacacacaatattaaaactaataattctactcaacaaagtcacaggataccaaatcaacatgcacaaagtcaatttgtatttctatacacttgcaaaaaatcataaagtgatattataaaaaataattcacaatagtaccaaaaattaaatacttgg

SEQ ID NO: 196772 - DNA, 217 bp, Homo sapiens
ttaatgtttttatgtaccatttaaattttgttttatgtgatggaaaaaagttgatcagtacaccttttgcgtaacacccacatatttaaggataactctttaatcaactttgtcttttatccttttttagtaatcgaagcttttataattgtttatgttcctctgattcttctagtttcactcactgctcttaaaatagctgaacattagatatctg

SEQ ID NO: 196773 - DNA, 259 bp, Homo sapiens
tgtcttgtaaaactcatggctcttctgtaatactgcattcactatactctccttatgttcatactgagatgacatccaaaaatgtatttttaaagttcaatgatctcttttcttttgaatttctaaaggtacataaaattctgtttcagcagacaggatattaactagtcatgccacgcaaatgcaactggagaaagcagtagtgtgtaggtaaaaaatatagagagaagcgaatattttctttagatacttgaaaatg

SEQ ID NO: 196774 - DNA, 1093 bp, Homo sapiens
agatgaggcttccagtggctcgcaagcctcttagcgagagactgggccgcgacactaagaaacatctagtggtgccgggggatacaatcactacggacacaggattcatgcggggccatggaacgtatatgggagaagagaagctcattgcatctgttgctggctctgtggagagagtaaacaagttgatctgtgtgaaagctttgaaaaccagatacatggtgaagtaggagacatcgtagtgggacgaatcacagaggttcaacagaagaggtggaaggtggagaccaactccaggctggattcggtcttgctgctctcgtccatgaaccttcctggaggagagctgaggagaagatctgcagaagatgagcttgcaatgagaggtttcttacaggaaggggaccttatcagtgctgaggtccaggcagtgttctctgacggagctgtctctttgcacacgaggagcctgaaatatggaaaactaggtcagggggttttggtccaggtttccccctccctggtgaaacggcagaagacccactttcatgatttgccatgtggtgcctcagtgattctcggtaacaacggcttcatctggatttacccaacacctgagcacaaagaagaggaagcagggggcttcattgcaaacctggagcctgtctctcttgctgatcgagaggtgatatcccggcttcggaactgcatcatctcgctggtaactcagaggatgatgctgtatgataccagcatcctgtactgctatgaagcatcccttccacatcagatcaaagacatcttaaagccagaaataatggaggagattgtgatggaaacacgccagaggcttttggaacaggagggataaggaggtgctccagaagcacgggactgtggaccttgcaggagtgaagactgtgatgtgtggtccccatatgtggctcagcaaagactcgagagatcatccctttgtctgcattgacggccctgtgacggcctccagcccacaggcctgctttctcctgtcctaacaccaagcctgggtggcagatgaacagtgcctttcttgggttgccagctgagtcccgga

SEQ ID NO: 196775 - DNA, 917 bp, Homo sapiens
taaactcttcttcaaacatgaaagcttgatttttgaggaaaattattcacattatttacagattcaaagatgtttatgtcctgtactctagaaataaggagaaagggggtggggaggttgactggggtagtgagtgttaaaggagaggtcatggataatggactggttatagttacaggatgccctatgttcattgggctggttatgttaactgcacttgaaacatttaccttatcagtgctgaggtccaggcagtgttctctgacggagctgtctctttgcacacgaggagcctgaaatatggaaaactaggtcagggggttttggtccaggtttccccctccctggtgaaacggcagaagacccactttcatgatttgccatgtggtgcctcagtgattctcggtaacaacggcttcatctggatttacccaacacctgagcacaaagaagaggaagcagggggcttcattgcaaacctggagcctgtctctcttgctgatcgagaggtgatatcccggcttcggaactgcatcatctcgctggtaactcagaggatgatgctgtatgataccagcatcctgtactgctatgaagcatcccttccacatcagatcaaagacatcttaaagccagaaataatggaggagattgtgatggaaacacgccagaggcttttggaacaggagggataaggaggtgctccagaagcacgggactgtggaccttgcaggagtgaagactgtgatgtgtggtccccatatgtggctcagcaaagactcgagagatcatccctttgtctgcattgacggccctgtgacggcctccagcccacaggcctgctttctcctgtcctaacaccaagcctgggtggcagatgaacagtgcctttcttgggttgccagctgagtcccgga

SEQ ID NO: 196776 - DNA, 328 bp, Homo sapiens
aaggtccagttgtttggacagaagggctacagggtgcggtcccagctcttgtgtaacaattctgaccgcactaaccatgcctaggaaggaaaggagttgttttgtagaagggattggattttgggagattagtccgacatgatcagcagggagagcacgtgtttttatgagaattatgccaagatagataacagatgaagaggaaatttgggcttgactgaagtaataggagctgtctgtgaagacttgcagctaatttgctgagcctgatgggtgtcagggacagtccaagtgaaagcaaagagaggctgggatgaagggtgcaaag

SEQ ID NO: 196777 - DNA, 639 bp, Homo sapiens
aaggatataattgtttagtaatatttgagtactatagaatgtcttccagagagcataggttttgggttgccataactgatactgagttgttttttgtttttctgtctgaagtggccagagattcaaatgcctcttgagcctcctcctcgcatgtgcaagtaggactgtggtcctggcccacaggagcctcttcagctttcctccagctgtggcacaggacatgtgttcggttcactcgatcacattattaagtaacataggtattatttaaaaggagaagagtgagggcggagtcctattttatggcatttaagtttggaaccacttatgtcaaaactcatttctgtgtttatatgtacttcctaatttatttataataagcatgttgaattatgaaggagaatgttatttcaaaattctattggaggctacttagaggctgtggtgacactgaatgagagctctgaaggaaatcatagtgaaacaggaaaagttcccttgtccccgtcgcagggcatgcgacaagggggagtggcttgcttcttcagtgccccactgctcaaacctctaggggagaacacagatgggcaggctgtggggctctgaccccacggcagtgtctaggggtaaatgtttaca

SEQ ID NO: 196778 - DNA, 645 bp, Homo sapiens
cctccagtcctggcaaccactgattagttatttgtctctagagttttacctttttcaaaatgtcataaaaacaggatcatgcagtatgcagcttttggatctgctttcttctacttagcaggatgcatttgatagtcacctatgtatcaatagtttgttccttttcaatgctgaatggcattccattgaatgaacgcaccacagtttatttcatactgaaaagaccttaaaattatgcaagttttgggtaattatgaaaaatgttgctataaatattcaccaacaatcttcatgcaaacatatattttcatttctcctgagtaactagctaggattgggattgctaggttgtatgcagactgtatatataacttcataaaatactgcaaactctttttaaacatagttttagcagtttgcatccccatcagccatgtctaatagttggtttgtatcttcagcagcatttgatattatccattttgttttgattttgtttagtcattctgataggtgtataataggcatttctttgaggttttaatttttgccctcatgactaataatgttgaataatatttcttgtgcttaattgctgtccttatattgtctttggtgaaatatctttttcaaatattgtaccca

SEQ ID NO: 196779 - DNA, 508 bp, Homo sapiens
cctaccacgcacagatgcctgtccaaacgctatacatgtgtcacctctaaggtctccacacagttcaagactggaccgtgcctgccacagttcccttctatagaggagggagctctggggggtctaggcacctgcccccagctggggagggtgtatccaggatctctcattcccctggcactctctgtccaagctttctgggagctcagagctcgagtcagcaggtggaacccggggcgcgggcagggtgcaggggcagaggagccggcccagaaaaggaggcggcagggcctgcatgccagggcagcgagagggacgggatagctgagacccagctgagaccccggctgctgtcaggaggggcaggaggtgggcgtggacttggcagcggaggaccctttgtccgcccggggaggcgagggccttgaatgacgcttccccaggaccccgggagacccggagcctctctgcctggggtgggggccccagcctggtgccctgcggccgc

SEQ ID NO: 196780 - DNA, 502 bp, Homo sapiens
cctttctagaagtctgtgggagggaaccactccctacagggagtctggccatctcccttccacccgaggcctcacctctgttgagatgacccgtggcacagcccctgtcttcccaggcaggggctggtccaacataggcctttctgcaacccaggggctgaggctggtcaggggtacagcctcctctctggtcctggctgcccaacccccacaaccatccaacttcccctgcacaaggcattttgatctctgcgtccaagtagctcaattggtcaggaccgggctgcggtgaggccaaagtcaggggttaccatagcaactcaccacgctttgtggctgcttgttgatatccacaggggcagggggcatgccctctcactcaccaagtatctggcaactggcacagtatctggcccacagtagatacttaataaatggttgttgcctaaatgaatgcatgaccgacccattgtagctagttagagccagtgattactgagca

SEQ ID NO: 196781 - DNA, 329 bp, Homo sapiens
tcgcaattttaatacttcaattaattgtgcacgtcactgccagacttttcttaaacttgatttccaaggccctgatatagttcaatctaatctactttttaaactatccagcaaatacataccctcttctgtgttctcacttttcccctacaaatcataaatatttcttcatatgtacttttttttgtgctgttgcttaaccttcaaaccacagtcctccttcaagggtcagctcaaacttgccaaaccagagatccttccgttcaccaaatgtagtattaaatatatagttataaagtatacggacaaaaaatttaaacatgaacaat

SEQ ID NO: 196782 - DNA, 403 bp, Homo sapiens
gacgagagaaactctgtctcaaaaaaaaaaaaagttggagaggggactctaggaagcctgaaagacccactcccctgctgtcctggcctagggtacatttcccttttctcatatgaagcaacatcatatcatggttaagaacatggccacattggccgggtgcagtggctcacgcctttaatcccagcactttgggaggccaaggcaggcggatcacaaggtcaagagattgaaaccatcctggccaaaatggtgaaaccctgtctctactaaaaatacaaaaattacctgggcgtggtggtgcatgcctgtagtcccagctactcgggaggctgaggcaggagaatcgcttgaacccgggaggcagaggttgcagtgagccaagatggcgccattgcactcc

SEQ ID NO: 196783 - DNA, 291 bp, Homo sapiens
ttaagaaaaaaggagataaataacataggcttggttggaatcccagctacactattaacaagcttcaccaccataggagcaattggcttaaattgtgagccaatgctgcttgctgcttgtgtgaaaggcaatcataactaccaccagaggttttataaggatcaaatataatatggaactggacagtgtctcatgcttgtaatcccagcactttgcaaggctgagctaggcagatcacttgagcccaagagtttaagaccagcctgggcaacatggcaaaacactgtccct

SEQ ID NO: 196784 - DNA, 100 bp, Homo sapiens
gtctaaggaaaatatatttacttttaggaatttataatgtggaaaacaaaacccccaaaagagaggtactctaacaatgaagatggtcggcctgtgcaca

SEQ ID NO: 196785 - DNA, 543 bp, Homo sapiens
ttttaatagagacaaggtttcaccatgttggccaggctggtctggaacacctgacctcaagtgacctgtcctccttggcctcccaaagtgctgggattacaggtgtgagccactgtgtcattatggcattaattacctcttgatatactatagtaattaatgccataaggaaaattacagctgatatgaggatgatggtatattaaatttgtgcttttaggtagtcttgggaaggcctctttgaggtggtgtttgagtaaagatctgcatgatgcaagatagcatcagtacagatatccaggggacatttctgtttgtctgttatataatagacaaaaacagctagatagattttcatatttggatggaattcgagttgggctgacttaaaatgtaggctctataaggagtgatgaagatgtctgtgtgactaccattcaggagatatctggcatctatattaaacagaaaacagtaatttcaaatatgagctctaaatagaaattcgcaagggcacatgttccaaaccgtaggattattata

SEQ ID NO: 196786 - DNA, 155 bp, Homo sapiens
gtgagaggaatccagtgattacacttctgagttatgaagtgttcttacctttctgtatatggtaatggtgcttcaaggtaggcatttcttttacattcataaatgaactttactttgccctatttaaaggtcagtattagaactggcctattcgt

SEQ ID NO: 196787 - DNA, 553 bp, Homo sapiens
aaatgtggacaaaagccttgattgtggttttcagggaagaggcacacaagacagggtaagcaggtttaggattagctagttcggataatttcaggggttctggggttgaggggctgttcctggttgtctagtacctggcccgggtgattagggcagtgtagtattggccctcagtgtcatagaggaggtgctggggtattggctttggattggttggtttgcctatgaaaggagtactcaaaggtgagtttactatctctaatgaaaaagctaatcctggcaggggcagtccctccagtgtcagcaaggaccctgatgtcaaaacatcaaaactatagaaagtaaaaagacatgcttaatacagaagttaataaaggttaaagcagaaatatatgaaagagagagcagaaaaacaatggaggaaatcaatgaaaccaaaagcagttctttgaaaagataaaaaaattgactaactttagctagactgaccaagaaaaaaaagaagactcaagttctgaaatcagaaaagagggaatattaccaccaaccatac

SEQ ID NO: 196788 - DNA, 130 bp, Homo sapiens
tttttttacagcaatagatgaacggatgagttaccttagccaagcctcgcaacttccgcatgagtcaatgtgataattactccactttatagatgaggcagctgccactctcagagctgtgataatctgg

SEQ ID NO: 196789 - DNA, 357 bp, Homo sapiens
ctagttcctttgcactagcaccaactttcttgaacatgcagccagaatctgctcatttttcttcaatttaacttttgcatcctaacttctaatctctttattggcgttctctcttcaagctcatgaataaactcctaattgccaaatccaagagttctttcagtaacgctttattttatgcactattaggctcacttcacacttcttcttctattcctaattctcatgtttcactaatcgtgcactaccggagtgcagggtgaaaaaattaatcaagctgatcagtttttgtgtaaccaattctatagatcttttgtgataatttattatattgtatctatgcttaaaagtatgttt

SEQ ID NO: 196790 - DNA, 478 bp, Homo sapiens
atttactattttttaaaccgtcactttacttttagttggcaatattttgatgagcgcttatgctagtaatgttgtcatgtattgtattcttttagtataactacagtctcactgcataataaacaaagttatttgccatgtaattacgtagcaaaataatccacactccattgtgccttcaaagcatgacacttgaagtttatttatcttctttcttcttttgacgtatgcaatagtaatgagaaaagtaatgcaagagtcatggtaaggtaatatgcatggcactccaaatgctgtcaagttttaactgtcactgtgattcatagtgaactgagcaatggtgggaatcaatgagaatgtcacctatgatctccatcacaactcagctctgccattgtcacacaaaagcagccataaacagtgcataaatgatgagcatggctatgttccaataaagctttatttgtaaacacttaaa

SEQ ID NO: 196791 - DNA, 394 bp, Homo sapiens
cacatgtaagcttaataatgaggttcatattaaaggcagacagatgttcaattaaacatcagacttcacgctgacacgctgagagtgaggatctccatgcataattctccgtcccagccccagatcccgggagttttgatcacacagctgggaagtcgtcatccaagcctcggatgtgtttgtggggcatcgtctatagccggggctcctcccctctctctgtccacacacacaggtctccaggcatgtttacctctaaatacacaccctgccaaggactgtggcctggaaagtcataggcacttgacttctaccaaaaaagaaataacggaacggcatgagaatggtcacacctgagcaggcagctaacagcaacaggttcactacacacaac

SEQ ID NO: 196792 - DNA, 278 bp, Homo sapiens
ctccctaaagaattagaacatttgaggctatacactgttctgttgaaatgcagttatatattacccagatctgtaagcacttgccaaccgacctgtccaagtcactcacttcctacgagttctcagttttctttttctcccctttttaaattccagatccatgtatgaataacatgccaggtgtgtttggaggagacattcctaatattttgaaaaatctcattcaggctgggtacggtggctcacgcctgtaattccagcactttgggaggccaagg

SEQ ID NO: 196793 - DNA, 416 bp, Homo sapiens
ctatgcaaccaccgttaaacattcaaaacgcatcctcttcacattgagaaacagcctcgtgagagggaaaaaaaaaaaacgcatcctcttatccagtgacccagatcctgacactagctttctgttaggaaggccttctggaaaataatttggttcagaatgcggggaatatgggttcaagcgcgccccacccccctatacaagcactcttcgacagacccggttctcgaccttcctccgcggtcggggagggccgaggcaggcggatcacctgaggtcaggagttcgagaccagcctgtccaacatggagaaaccccgtctctactaaaaatagaaaattagccaggtgttgtggcacatgcctgtaatcccagctacttgggaggctgcggcaggagaattgcttgaacccggg

SEQ ID NO: 196794 - DNA, 187 bp, Homo sapiens
ctaaatgtctctcgtctgttttcaccctagggatgcgaacattcttgaactgatattctgcttcttttcctttccatacactgcagtgattatagttgttttgagattcttcatcaaaatatatttttgagatttatttttatgcaaattaaaagcttaagagtttatgttatcattagtataatta

SEQ ID NO: 196795 - DNA, 1004 bp, Homo sapiens
tattcatagaagaaaagtaccattcagtacaaaggtatcaagcagtctgaagaacattacttttgataaatgtcacagttccccatgaagaatagccctgagctttccttcattaaatatcattatatgaaatgtataatttaaaaatactgaagtaagagataagaagggtgaaaacatattctttataaaaccttaacacatgcttttagtctttgataaatcataaaaaggagttaaataatatgatggataacgttaatttaatccacatacactgatctatgcaaacaaagagtttctatcttctgtctaaatctgcatgggagatttagaaaaacatttatcatatcaaagtctaataggaaattgtagacagttcctactgtggctggcagaattacatgtagccatatagtagaacaagaaatgaataaatacataagcgcactcttgggttaaggaatcttagaaagtagtgatgatgctaacactgcatattttgagaacgggatggagccgacatagtatgccaagtaatactagtctcattaattgcaacaggaaacagtgcatatgtattaacttaaaaaactagaacagacaagaaaatcaaccttaaagaaatccattaaaataaaacattgttgataagttgaaaaatactgcaatgtttagatctggggatgattttttgaaaagagcagtgaaataaacatttggttaagataaccaagaaagaaacaaaaactacagaaaattaggaatgaaaaagacactcagcatagatacagatgacattttaaaattattgcacttaaaattttatatgagagactatgttctatgcaaatctaaagtacaggtgaaagaaacttgaataaactcgtaaagacagatggaatgtgaagctactacttgcaaaagagccagaaaatttcactaatcaaagttttcagatctccaaagaacaaatgatttctgtgctatttcaactttaagag

SEQ ID NO: 196796 - DNA, 119 bp, Homo sapiens
ataaaaaacagaatacttttttaaatgaagggaatatttttgaaaatggttaaaatacaaaatcaagaaatgatccccaaagaatgtggggaagggatgagacagagatgatgtatgag

SEQ ID NO: 196797 - DNA, 557 bp, Homo sapiens
gaaaagttgctccagctgacttcgcaaaatattgaaatcaagctagtgagtgatgtaacagctgattcaaaggtattagaagccttgaaattaaagggcaaatgaattaacagggatgcaggaggctttttctgaaggacttttccccactctctgcactggaagacacgagaactacactaaaataatgttccaggcaaagccttctgttaacaacatgcctctctgtgaggtgtgtgatgaggatctctgggccagcatagcccttccttgaaaggaagttggacaccaacagcttcaagaacggcaaggagcacagcaggttcctactccagcttgcgatgtgatcattgcctgaagcttcttctcttgttaattagagaacctgattcttctaaagtgtctccactctcctttataacatacagacacatgctttccctccttctcccccaaatcctgatactctcatattcttcttaccattcccttcctttccatggcccaggagcatttcccatttgaaatttctgagtttctcagactgaatgaagact

SEQ ID NO: 196798 - DNA, 350 bp, Homo sapiens
aataacagtaatatccccatctcaaattctaactttcaactccagttttgctccctacgtcacaccttggatatgaattcacatgatctacatcagtgcgatggctaggaaagtatatatttttgaagcaaatggagtaactagttaatgtcagtcactctgttgttttattagtgattcacattcttccatgatcccatagtttatattcggcttttcaactctttcacttttctcctgccaagcattttatgtctcaccctatccttaacatacacacacacacacacacacacacacacacccctacctgttttacagatactatccagttttatcatagaattgtg

SEQ ID NO: 196799 - DNA, 627 bp, Homo sapiens
ccatgcctggcctaggttgtatatacaattcttacatgaggttacatatacagatttacaagtctaaggcaattaatcattcattttgagcaactaacacttaagcactattatcaaaggaacttacaacatacagtgaaaataattttagcaggatttgatatcaactaacaggcatatgtagcaactgaccaaattcaaagactcagttggagctatcaaccaatctgaaagatcagttccagaaaacatgcaaatggcttgctaagcagaataatttttaaaatatactcctgttggcatagtgcttgcatcttataatttccctaggacttgttgagcaccaattattcaccaggctcacttcttggaagtgtcacacctttaattcattttttgatctcccaaaaattgttcacagtaggtttcaacatatgcttgatgaatttaatctgattacttgtagagctctacacattttaattcagtgactttctaaggtcactgctctagctcaaatcagagcggacattctgtgaactgaaccctactataagccaggcaccatgcagcagtgtgatgatggatggggatgtggtaacccaaggcagatgtggtaagagggac

SEQ ID NO: 196800 - DNA, 469 bp, Homo sapiens
gtttgcttctttgttttagtttgtttaagtttctaagtacttattactaatgaaaccccaaagtttttgtcaagtatagacatctcctttcaggctgttcagaaagcctgtggtgtcctaccaacttcaccctcctgggaagctcttctgaaccctagagtcctgtgcataaccatttgggaaaatcccttcatctctctcctgggttaaggtccccttgccttcttcctcatttcacccctatgttttgatagagcacatcccccagtagctttctgagaaaaggtgcatttggggccgtgatacttgaatacctggaaaagtcttttctacccttgcagttgattgataggttggctgggtataggttttaggttagaaatcattttcctttagaattttgaaaacactgctccattgctttaaaaaatgttgcaactgagaaacataaagccagcttgatttctgt

SEQ ID NO: 196801 - DNA, 516 bp, Homo sapiens
tcacactaagcactcacattattgactcctagaccgagtacgcctcattctaagctgtaatcggaggacaatcagtatgctacccttttaccatcattggacaaggtagcatccgtactatactacacaacaatcctaatcctaataccaactatctccctaattgaaatggtcgcccggattggcgaccatttcaatccaatggctaactctttgaaatgtatttaaaattagatagtcatcttttctgcaaaatgaaggactgcacacagtctctgtgtgtctaactctccgaactaggacgtgagaattctcatgagggttctggttgatggccacaaaatggaaaaggcagaagagcttcggtaagtagatatgtaccatcatgtttgtgagtgccctgtttctagaactcttttaaactataaatgattctgtgagctattaagcctctctctaagaatctagcagattcatcctaagcatgtgttgaaatgtcgccattccggggtctct

SEQ ID NO: 196802 - DNA, 301 bp, Homo sapiens
agtagctgggattacaggcatgcaccaccacgcccggctaattttgtattttcagtagggacagggtttctccatgttggtcaggctggtctcgaactcccgacctcaggtgatccgcccgcctcggcctcccaaagtgctgggattacaggcgtgagcacctggccaagatggtaaattttgttatgtgtatattaccataattttttaaaaaggctccatgaaattatctatgtacataggtatctagcctatatcccacagtcattcactccaatactttattctctaccccattctg

SEQ ID NO: 196803 - DNA, 659 bp, Homo sapiens
taagactcagcgagagcaaacagggcttggatcagtagcaggatgcaggtgagaaggaaggcaggctggcagcatccctgaggcagtggtgagctggcacacagctcagagtggagtgtgaggtggagagacctggagcgcaggcttcccgagaggagccctctgttgtcactgtcttttcaactgtaagcacgagtgcctgtgcagacacactgagacctccataatcatcatttaattgttgcacctgccctttaaaacgctgagaccaaggaaagaaaacacaacaaaatagctaacagacattggtgtgtgaggttctgcagaggggcactctttgagtgtttatgaataaagtatcagcgaagtacactccaggtgggaaccccagtcagggtcaggtgaaatttgttccataatcttgttatttcacaatcagggaaaatgttgtcttagaaccctgaagtgagacgttgcaatcacaaaagagaaaagagtagaaggagagttgccaggatgaggacagtgatgaaatctgaggttataggtaggcaatggtttagattttagatccacgctacccaacctgtggacttaagaattattgcaagagacctccacatccctatggatactaaacattgagtataaactaagca

SEQ ID NO: 196804 - DNA, 283 bp, Homo sapiens
gttgtgcagcacagaaatattttattcaacaaactctgcagactcctgaactttaggggtgggctgccttctgcctggtgctctgcacagatcctggagctctcgtggtcatttatgtgcagtgaagctgctccactcacctacagcttgtccttttccagagaatccctatcatcctcccctcatcccaaggaatgcaacaaaggaaaattaatagtgaatgcttttgccggagacctgtggatacttaatttttatagatactcaataaatatttatttat

SEQ ID NO: 196805 - DNA, 548 bp, Homo sapiens
caggtagttacgtttcttctctagcattacttatatgatatgtctccatacccattcaatcccctcatttatgattggtgcattttgtcaggtttaagaagtcttttctctcccataagaacgtgaagaaaacatattctcctatgttttatagaccataggttggcaaacttttttctgtaaaggactaaatagtaaacattttaagctttgtggaccacagatagtctctgctacatattcatcttaaaaaaaaaaaaagaataacctttagaagaaacgcaactaagttgcgtttcttctaactgtgtggttttttattatgccttgcaagtttttgttgagggctggtcatgctcaaccagtaaatggactttctgtgtgaagttttatgttggtctggttaggggttgtgccatgtgtgctgtttgttaaccggaggtgtcagaggcttaaacctcctctagtgtcttagtttttgtctccctgttgtctttacggtatcctagagatttctcgaataagctctgagatgagcagttctttca

SEQ ID NO: 196806 - DNA, 483 bp, Homo sapiens
tctcacagcatccacaggaccccccaaaacccctgcccaatcctgggtctgagtccctcctctgaatacacaaggcctgaagacacagcgttcagaggaaggagctcagacctccccgatcaaatggtatcttctttgaaagaatatggcgccacatttggggttgtcaactgcggccaggtcagtacgtcttcactttgatcaattgcggccagatcaatacgtctgcactctgattcccacgtgtctatgcctccctgctcctcaatgcagggccctggatgaaaggagtgagtgctgagttttgtctaaatccaatccttgcaagagtcactgaaagtagcattataaattgtttgcaagaggcctttgacactgaaaacttggccatgtgactgttgtccaaaaatcctgctttcacatctatgagttgcttatttctaaacttttttggtgagaataaagttatctaatactcaatga

SEQ ID NO: 196807 - DNA, 654 bp, Homo sapiens
ggataggaaatctgtttgagctactctgcgtcagcactttgagcttgctggtatatgtatatattgatggctggtgtagatatattgccatctaatgctcagaacacacttgtattgcaagaaaatatttttttgcttgtttttttgagacatagtcttgctctgttgcccaggctggagtgcagtggtgatcttggctcactacaacctccgtctcccgagttcaagtgattctggagcctcccaagtagctgggactacaggtgcatgccaccatgcccagctaatttttgtatttttagcagagatggggtttcactatattggccaggctggtctcaaactcctgacctcgtgatccacccaccttggcctcccaaagtgcagagattacaggcatgagccactgcacctggcctcaagaaaaattatatatcacgtggaataggatagtagtctctgcactgattttcgttgataatggctgttcttcttatcaccattttgctatttctttgtctgggctattacagggttattacagaaatttccagaaagacccctgcctgtcgaatgtttacttcaagcttgagctcctggtatattatgaggaaattatatgataccccaggagaggtcttcctttcccatgcc

SEQ ID NO: 196808 - DNA, 395 bp, Homo sapiens
ctaaaatgttagaatcagagaagaccttaaaaatcatgttcagttttctcattttccaagtgaggaggccaagacccataggtgaagtaattgagatctcggcaaaaaactcttaattcagaaagcccccttttttgaccttcagtaggacttttcacctttgggttctaatgcgaactctgaattctgagataacaaaaaaagtttcacacacagtgctgatgtatagtaaatgtcttttggtggtgcctgaaaatataaaatgataaaaattggccctggcctgctggctcacacctgtaatcccggcaatttgggaggccaaggcaggtggattgtttgagctcaggaattcaagactaacctgggcaacatggtgaaaccctgcctctaca

SEQ ID NO: 196809 - DNA, 917 bp, Homo sapiens
gtacagacatgttcttagtcatttgcaggttactgctatgttcagatattgctctcttgaagttaaaacttgttcatgtagtaaagtgttactctattaaacttgatttctgtaaccattcaagtgttgttttatcaccacaagagtcatgattagaatttttcccctttttttcctttctttcaatgctcctttatgattttaccctagaagagtttccttaatagattccttgctctagtactggttaaggcatatttaccaaacttaacacctagcaagcttgtccaacctgccttattttgctgttgttcttctgttttgttttgttttaggctttcagcagcctgaagccatggtttttagtttctgtctctagtgataaaacggaaagagggatgaggaaggggctttactggcccatccagaaacagaaactaagaacccatgactgtattctctcccttgaacaactgtaactagagcaaacctctttgccaatttaactggcatactaaaataatgaaattgtgagaatttcctttgagattagtaactgtaccatccatatacaaaacactatattgctttgctgaaacctgaaagtgagcaaactgatagaaatgcatataacaggccgggcgtagtggctcacgcctgtaatcccagcactttgggagaccgaggtgggcggttcaggaggtcaggagatcaagaccattctggctaacacggtgaaaccccgtctctgctaaaaatagaaaaaattagccgagtgtggtggcgggtgcctgtagtcccagctgctggggaggctgaggcaggagaatggcatgaacccaggaggtggagcttgcagtgagccgagatcgcgccactgcactccagcctgggcacagagcgagactccgtctcaa

SEQ ID NO: 196810 - DNA, 681 bp, Homo sapiens
ccacatgtatttgctaccatttctaggttaggaacaaaaggaggtaaatagtgcatctagatcttctctgtaacataaataatgaagtcataattaaggagtattagctctttaatacaataaaacatttttaatgtttgtaagaactacaagcctaaatctactcgggtgccttctcaataaaatttaccaaattccacatttctacttcttttcttagaaaaccctttcatctactcctgactgtcctgcttcaggtcttttccaagctccattaattacttgcactttttcccttctcttgctttacaaatttggcgtctagagctgccaaagccatatcctaatttcttcagagattctggatttggtgaaaacattgcaatctagctccattgttttattattcaaactttcttggcaaggatcttatggatggatacgtccgattaatctctgaaacatgaagccctctttcaaagtagttttgcatcttttgttcaaaccaccagttattttgacaaatttccttagtcttctctctgtttgatggtaacaaccctctggcatattctttaggaaggagttgttaggacagtagtccctgagttctcgtaggattaaaacttttttttcgataactttgatacttgaaagacagatgggctggatttaaaattc

SEQ ID NO: 196811 - DNA, 208 bp, Homo sapiens
agaattaatcaatagtttgcaattattatggagagtgggacagtagttagacaatagccaagacccatctagctagcaacaaagtctttctttctctctcttcacatggtaccaaaaaactgaattctgctttatggtttttttggcgatacctttcttttacccgctggggtagggtttttcttccaatcccaatctttataaatat

SEQ ID NO: 196812 - DNA, 453 bp, Homo sapiens
atatataaaggactgggatgaatttgataattgtttgagatttcaggcttcatgatacaatttattggctatggatagccttgtaaaaaaagatgtccaagttctttttctgcatggtgcatttgacttctttttgatttagagaagtaatttttaaaaatcaaataatttggccggacgcagtggctcacacctgtaatcccagcagtttgggaggccgaagcgggcggatcacgaggtcaggagatggagaccaccctggccaacatggtgaaaccccgtctccactaaaaatacaaaaattagctgggcgtggtggtgcacgtctgtagtcccagctgcttggcaggctgaggcaggagaatcgcttgaacccgggaggcggaggttgcagtgagccgagattgcaccattgctctccagcctgggcaacagagcgagactccatctcaa

SEQ ID NO: 196813 - DNA, 201 bp, Homo sapiens
gatggcccatgcctgtaatcccagcactttgagaggacaaggagggtggatcatgggaggtcaggtgtttataggtatggcgtttccttttgaggaaacgttgccagagacgaggagagggtaagactacaaagtgatagcatgagattaaagtgatgaaactgttttatattcagatggtggtgttggttatgcaaatca

SEQ ID NO: 196814 - DNA, 405 bp, Homo sapiens
ttataataagaggacacagaattaaaagctgaaaactagatatttttctagcttgagttacaatgttactttgagattataaatgtcattacagtcacgcctagtactcgcccaaatctgattgcggaagcttaaggagactaaacacccttgcccttttgctgtggtggagacttttgactagttctagccaatggacggagatgtgtacaacgtcaagcttagctgtgaaaagcccacacacatttctccagtttttcttccctcacttgattgaataggagcccacttgtttccaatagtccaggtaatagttacagcatcctattgacctggaataacaagttgctgtacagaggacagttgccttgtggggtgggggtggtcttgacaatcagtggacat

SEQ ID NO: 196815 - DNA, 423 bp, Homo sapiens
atggcagccaaatttcaagatgagttttgaaggggacagacatgtaagccatagcaatcacattttcataaacactgtctttccatatagcaaggaagcatagcaaagtaagaacttaaaggcttattttccttgctgctgaatttaatatcatgtgttataattcagagacatgtaaggtacagtttaaaaacagccaataagttttttagagacccactgagtacctagcactgtggtaggtcttatgcgggattcaaaagcttaaaataaaaacaaaccatttaagcatcagacttggactctgttcattaaaatgcaaagagagctgagtttaagagcttggtaacttgggttttaagaggaataaagcactgcagatattatcatgcaaatttgaacttgaatttggtcctagaaata

SEQ ID NO: 196816 - DNA, 270 bp, Homo sapiens
gcagacacaatggtaagaatggtgtctgtcctgctgtctctgctgctgcttctgggtcctgctgtcctccaggagacccgagatggtcattactctctgacctatctctacactgggctgtccaggtctggcaaaggcacccacaggctgcagggcactgtcttcctcaatggccatgccttcttccactacaacctgagggggccgacagtgccctccaagacagagacgactgaacttttggggtggagactagcagcagcagcagga

SEQ ID NO: 196817 - DNA, 713 bp, Homo sapiens
gcagacacaatggtaagaatggtgtctgtcctgctgtctctgctgctgcttctgggtcctgctgtcctccaggagacccgagatggtcattactctctgacctatctctacactgggctgtccaggtctggcaaaggcacccacaggctgcagggcactgtcttcctcaatggccatgccttcttccactacaacagtgaagacaggaaggctgagcccctgggaccatggagacatgcggaaggagtagaggactgggagaagcagagccaagttcagaaggccagggaggacatctttatggagaccctgaacaacatcatggagtattacaacgacggtaacggatgtgtggcaggttcctgaggtggtggctgctggcggaggagagctggcactccacccccgtggggcgcctcctgtttcccgtgctcctgggattccgccttgtgctgctggctgccagtgggcctggagtctatggcgatgagcagagtgaattcgtgtgtcacacccagcagccgggctgcaaggctgcctgcttcgatgccttccacccgctctccccgctgcgtttctgggtcttccaggtcatcttggtggctgtacctagcgtcctctacatgggtttcactctgtatcacgtgatctggcactgggaagaatcatgaaaggggacggaggaagaggacaccctgatccagggaggggag

SEQ ID NO: 196818 - DNA, 499 bp, Homo sapiens
ccaaggattggatccggagtaccaggggcagagagggggagcagaggaaagaaaggagatgtgaggagtttccacctaaagcacttcactcctcgtgttcttccccgacagagatagctgtgtggttcttccttacgcgtgggtgcaggtgtgcgcgcttggggtgagcccatggttgtgctcgagtatacgggcgcctgtgcacctccagggcaatggtaaagcctggcagagctctttttggaacaaaatgaaggagctccatatccacggaggccacccgtatgggcctttgccaagtagggcagaagaagcccttgttagccagcttccctttgcaacttcctactcttcctttgggtacagactggtgtctgggctagctaggatcacagctgagagcgaaggtgctctcagtgtccgaagaccacgtgctggtgaacccacaatgagaagcgaaagggtttcaggactctagcagaaaggaagagcaagattt

SEQ ID NO: 196819 - DNA, 405 bp, Homo sapiens
catccagatttgttttaggagctataattgaacacatcagaaaggattgttttgttactcttatgcattattccattaatggaaaaacccattttttgtatcctgaacttcaaaaggtggttggagagcaatgaaaagggtaatttcaaaaataaagtagaaaagatattccaacaaattatccactctttcctacccagtcttcttgcaggaatgcttcagtgtttgaaagggtgaagaaaagaggattcctggctgggcgtggtggctcatgcctgtaatcccagcactttgggaggccaaggcgggtggatcaccaggtcagaagatcaagatcatcctggccaacatggtgaaaccacgtctctaccaaaaaaaaacaaaaaaaatagccgggcgtggtga

SEQ ID NO: 196820 - DNA, 474 bp, Homo sapiens
tgactctctttgggggtagttctggatttgggagggctgcactctcttttgagaaccccttcttagtccatggtgaagtcataaaaggctctttggttttggttgagtcacttagtaggtactttcagtttaaaacaagaaaaaggtaaatgtatatgtttttctcttgttaatctgtgttttcttgtagtgctctcagccacgaaccttgagataggtgaggaaaatatattatttttcctcccttacattgagcaagatgctgtctgttctctgcaactcctaattgttctctcttcacctccattgtctgccacgaaaaaaaaaatgctacattgttcacacattaaaatggatcactcaaaagtgtctgaaaaaagcaagaggaaaacatatcctaattccaaatgtcaaaaattaagtggctcctccttgagactacctttttgaccccaagaaacaataagagagtgc

SEQ ID NO: 196821 - DNA, 515 bp, Homo sapiens
gtgagacgactgaatagaacggtagaaaaaaggaaataattagccaatattacatagaaacccctttaatttgatcttgatatacacacacacacacacacacacaaaagcaataaagccgccagttttgctgataaggataagttcctgttttctcctctgaagacatttaatattcaatcaaggacagccacagagccaagcagatcatagcgtaactccaaagatatggcatgtcatcaccctgctgccctttgaaccaaatggggttttgcagtctctctcctttcttcctgaaaaccattcaacgtgtccccagaatctgagctcctcagcctgaaacactaatgtgtgtgaaaaggattggtttggcctatctttcccgtgcaaactggtatgaattttaaaacaaaaacataagaacaaaggaaatagtttttgaatttaatcagtctgaagttagcctttgaccatttgatacattccacaataaaaaggaagtttaaggggaaggc

SEQ ID NO: 196822 - DNA, 484 bp, Homo sapiens
gcctgtaatcccagcactttgggagactgaggtgggtggatcacttaaggtcaggagttcgagaccagcctgaccaacatggtgaaactgcatctgtactaaaaatacaaaaattagctgggcttggtggtgggtgcttgtaaccccagctactcaggaggctgaggcaggggaatcatttgaacctgggaggcagaggttgcagtgagctgagatcgctgcactgcaccccagcctgggcaacagagtgagactccatctcaaaaaaaaattgccaagaaagacattactattctctattccagtaaaaagccaacactaaaattactactctacaaagcgtgcacacgcacacacacacacacactcccacatcctaaaagacaataatattttcatttataataaagtaatttttcaacttttgaaataaaattaatacaattatattttgcctttatgctcatttatctggggacagatg

SEQ ID NO: 196823 - DNA, 747 bp, Homo sapiens
aattatgcttgaagaaggttaatcttataatggcatgcagagcggagctgggcaaggccagaggctaaatatggagccagaaagatactgcagaaagtgagcaaaaaggatgagtggatggcctggggtggaatccgtgaaaaagggcagattgtcagtctcaggaaatcaacaggactgagttctaacttcagctgggctactatgccctggggaatcagaagattctccctaacattggagtccaaagaagaggagccaccatctccttaactacaaaacaactgagagaagaaatgtctccctttagtgccagtgaagagttttgcttctctagaacaactgtttatttttgatcttatgaaacgcgtgacacttgtaactgatttgccttctttttgcttgctgctagaaatctcagaaccaaattcgaggtcatttctgaatgtgctggactacacagcatgaattctgtgtcctctcacctcattcatagatacatttttttattcctacccatcttttcctttccccagattttcctattgctcttttatcatcttgagtaaagaaggttaaactatgaataaaaagtacaatctcaatgacgagtcagggaaaagtaagttttggacttccatttagagccatttataggtcagcaatcttttgtctctgtgtcttctttctgccctgaacaaccaaggcatcctagtcagtctctcttcatctgcataccactttaaa

SEQ ID NO: 196824 - DNA, 595 bp, Homo sapiens
cttcaataataaaaagagggacaggggttacaaagaaatgagtggggccagtctcactgccaacttttagtatcccaatatcttcaataactttggatttattatttagggaatttgagagacgtgagttttagctgggttctgatgagaatgcagccagtggaactcggagggcaggaccagggccggtgcatagaagacgctcagaggaagattctgccttcaatatgagggagaacttactaattaagaggtgtgcagaaatgggatgggcagcatggggagagaggaacttatgccaaagcggggtgattcctgatcaggtatgttttaaaagtgttggagagaggtcaaacaaggtgacctgggagatggatgcaaccccgggaacttaggattccttgcacacagtggagcttcctgggtaagtatacatgtcttatccttagaactcactgtccagtctctcttaaggatccttctccccttgaggccatggatcctgtgatagttatctaccgctacatcacaaattcccccagagcatagtggcttaaaacagtaaccatttggtatcttaccatattttgtgggt

SEQ ID NO: 196825 - DNA, 418 bp, Homo sapiens
agcaaccagcaatatagcaaacagaagaaaaaacatacggctaggtgcgaggctcgcgtgttaatcggccgagggacattagagggtgatgtccaatagatagagatgcacatctgaagctaaggaggagcactgagctggggtgtatgtttggaggccgtcagcctgtagagatggtactttactcatgagaacagagccaggaattcgagaccagcctgaccaacatggtaaaacctcatctctactaaaaatacaaaaattagctgggcgtggtggcacatgcctataatcccagctacttgggaggctgaggaacaagaattgcttgaacctaggaggcagaggctgcggtgaaccaagatcgtaccactgcactccagcctgcgagacggacagaggctgtctcaaaaaaaaa

SEQ ID NO: 196826 - DNA, 255 bp, Homo sapiens
agcaaccagcaatatagcaaacagaagaaaaaacatacggctaggtgcgaggctcgcgtgttaatcggccgagggacattagagggtgatgtccaatagatagagatgcacatctgaagctaaggaggagcactgagctggggtgtatgtttggaggccgtcagcctgtagagatggtactttactcatgagaacagagttacaaaacaatggtcgaaccgaggggttcacaagatcagctgggacctatccact

SEQ ID NO: 196827 - DNA, 256 bp, Homo sapiens
tctgagacaggatctcactctgtcgcccaggctggagtgcagtggtgcgatctcagctcactgcaacctctgcctcccaggttcaagcggttctcttgcctcagcctcccaagtagctgggattacaggtgtatgccaccacgcccagctaatttttgtgttttcagtagagatggggtttcaccatgttggccaggctgtttttccttttttcagaaattggttccaaaatttatatggacatacaaaggaccta

SEQ ID NO: 196828 - DNA, 363 bp, Homo sapiens
agtctccatgcaggctaagagagaaaaggactggcccagcactatagggcctgagtaactgggtgaatcatgaatttactgagacagagaactgtgggagaggtctgatttggggggaacagccagcattcaggttttacaggttacacgggaaatgccgattgagaggtgggcaggcaggcggacacaagcatgtggcaatggtggcccaggtctgggctggagaggaggagttgggagtctcaggctagatcacggggtgacctagggccatggggtggggccagatgggtcacccaaggagggaagattgagaggaggccagagcctgagagtgctccgatgcttgcaggggaggaagat

SEQ ID NO: 196829 - DNA, 756 bp, Homo sapiens
aaaatggtacagtcacttcaaaaagtttggcagtttcttaaaaatatgtttaccagatgaccaagcaattttgctctaaggtattaatccaagaaaaaagaaaacgcatgtctacacaaagatttataagcaattgttcacagcagcttcaattttaacaacccagaactgtaaagaacttaaatatcaatcagctggtaaatgtatacacaggttgtgatagatacatacacagattatttttcttcaataaaaaggaactactgctaaacgcatgaatgaattttagtatttccaataggctaagtgaaagaagccaaatacataagactacaaactctatcattccacttatatgcatctagaaacagcaaaacttagaaagcaaatcagtgcttgccaggtcccaggggataggcggaagaggattaactgcaaaaaggcaaaaggaaactttctggagagatggaaatgtcctttatgatgtttgctgtggtggttacatgagcatatacacttgtcaaatctcatcaaattgtatatttataagtgatgaatttcactgtatgtcaattttacctcaaagctgacaaaaacatattctcgcacaagtttgaagtaccttcaaaatgctccactattactcattaagaggataaagatgctttctctgagaactggatgaagcaactgagtttatccatcaaatatctgccaaatggtttctgtttccattttatacagccatatattagg

SEQ ID NO: 196830 - DNA, 310 bp, Homo sapiens
agattctctgaaaggtaagttttgaaatatggtcagttcgtgtttagctgaacagaagatgggtggactgcagctggcaaactcagaaagcactgctgggtagcaggtgatcaaaaaaaaaacaaaaaaaaaggcaagtccctgggcaaatggtgtagccaaaggtgatcattataactagagacttgttacataattacttgttaactcctgacaaacagatacacagctacaaaatgccatggttaccctagccattgaagctaatgtagctggtgcaagagtcaaggtgtctccccttacatcgatt

SEQ ID NO: 196831 - DNA, 531 bp, Homo sapiens
tttatttttacaaaacggaagtcattctgtacatactgttttgtaatcaaaatttttctttttgatatatcatgaacattttgcccatcatgaaatatccttttaaattgtatgcaattccactgtaaacatgtgggtttatttgacatctttattgttgggcattttatcttgagtgcttagaatggaaactaattaacccaggataggaaggtgctctatcttttattctgaagatgttattaacatagatttccatggatggtgtaatgggcctctagagggtggggccaggtgtggcgatggcccaggagattctcaggggagcctcttccctcaggagccccaggaggcacctttctctgtctccgtggcatttagatccgtggagtatgttcacctgagtgtgacctacaagcttaaggtattaatccatgttcctcccacatggattaatatccgatgtgaaattagtagggaaaaaaagacgtgctccgtggccactgagcccttcccagcgggaggatgcag

SEQ ID NO: 196832 - DNA, 1066 bp, Homo sapiens
tcctatcagattgagttacctgaggtacttgattgtgaggggccatggggatagggttgaaaccctaagacccatccatgtgttgctccttcaccagttatgcaaattttcaacttatttaatgtgatctgaagaggtgagtcttccatctctgggttgcagttagatagggcatgatggtgtacaagtaggtgtcattttgaagagattccatacatattcccataaactcagaacgttttggaaattcccttttgagactgcttttctgagccccacacttactcaacaggcaccaaatcatcctcatgcacctactatgctgcgtgtcaaccggaacatacaaataatttccaccccctcctcacccataagaagctggcagaaaggcaagatccagcctccaaagtagaattcctctttgtttttgaggggtgttgcaggcttgaggaaccccttgtttgcccatctggcttccggtaaccaggctgtcagcagaaatgaaacccacccttggaatgaagactggccactttgttcaagccactgaggacactgtactgtggccccctgacagtgcctgtctgtagggacagctagatcctgctggtcccttcacagtcccagcagtggctgattcacaatggtgactggtagatctgttggggtcgagttgttgagctgatggtaactagctcctttattaaagtaatttccaagggagaaactgcaagagacggcctaagctgcggcagcttccaaggatgagcttttctggacctcaggtttggggggaacccgagaccatttgaatgccagagatgtgatgtgtttggtaatgtcgtgtctcacaagctccttttgtatttcccatgggcagatcaggtcggatcttgactttttccagaacctggcttggctggtttgggttgtgtatgaatgagctggctcgctgggtgtgtgaggggaggtgaagctgggactagacaagccagggctcgttagcaagtttctgctgtgtcaggaatcccagagagaggtttcccaagccctatcctgtcttgcc

SEQ ID NO: 196833 - DNA, 404 bp, Homo sapiens
gtttcaggtcctagtccaacaagaaatacaaattaaccatagcttaaacaagatagaacattctctctctctctctctttccccactcccctcccccatacaggaaatccagagagaggccgtgaacagtgttacttggaccactgagagctagagctatggaaggggtgctacctaaaagagggggcccgccacagctagaaccaggctgctggtatgttcctttagcagaatcttggtgtaagtaaggtaacagggaagcctgggtaaagttgtccactggggtcaactcctagggcacagacaagggcagggagtagatttgggggtgtgtgtgcaaatggagattatccagcataaaagggaaagatgatgaggcaatgttcaatctatataagtagcag

SEQ ID NO: 196834 - DNA, 455 bp, Homo sapiens
catggaaattcggtgctgtgacatactcctcaactttaacctttcttccttgtgcaggatgggatttttttccccagtgcctttgagatgtcctggagaacaggaagcaaaacttccccccagttcttgccctgctgcatcccactcccatgcacagcctggggtagcatattcatgacccagtgaggctgtgtgtcatgacaagctggctagccttttattaatacccaagattattcactcccctttttatttgaaagagccaaataattttaaataccacctataagactgcagctgtccccagaaatggaattctgattgaattcctactgctcctttaagagtcaacttaaatgtcacctttaaataataactgctgacatttacccagagcttactctaagccaggcactttgctaagggcttctcatggatttctcatttcatcttca

SEQ ID NO: 196835 - DNA, 348 bp, Homo sapiens
actgggccaaatgtgaggcttttctagcagtcaagttgtttgggatggcccaagtagaaggcttgggaggtagcgagttcctcttctgtggagatgaggacttgggagggatgtggaggaaactgaattccagatgtgggagggagcctgacaatctgtgattccagtttattgctcatggtctcaactctccccctctacagaggtgacttccgccctggcctgagtttcaatcccacagttccttttttccccccttaaatgagacatatcttgctctgtcacccatgtcagaatgcagtggcacaatcatggctcactacagccttgacctcccccgatcgcctg

SEQ ID NO: 196836 - DNA, 580 bp, Homo sapiens
cagtgtagtcgttatctccctaggatcctcatcttctctatcctctttgccacactagtgcttctttgggttacagagtcaccactacagtcttgtagctagacatgccccttgtgacagagagggggaaagtcccttatggtgataactgtttcagattcattatagttctctacaatggggaggctggcctgtttacccagtaattaaaaataagatttttacgggaaggcacatcctaatcttcgaatttttatctgtcagacatagctcttctataaatatttttaacaggatgttaacagttattaactttttttctgagatgtctcactttgttatctcactttgttgcccagaatggagcaccagtggcaagatcttggctcactgcaaccttctccttcttggttcaagcgatcctcgtgcctcagccacctgagtacctgggattacaggcacctgctaccatgcctggctaatttttgtatttttagtagagatggggttttgccatgttgcccaggctcgtctcgcactcctgacctcaagtgatccctgacctcaagtgatctctcca

SEQ ID NO: 196837 - DNA, 427 bp, Homo sapiens
tatgtaagctgtagccaaagaaacagatcacaggccacactaaaattgtgaacttcatggcaattgctccagtcccacctgctccagatacctaaatcatgaaggcttactagcaaacctgtttctggatatctgctattggataacaaactacggggaaacctagtgacttattaccgtggattattgcccctcgtgtttctttcacaaatggtggaaaacagcaagtggaaaaggctagttcaccaaagcgaaagattataatatgacaatctgaaaggcagcagaaagcagatggaggtcaccagtgtcggtctcaacacttcagctgcactggatgggatcctgttgcatcccccagtgtcacaggaatgtggcaaagaatgttgaaacaatgaacaacaaatatataaaacatttaagtata

SEQ ID NO: 196838 - DNA, 442 bp, Homo sapiens
tccattttttgtggggtttattttttaaataacttgaagaaggactaacagagaaaaagaaaattgagatccacttcgaagataaatgctatctttggcagttcttagcagtatctctctgacctcctagaatggttaccaagtttcctctagccccaaaactgatgctgctgctcagggggcccaggccctgggggaactgctgtggggatcgggggctattcttaaaccagcccttgcttgcccctcactaagttccagatgccctgggagcagccagcagcagaaacacaacccaaaggacacagtttcaaagggcagggaatttggcaaccagccatatgcacagacagaccagcatccccctcctttgcctggtcctgttattatataagtcaaggtaggtttaaggcctccaggaagtcaccactgaagataaatc

SEQ ID NO: 196839 - DNA, 431 bp, Homo sapiens
ttgtatgggtaaactccaatctgatctgaaaaaaatactaataaatatctcaaaagtctgtgagctccatgtgatggagggaaaacaaagcagggaaggggaggttgtaatataaaatagagtggtcagggaaagtctcaatgaaacgctgacatttgatcaaagactcaaaagaggtgaaggaggaacatgaaatatttatctcagggaagagaatttcaggtgtagagaacaggaaataaaagacattgaagttggaaagtatctagcatatttgaaaggtaacaaggaggttactatagttggagcagagtgaagcataaaagacaaaaattgatgagttttattaaacttacatggtaaaacacacacacacaccacagaaaaaaacaaaaacaaaaacaccataactaggccaaaagataaataac

SEQ ID NO: 196840 - DNA, 215 bp, Homo sapiens
ttttctgattatgtttaaccccaaaatttggttgtataccatagcagtttctattttacctggatgttaaaagaaaaaccattggaatctaaagagagatgaataacctcttgagcttagatggagaactaaccagtggcaaatatgtatctagtggggtaaatacatctcaagagattcaaaacgttacaaaacaaggtgtttttaaaaacact

SEQ ID NO: 196841 - DNA, 360 bp, Homo sapiens
ctcaagcttgggcccagaggttgtccagtcccagctaacacactgggagcctcctgttctcacttcaccctaacgggctcctttctccaccctgtgctccttgtccttacctcctcttctgcatctgtggtgagagacagagaggttccacaccccttccccatttggagcctgaggcagccccacctcctgggcccatctgtcccctccagaccctaagacacaagcttcacctccacgattttctcacagcaaacctgctgtcctctcctactgtcctcccccagggagtctttgatccagcttgggccttgagccaaaaagtcattaaaagaaagtacagccaaggagaggaaaaaa

SEQ ID NO: 196842 - DNA, 398 bp, Homo sapiens
ctgtgttacccaggctggcctctaactcctgggttcaagccgccctcccacctcagcctcctaagtagctagggctacaggaatgcaccactgcacccagcttcaatgtggtttgaatttttattactctttttttaatgaatcttttctgatggttaatagccatttgtatttttttctccgtaaattaatactttaagctctttctcatatacgtaaatttttaaaacatgcatactgattgtttatagccatgaacatgcataatgaagggtgggagagaaactctaacctcaattgagaggctgctgctggcaaggatggcaggcgggtgggacagggcagacagcagagacctttagggattatcgatgagggggtaccctttttcttcttta

SEQ ID NO: 196843 - DNA, 417 bp, Homo sapiens
caaaaccacgccaacaatatcagggaactgagatatttccaaacaggatgggtaggtttgcctaggttgtatagcctggggcctaatggcaggagcgcatttgttgacaaagtcaacataaaaaggataaagtaggccgggcgagatggctcacgcctgtaattccattactttgggaggccgaggcgggtggatcatgaggtcaggagatcgagaccatcctgtctaacacagtgaaaccccgtcactactaaaaattaaaaaaaaaatagctgggcatggtggcgggcacctgcactcccagttacttgggaggctgaggcaggagaatggcgtgaatccgggaggcggagcttgcagtgagctgagatcgcgccactgcactccagcctcgacaacagagtgagactccttctc

SEQ ID NO: 196844 - DNA, 601 bp, Homo sapiens
caagaaggaaactaaactgtcaatactgatgttaccaaataatttgaaggatacgtgatttctaatttttgttctttccacttttttaaatgcatggctttcataatcagggaagaggaattaaaaaaaaagcagaggaggccctgagagaagaccaaagtagggggtgagagatgccatcaattcacacgtaaaagctgcagcctctctcaactacgcctgaaccttgttagataagatactttaaaaaggacatttttttttccctaaggagaatgtctacctgaattatagccaagaacaaatttgttatagggaaagaatgcctgataatctgaagaaaacgttttaacctcataaatgtcacacggttaggttgaatttgtagtaaaatgaataggtaaagacttaactgttgaagactttactttctaccctattaacacactgtccatcatagagacaggaggtggggaactgcctgtccttactgtggaaggaggatgaggaagatggtcacatcagatcttcctgttcccaagctcacttcaatctgctaggccagtggcactgaaaccacagtgagttgccatgtcttgga

SEQ ID NO: 196845 - DNA, 534 bp, Homo sapiens
tgagatctgactcaccattccaagcagagggagatatgctggtttctgaaagttgccaagataataatgtgaatatcaaatccaaattcatgaatttgtcccaaaaaggcaccccaaaggaaggcccaggtatattgcaaccatttgaaagctatggcaccccaagtcaagggagtaaaaatatggactatagccaagattcaaaaagcccaggaaaagggaatggggcatctccttcaaatagtaactattcctacagtgttctcaaggaatctgatgcagaaaaccaagttccatgcaacactaataatattggcaacttgggtgaagaagaacccaagtttcatgctcatgaagaaaatagaggacactcagaagtgaattttgactcttcaacagttgtcaaagaaccaggtttgaaagataacatgaatgcagagagaaagagcaaagtaggaaatacctatatcctgaaagcctccttagagccagagaatattaagtcaacacctggggttgccaacaatggctctc

SEQ ID NO: 196846 - DNA, 622 bp, Homo sapiens
tcctttgagctgaatttagaaaaaaatataagaatattgctgagctcttgaaacctgctaaatgcgaatcatcagacacttaaatatgacttgtgctgaaggcccccaagtggagcacaatataattgaaatcaactgtaacaattaacaaaaagagaattcaataaatagtccaacaaaaagtccttgtgagtatcctgccaccgccaaggagggtgtttatatcatcgaacgcaaaatctcattaagccagctagagtctgtactttgaatttccctttttgtggaggtcttctgttcagtgacagcagggtttttccaagacatttttccctgtctttttctcctttaagtatgcatctctaggcagtttaccagtcaattcagtgaaaaatgggaaaaagcagttgtttcaccagattgactgactgattgttaaaacagttggtcccatgacccctctatatgtagacacggacatttgtgtgaacctgaacatggcctcttttatttaaaataaagcaacaggatgtggttttgggtttgactcaaaataacattgtcaagatgggaagagaaaaaatatatatatgcacatatgcattcatctattggattgact

SEQ ID NO: 196847 - DNA, 342 bp, Homo sapiens
cttgtggtgattaagaaggtagattctagacgggactacttgacctcaaatcctggctgcatcatttatgagctgtatgaccttgagcaagtccatcctcttctctggacattgtttatttgtaaaatgggctaatgcaagaacgacgttgaggacctgtagtgcagagctgcaaagtgttcaggttgttccctgcccttgatggcctgatgactagtgtctccttgcctcaaagacaatcatcagttgttttctttgaaggaggtttgagggacctgaagtttccttgaaacacttaaggtctccatttcctcctactttaaagagaatatgtggccatta

SEQ ID NO: 196848 - DNA, 121 bp, Homo sapiens
caggattcttacatagtcaaaaagctccttatagagaagctcggaactttcaatacagctttgccttttttgccattttaattttccatttaatttaaatgtattctctcatttgatcttc

SEQ ID NO: 196849 - DNA, 894 bp, Homo sapiens
actcaagtcccagggtggccgctttcagctcggactgaattacctgcgctcttttcggctggcgggctggcgggcggtgctggtgatgttaactttttatctccagtcatttcaccctctccctggtttggtaactgaagccttctgaaatgaaccagtgtcaggctccagtgaggactccatccccaattcaggaagcacagaggtggagcataatccccccaatttgtttatgtgcggctgacttctctcaagatggtgtgcctgtttgggaaagcttttgtttgcaagacaatgtgaaagaaatccttaaagctcacagactgctgggtggatatgacattctggcccttggttcccccaagaaaacagcaacttgcagatagcaagtcaaacttgtcagcagaatccagggatgttcctcgaggcctgacaagttaagagcaatcatgggaaggcattcagaggaccgcagcagaggatcaggtcaagggaaacctacctcctaaaggaaagatcgagaagaaccatgcgccccaccacccacctgggctgctcagctgggcacagaagcagccaaggatattttcattcggatgctcacatatgactgagttgccacatgaggatgatccgtggcgattttccaccttgaggcaaagcaggacaatgcgtgtaaagaggtttgcagccccgggaccgggttttcagctggtttttctaccccaaagtccaatgcgtgcaggctgtcatcagcaccacagacagcaccagaacccatcataatgtcccagaaggttttattgctaaattagtgtcagagctccagggaacacattcagatatagtcacactgagtcagagctcgagggaagagctgtaagctgggaacca

SEQ ID NO: 196850 - DNA, 350 bp, Homo sapiens
tggtgagacagttttggaatgtaatgatacaagtttatatccttattcagtaagcctcaacccttgaatttatacttccctgtagtataaattcaagctcataagcccatgactttggaatacttctcatggattacctaattttcatttcttatttttttacacatttgtttattcaacaaacatttttgcttactacctctacagtagaatacagtaaatggacacgaagcaaatacctagtgctgcagatagctagtgccagggtgtgtgttggatgctagaagagtaagataattaaagtagaagagattgctttgtgaaaagaccattgcaggacagtgtgatga

SEQ ID NO: 196851 - DNA, 437 bp, Homo sapiens
gcaacatggatggaacaggagactattctcctaaacgaatcaacacaagaacagaaaaccaaacactgcatgttcttacttacaagtgggagctaaatgctaagaacccatgaacacaaagaagggaacaaaagacaccggggcctacttgagggtggactgtgggaggagggtgaggactgaaaaatacgtgctgcagttattacctgggtgaccgaagaatctgcacaccagacccccgcaacacgcattttacccatgtgacaaatcagcacaggaacctcctaaaaagttggaaaggaaaaaaattcttcaccactgtcttgggcatctgtgatatgaaatgtaaacaagcacaaaaatggctgatgagcccacagagtgcagcccggatgggaccacctgtgagactctcagacctgtccagttccacagtc

SEQ ID NO: 196852 - DNA, 569 bp, Homo sapiens
gcacacctcatatctgacagatgactagtatttagaatatataaggaatatttgaaactcgacagtaaaaacatcaaaccatccaattagaaaatgagcaaaaaacatgaggcatctcaacaaagaagatatacacatggcaggtaagcacgtgaaaagacgttcaacatcatttctcaataggggaatataaattaaagtcacagtgagatatcgctatatcctattggaatggttagaaatttttaaaaagtgacaacaccaaatgtggagaaccagattattcactgattgctgatgggaatataaaatggtacagccactctggaaacacagtctggcagtttcttaaaaatgaaatgtgcacctgccatatgaccaaacaattgtactcctgggcatttgtccaagagaaattaaatcttatgtttgcataaaaacctgtacctgaatgtttttaacagttttattcataatcaccgaaaactggaacccacccagatgttcttcatcaggtatattgttaaacaaattgtagtatatccatgctatggactatattactcaac

SEQ ID NO: 196853 - DNA, 409 bp, Homo sapiens
ggcatcaagcaaacctacctcaccatcccaagtagctgggactacagtcaggcaccaccacacctagctaattattttaaaaaattttagagaccagagggtgggaggtggggtgccctcactatgttgctcaggctggtctcgaactcctggcctcaagcaatcctcccaccttaccctcccaagtagctgggattacaggcacaagcaagggttgactaattttttaactcctaaaaatatactcagtcctatgatagcatagagtttaatatattaaggaccttaaaatcttgttgaatattcaagcatcaatctataagcttggtcagttcagggctagcatagtatgttgctattacaatgggatgtattcatacatatagataggaatgaggcctattacaga

SEQ ID NO: 196854 - DNA, 474 bp, Homo sapiens
tgtggcacccaccactgtgttatgacatgcagacaagggtcctcactaagtgcctgtggcctgacagattgtggctctgaggtcagtgcagtcgtggccatttagagatggttactgaaagttaataattggtggttcctgcctaaaaatcccaccacatactacaatccctttgaattttcaagaaatatttgatccattagggatatcagaagcctttggtgagccagacatggtggctcatgcctgtaatcccaacactttgggaggccaagagggaaggatcacttgagcccaggagtccaagaccagcctgggcaacatagtgagatcctatatctacaaaaaataaaatgaaataaaaatattaggctgggcacagtggcttacacctgtaatcctagctctttgggaggccaagatgggcggatcacgaggtcaggagattgagaccatcctggctggctaacatgg

SEQ ID NO: 196855 - DNA, 515 bp, Homo sapiens
ctgctctctcaccctgctctctcactacttgggatagcagctcactgcaacctcgaactcctgggctcaagggatctttccatctcagcctcccaagtagctgggagtacaggcacacatcaccacacccacctaatttttttatagagagggtctcaccatcttgcttgggcgggtctcaaactcctgggctcaagcaatcctcctgcctcagtctcccaaagtgttgggattacagacgtaagtcaccacacccagctaatttttgtatttttagtaggtttagctcttgccaggctgaggtgggaggatcacttgagttcggagttcaagaccaggctgggcaacatggcaaaaccccacttctacaaaacaaacaaacaaaaaaacacacacacaaaaacaagcgtttcttcagcccaagaatcatttccagtattaagataaatatttgccaggcgcggtggctcacgcctgtaatcccaggactttgggaagctgaggcaggcggatca

SEQ ID NO: 196856 - DNA, 421 bp, Homo sapiens
tagttaggctaaaaaatgacttgacagggtaaaccagccaaaaacatacctgaaatgcagcctaagagactgctctggactctttattaaggctacaaactaaacttaagccgagttttcactgttttctttgcaaaaagcagaagtgtgtatgtggaagctcgggggagagcaggaaattcccgatgataatcttttatttttctccttatttggataagtctttgtgtttgtgcggggatttagggggagtgctagggagtgggaaaggagaggtagaatgggaagaatttgaacaacttttcgctgtcttaaagcatttagaacactgttaatctcaccccttgtaacttaataaactaaatgtattccctcttttacattcatggcattaaaaagtatttgaggttcaactgtgaaa

SEQ ID NO: 196857 - DNA, 681 bp, Homo sapiens
ctaatcttgaacacttcagcaaatgaaactatcaaacagttgctccagctagaaagccaggagtcctccctggtctggtccttcccttttcctcttccctttcactctcccacagctatttttaaaatgaactaaaaagtccattcaagaaagaaatgtgaagtttcaagttcactcacttttcctcatctccacaaacatgcccttagcccagagcacactcatctcctgtctggatagactacaagtagcctcctaccacttctgctgctcctctccagtccactctccatgtaaccagagaacatctttcacaaatgtcaatcagggaacttcactctctggcttaaaacccttcaacaacttcccatttcacttaaaactcaaactccttaccacagtctacaagacctgcacaatcttatttctactcacgctctaaccccaacattctagccaacaccgcctcctctcaactgctaggaacaaggtgctttacaccttagagccttaaacacacatcattcttttctgatgtctcaaatgccttattctgttccttagagctttcagatttctgcttataatgtcatctcaggcaaacctaccctcatccctagccacaatccaagtgggtcctttctgtaacacctctgaagcacttcatatataatcccagca

SEQ ID NO: 196858 - DNA, 530 bp, Homo sapiens
gggtgcatttgttgggatagtgcgtttgttttgatatgaggagtttattcctcatgtgaacataggtctagcagcaggaaggcagaaggcactgtgataccagtctcgggctgtagagtgatgggagagcaagaaaaataggccagagaaatagcacaaggggccttgccatctgtattgagcgatttggtgtttttaatgcttaggggatgggccgtgaggttgatagaaaattgtccttgttggctgggcacggtgggtcacgcctgtaatcccagcactttgggaggccaaggcgggcggatcacgaggtcaggagatcgagaccatcctggctaacacggttgaaaccccgtctctactaaaaatacaaaaaatttagccaggcatggtggcaggcgcctgtagtctcagctactcgggaggctgaggcaggagaatggcgtaaaactgggaggcggagcttgcagtgagctgagatgtcactactgcattccagcctaggcaacagagagagactccatctcaaa

SEQ ID NO: 196859 - DNA, 303 bp, Homo sapiens
cctctcacttctgcctaggttgctaggctcagactagacagtttaagtcggcataaggcataaatgctaaaatgttaataatggattagtgatactggcacttttttttatcctactagaataacttactaacctaaagaaatgtccgatatatttacaggatttgagtgaagattcttttaatccaagtgtcccttcttttccagggtgccgatttatttcatacattctttatattaatccatgaaattagcacaatatgtttacccacaatggtgccgtcaccccaaacctcttaccttt

SEQ ID NO: 196860 - DNA, 638 bp, Homo sapiens
cgtacatgcggtctgttgttgactgaaacatcattaaagcagcacataactgtatgttcatttacacttaaataaacacggacagggtaattcattagagaagacccaaattgtaataactttgtttcttgatccaatgccttttaggtataaaaccactgtgaaaaatcatataaacaggttttgactaacaattcataataaatgacattgctagatacctcaacgcaatgttttcagagctgttcaagagctcagttttcctagttctctctcactggaattttaacttatcgggcagttggccactcttcttacccagcattatttatattctgttaaaacaaaatatactgttgcataattttgaaagcaaaacatcaaatacaaaatggctctatttgtgatgtgaaagcatctgatacaatttcgtctagtatatgaggaatgttccttagtaaagacccaggaaaagtacaatgttcaatgaaagcatacgttcaatttcaaacgtcacatgttcgtcaactccaaagtatctgtgctaatgagggaagcagcagcaaaggcactccccacgtgtctgccatactcactcttaacaagggtgtcgcgttttgcaactactttcaaacaca

SEQ ID NO: 196861 - DNA, 654 bp, Homo sapiens
cctggcctgtagcttcaggagatgaccctaaacctccagaagagggatggggatttgtacttgcagcagtaagtccattgtgctcaccccagtgccaccacccccgaccccactgcccagcaggggcacaggaaaggtcaccctggagaggaactgtcccaagaaaggccaacttgcccacagccattcccacacagcagcagggcctacagaggcttcctcctggggcttccgcagagctccatgttctgggcttctcctccatcctcccctactgccgactctcctcaagctcttgccccagaggccaggcccagggtccacactcaggcaggataaggcaggtcagacctcttcttggatccactcttgaagatgagatgctgctcccagtatcctctccaccgagtcctctagagttctgctaaatgtaactgcagggcagcagagtggaaacagcacgggctttagagcgcagctgagcaggctcagacctcactttgcctttgactggatgggtggtcttgggcaagtcacctaatctccctgagccccagttactcatctgtaaaatgggtgttaatactacacaccttgctgagagactgtgaaggttaaatgaaataacgtgtacagatatgttcttgtgggtat

SEQ ID NO: 196862 - DNA, 350 bp, Homo sapiens
tgctgggattacaggcgtgagccaccgcacctagccaggccagttcagggatcctcttccaggacctccaaagggctgtcctccaggccacaactggggatggttccgactcttggtgaattcctcctgtattgcactgctgcgtctgtctgactctagagtgttttggggtgcgcgggaatatgtctgattcttctccgtgtgactcaccctcagtccttggagggagtcttctggttccctcttcttcttgtcttctctaaggcctcccaactcctttggccaccttccctcctgtttctaagactctcaatgttctcatctccctcatctaaaaaatgacactcctt

SEQ ID NO: 196863 - DNA, 680 bp, Homo sapiens
agcaatgactgtgaaacaaaatggggggaaaaaacccaagaattaattgcaataaaagaacttgtcccagataactctaaggatgaagtttttcaaattatcaaaaaccataatttccatattatttaaatggctcaataatgagtgcaatggtgagcatttattaagcacttactatgtgcctgctactttgctaaatggctcaaaaacactatcatttaatgttaacaattatatgaggtggttttctccaaattacaagtcagaaaaatgaggctaaaaaacacgaccaattgtcagactgggtgtggtggctcacatctgtaatcccagcactttaggaggccaaggcaggcagatcacgaggtcaggagatcgagaccagcctggccaacatggtgaaaccccacctctactaaaaatacaaagattagctgggcgtggtggcgcatgcctgtaatcccagctactcgggaggctgaggcaggagaattgcctgaaccagggagtcagagattgcagtgagccgagatagcaccattgcactccagcctggtgacagagcaagactccatctcaaagaaagaaagaaaaaaaccaacatgaccaatgtctaataaaattgtggagctaagattcaatcctgcctttctacctctaaagttgctcatttaacaact

SEQ ID NO: 196864 - DNA, 838 bp, Homo sapiens
cagaggtcggttcatgcacaagagcccctcaccccagtgtcctgatgaaaagggcattcctcgggtgggattcgggggcacaggctctagaattgctccttcggggcccggaagcactgtctttatggcgtgccttttgcggtgtgtcctctgccgcccaggaggcagcacacagaggctcgggcccagccccagtgaagaacagcagagcctctgcacttacaagggacagagtgaggaggccccagggattccagtcccttctctgccccgaggtgtgctgtgtcccctccatgcggagtaaggcacggggcccaatggctctgggaggccatttgtctccctgtcttccttgtcctcccacaccacagcccacctgtgccccattgtttccatcctagcacctgagaccaagcaccccagcatagccacccagggatggcggggatcagggccagccctcatattcaccctggttcccagtccccaactttcagccccacggcggcccctggggaagcccaggatctctgcatctctctgtacctgatcgtgcagaggtcaggcctggtgaggaggaggcatctcccctcatgccccgcaaaggcagcagcttaagtctgtccctttaaagggaaggggccaagtattcctgggctgatcacaagatctgatagaagggaccctgcatcaggcaggcatcaaccatccagagctgttggctgcctgtgtgtcaggcgccaacgccaaagcctccatgaacctcgtaggtgatggaagcccaggttctctcttttgttccttgtgtcctcgggcagattgctcagccactcatgcc

SEQ ID NO: 196865 - DNA, 173 bp, Homo sapiens
ttactaaaataaaaaggtaacaagatactcagcctggtgaggcttacaaatgagagaaatgaagcatacttgtaaaataccagaccttcaggggaaagaaaatgcaaaaaaagacaaatttttaaaggctgtaaaaattaaaacattctaacttacttgaggtagataaaaat

SEQ ID NO: 196866 - DNA, 153 bp, Homo sapiens
agggactgttctagaccctggagatacaaagataaataaggcagagtctttatccttcaaggaacctccacactagtggtcagatagacacaattatgcactaggacaatagaaggtcaatttgttttatctctgcctcacttaggccccttg

SEQ ID NO: 196867 - DNA, 165 bp, Homo sapiens
taattgtgtctatctgaccactagtgtggaggttccttgaaggataaagactctgccttctttatccttcaaggaacctccacactagtggtcagatagacacaattatgcactaggacaatagaaggtcaatttgttttatctctgcctcacttaggccccttg

SEQ ID NO: 196868 - DNA, 290 bp, Homo sapiens
gctgacagtcactcatcccctggagaggggtactgagcataatcactgttggtattttatttactaccagttcttcatcattaccgagactcattccatttggaaaataaacattgcctcatctgttcatggtatatttttacacttgcctttcactcacatgttgcatattaactgaaaagatcagcatgatcttggagcctaatgtgatctggatcttattaccatgtatgtttttatcgtcaggtgctgctttggactctggcccattcctcccacctgtcttcatc

SEQ ID NO: 196869 - DNA, 312 bp, Homo sapiens
aaaacccccttctcttcaccgggaaagtgttactgcaagattgtcctgtcattttgctacacacagcctcggcccatcagccagtaattatgcttcccataattagtatgtcatcacctctcatgtttttgcatggtctccaggctgaaagatgcagcatgtaataattttaagaaatctacatctacatcttgatgaccagaaatggggatcctcaaggaaactttcaaagttcttatccaaactagtctccctcccaattccacatcttaaaatcaatttgtatcgccttgtataaattacacaaaacca

SEQ ID NO: 196870 - DNA, 221 bp, Homo sapiens
ggaaatctccgtcctgcatcccttgagaaatcagatctggcagccccgtggctgtgtgctccctcgaggcaagggctgcctggaactgcctgaagccagagccgccttcccttagcaagagtgtggcgcctccaggcccacctggctcacccactgcctctttgtcacctgcctggcctgctaggacaagagcctgcaacccctgcctttttctatctctt

SEQ ID NO: 196871 - DNA, 279 bp, Homo sapiens
cattggtcagagagaattaggctacccgccgcagtactgagtcatctatttccccctctattgatccccatctccaaatatctcatcaacaaccgactaatcagcacccaacaagtgactaatcaaactaagcctcaaaacaaatgataaccatacacaacactaaaggacatttggggtgtgtgtttcctgtttggggctattataaataaagctgctatggacgttagtgagcagtattgtgtgtgaacctgcgctttcatttctctgggacaaatg

SEQ ID NO: 196872 - DNA, 415 bp, Homo sapiens
ggtactttctgaggctctccagagggactcctcctgggtggcagtaagcccagcctcattcctcagctctggctcctggcacgcctctctgacacacccaggaagctgagctggaggcccctggggtagccagaaggcccatctgaattccacatggtgggctcatccccctgaaacagtagaacagacaaaccaccagtgcccactgtcagcatccctgtccctcagactccctggacttttaagtgcctctggaccccacctctcattcgggacagaatttgggagttgggtgtgtgtcaccctaagagccatgggcacagtgatacgcaaccaagacccctacaatgggatgtctacaaatctcagcgctcacggcacaattcctaagagtcaaattacaacaggttgggga

SEQ ID NO: 196873 - DNA, 382 bp, Homo sapiens
gacagttaggtagacctgaaggccaggctcttcaggggcctgcaagttatgtgcttgatgggctggggtggagggagtgcctgaagcacaggcacgacttggcttcagctgatcaccgtcaccagagcatgtagaccccatccctgagacttctatgagaagcctgaagttggtatttttatgtgaaatcgttcactttgccagccacaaatcacatccttgcaaaacagctcaaaaaacacatccacaggtcagatttggcccttgggccaccagtttgagaccctggtctgcgcgagggttgcagcaggagagccctagtctagggagcaggaagccgggatcccaggaacttcctggaggatgtggggcagagggcaga

SEQ ID NO: 196874 - DNA, 534 bp, Homo sapiens
aaatatgtttttccactttgtttacaacttcagctctgtttgggagacacagacagactgggaaagcatgagggttcccagtacaagttcacctgatgaaggtttctaacaggaatccctctgctggaaacagttaatttttttaactgaaaatgatgtgggaagaggaaagcaataagggaagaccatatccacccagaggcttccaatttcctgggtaattgaagaaggttcatatatttctactccagtaagagaactcaggtctatttctttaaaaaaaaaaaaaagaagaagaagaaagaaagaaagaaaatagagccatcaataaccattagagtgcattttaattatttggatcttacacaaaattaggggaaattccagtttagtgggaggtttcctgttactacgattgggatctcacattaaataagctatattagttctgcatgcttttcccaagatattatatttctccttctaaatgcggtccctgctcttatttgagatttaatacttccctccttctta

SEQ ID NO: 196875 - DNA, 476 bp, Homo sapiens
atgtataggcaaaccagaatcagaatatggaagtgctgttcatatatcttttttttcttagttctgtcctcaaagggcttagaagcaatgaaatactagttagtagtaatgagcacccccagtgcccatattttaatttctgaataaccagggctctctggagaaatgactaattccaggtctgaaacaggaacttgatagggcgagcctgacacattatcttgtgccagaaataagaacactattaaaatctaatggaataattataccgcagtttaaaacagatgaactaatggagttgtgtcaaaaggacagagaagccagttggaagggactcttaattggccgaaggcgggacggctggagagttggctgcaattgatttaaacacatgaatatataaaacgtcagagtctgttatattgtaataatactcagaaaagagaaagcttccccaacagttgtcagaactaaaa

SEQ ID NO: 196876 - DNA, 140 bp, Homo sapiens
aacccccaaatccacgatgttcagaagcacgtgactgttttccacaaatgccctttattttttccctttgataatttcagaattctgattacattcaaaatgatgtagaaattattcaagagtttatggttttaataaaa

SEQ ID NO: 196877 - DNA, 221 bp, Homo sapiens
acccatagcgatagctaattttgcatctggggaaggggctcaagtttttgggacacttcccacgactgccagtctctccttggcatacgaacgccctgtacttcagccagggctccgtggcgctggtctctacagtttctaggaaaccatgctcctttgtgcaaagtgctcacactgaaagccttgagaaacattattttctctgtaggccaggattgatg

SEQ ID NO: 196878 - DNA, 751 bp, Homo sapiens
gcttggccaaggctcaaaccaaagtatgttttaactactctggatattgcacacttccacgggaaggctggaggggaactggtgtaaaaatcaccccgtgaatgtctgatttggccccagctgccacagggacctgaccttctatctctacttcctgaccttctagctctacttcctggtaccacgttccaaacagttccttaaaatgagctctgggaacaaaggtggtagatttgttattagaacatggttccaatgacacaaaacactgtcgctaccaacccaccaacatcatgctccccctccctaggcctagcaggaaccagccaagctccccagtagaaagtacaacgtgcacctgactcccagcaaacggacccaactgaagtctaatttttaatttttatcaaatctggacatatcctctggggttccttctactcagcatttcaatgtatagctaagtctttcaacatatagctaagtgtgaagttctgatttctttaaatgttagccctgactgtataaatgtcagtagacatgaccttcccttgggaccacatgaggaggtccccacattgcttcactgacaagagtgctagcaggaagccaccccatctcacaacagatgggctattgggctatggccaggatggcatggacaacttgaacaagagtgttttcctagatggattttccacctgtattttattccaccctataaggtaggaaatacgtacacgattgtggt

SEQ ID NO: 196879 - DNA, 387 bp, Homo sapiens
tcaaattgcaggattacaggctaggcttgggttctcaagtcacatgtcataaagatgtgaaggccatgatttggagaaatacagtttataacatatactctaataataatctttctggggccccaaaatatcatggtaactatttcataaggttgataagggaataacatgtgacatgcagagactggcacacagaaagtagtacccaataagtgattgtgttaatgctggttattactccttataaaaaaaaaaaaagaggcgtgatggctcacacctataatcccggcactttgggaggctgaggggagtggatcacctgaggtcaggagttagagaccagcctggccaacatggcaaaaccctgtctgtactaaaaatacaaaa

SEQ ID NO: 196880 - DNA, 604 bp, Homo sapiens
aaaaactctgagaacctctggatgagcctctttagtcacagtaatcaaataggatggaattcagtgtatttagggtcattctctagcaaacaggtctttaaaaagggaaagcctgctagggaccgtggttcacacctgtaatcccagcactttgggaagctgaggaaggcagatcgcttgatcctaggagtttgagaccagcctgggcaacatagcagggccctgtctctacaaaaaatccaaaaattgaccaggtatggtggcatcgtgtacctgtggtcccagctacatgggaggctgagttaggaggatcacctgagcctggggaggtcaagactgcagtgaaccgtgattgcaccactgcactccagcctgggtgacagagtgagaccttgtctcaaaacaaaacaaaaaaaattgtgggccagggggcaagtaaagaactgtaacagaaagaaataagaaatctgaaaagattatagaagtaaagcaatattaaaataacatagtttttgtccatagagttgttttatttcaaaatggtttgtgaaaaccaaaacacatattaaaacagtgatattaactggttgatttttcttctttt

SEQ ID NO: 196881 - DNA, 350 bp, Homo sapiens
ttgtctctcctctcctctacccctcacaactttgtaggaattacagaaggctttgaatgtgtgtgtgtttgagtcgctgagatatgctgtcacctgactaaactcctaaaggtaggaatctttccaagattcctcactctgtccacgtggtacctggcacagggctgacacttcctagagtggctacttctacttgaagggaactgagaagggctacatttggcccaagagctagctagacagccacatgaacagtctcttgcccttccttctggaattctgagtctcatctgccccttatcgaccatgtgcaagccactgccctcttccaagcctcagtttcctcaact

SEQ ID NO: 196882 - DNA, 1062 bp, Homo sapiens
ggcctcggatgctgccccacttcagtacctggctccttactctggctgttccatgggagagtattttagagacacatgggcaaacatgctttgatcatctatgacgacttatccaaacagtgtatgcttatccgtcgagatgtctctggttgctcgtgtccgccgacccctggtcgtgaggcctatcctggtgatgtgttctacctacactcccggttgctggagagagcagccaaaatgaacgatgcttttggtggtggctccttgactgctttgccagtcatagaaacacaggctggtgatgtgtctgcttacattccaacaaatgtcatttccatcactgacggacagatcttcttggaaacagaattgttctacaaaggtatccgccctgcaattaacgttggtctgtctgtatctcgtgtcggatccgctgcccaaaccagggctatgaagcaggtagcaggtaccatgaagctggaattggctcagtatcgtgaggttgctgcttttgcccagttcggttctgacctcgatgctgccactcaacaacttttgagtcgtggcgtgcgtctaactgagttgctgaagcaaggacagtattctcccatggctattgaagaacaagtggctgttatctatgcgggtgtaaggggatatcttgataaactggagcccagcaagattacaaagtttgagaatgctttcttgtctcatgtcgtcagccagcaccaagccttgttgggcactatcagggctgatggaaagatctcagaacaatcagatgcaaagctgaaagagattgtaacaaatttcttggctggatttgaagcttaaactcctgtggattcacatcaaataccagttcagttttgtcattgttctagtaaattagttccatttgtaaaagggttactctcatactccttatgtcagaaatcacatgaaaaaagcgtcctaatgccaaaaaaaaaaaaccgggccatttgcggggcgggaaagggtctgaaggcgccaggcatgtgttccgccccttttgacacgggaatccggccctagggc

SEQ ID NO: 196883 - DNA, 665 bp, Homo sapiens
agcggaacaaccaaagccttttaggctgttacttaggaaggatctgagggtttcgatcagaggaatgataatatctgatttatattgtaacaatttaatataagagaggagtgcagttatttaaatttgttttgttacattgatagtcatataatcagctcttagttgctttaagctgacaggagaagggatgcttctaaaataaccataacctagcatttacttgtatttggtttagaagaatgtgattacgttcttgagtttttatttagattctcatcaaagaactgacctgtatatagtgtgtgaggtactctcaaagtatatgtagagtagatgctaatcactgtcactagaactcttccttccacctccaaaaatacaagtgataaagtaatgtggcttatataatcagttgtttttagtccactatatttaaagtcatttagatcatatcttattttccgccattgccgaaaacacaaactagctaaattgtcttcctttataagtgtgttccacatttattctcacttcctagcctttgctagttcagtctttctccctggaatgtcttcgtctgcacgtctctacccagctttcatctttctgtgcctagcctggcttctgactctgttatgacacttgcccttgcttgttagctc

SEQ ID NO: 196884 - DNA, 531 bp, Homo sapiens
aggattgggaaaaatacatgcacctgtcttttaaggatattcctatatcttagaagaaatgggtccacttgtgtctctgatttcttgcacatgagtctggttttcatgggtccaaactgatattccacctagtccaagaggactgactagttttgttagtgcctgtcagattaggtgctaattctagccttaattacaattaggaattacggtaattccaattaggcattgtgctaagcagcttgccatagatggaaacatttaatgcctatcagccatctttgaaatgaaatcactcattataaataaggaagtggggttccaacacatcaaacaatatttcataacaggacttcatattcaaagcacctgattccaatagtggttctgttacttatgaactgtgtcaccttggacaaatcacttaatatccctgtcctcctaacacatctgacaatggacataatcatagtacctactgcaaagagttattatgaggattaaatgatttaatataaggatttaaatatg

SEQ ID NO: 196885 - DNA, 899 bp, Homo sapiens
gttttgccattgaatttaatggcaaaaaatgcaattgcttttgcaccaacctaatagtttcctttacttgtgatattttaaacattgttcttgttatttcttgaatatgtaaatgagtataactgaaaatatacaaggatgtatagaaacaaaaaatggatttagaataaatatcttaattaattgcacaggcaccaacaagaatttacacattcaacatttattctagcattaagattggcagaagacagcttcatcatctttctgttttttgagatggagtctccctctgttgccaggctggagtgcagtggcatgatctcggcttactgcaacctctgcttcctgggttcaagcgattctcctgcctcagcctcctgagtagctgggattacaggcacatgccaccaagcccagcgaatttttgtatttttggtagagacagggtttcatcatgttggccaggctggtttcaaactcctgagctcgtgattcgcccgcctcagccttccaaagtgctgggattacatgtgtgagccaccacacccggcccatcatctgtctttaaaactattttttttaaatactgttttcacattttttaaatttttacatttttcaccttttcttcagattttcacagagcatatattgtatcataagactggtatcagaaaggattattttttcctctcaacctttttaccttcaaggaactgaaataactagactttatatattttcctttttactgtgcaatttttgctacatagtactaaatgcattcattattgttcaaatgaatataagctatatttaagagcaatttctaaatatgttatttcaagcagagattaattttaaataagaaaacctgacctaggttttctattttcttt

SEQ ID NO: 196886 - DNA, 901 bp, Homo sapiens
cgccgcccaagatgccgaaaggaaagaaggccaagggaaagaaggtggctccggccccagctgtcgtgaagaagcaggaggctaagaaagtggtgaatcccctgtttgagaaaaggcctaagaattttggcattggacaggacatccagcccaaaagagacctcacccgctttgtgaaatggccccgctatatcaggttgcagcggcagagagccatcctctataagcggctgaaagtgcctcctgcgattaaccagttcacccaggccctggaccgccaaacagctactcagctgcttaagctggcccacaagtacagaccagagacaaagcaagagaagaagcagagactgttggcccgggccgagaagaaggctgctggcaaaggggacgtcccaacgaagagaccacctgtccttcgagcaggagttaacaccgtcaccaccttggtggagaacaagaaagctcagctggtggtgattgcacacgacgtggatcccatcgagctggttgtcttcttgcctgccctgtgtcgtaaaatgggggtcccttactgcattatcaagggaaaggcaagactgggacgtctagtccacaggaagacctgcaccactgtcgccttcacacaggtgaactcggaagacaaaggcgctttggctaagctggtggaagctatcaggaccaattacaatgacagatacgatgagatccgccgtcactggggtggcaatgtcctggggtcctaagtctgtggctcgtatcgccaagctcgaaaaaggcaaaggctaaagaacttgccacttaaactgggttaaatgtacactgttgaagtttcctgtacattaaaattattgacataataccaaattttccttcaaaaaaaaatggcaagcccaggtca

SEQ ID NO: 196887 - DNA, 461 bp, Homo sapiens
tcatcataaaagatttcacacaaactattgtaaaattctgtcattcaccatgtctaaattattagaattattacctaaaagaattcaaggacatgaatctagactgaaatgataaaaacttagatgttaaactttttgtctctgaaaatgtgcctacttgagtgcagttttgcttgagtgaaaaaaacctaatgaccctttagattttatagtagtgctattttttactttatgtcagaatccctttgaataaggtaattctaaagcagtgattctcagctagggtaataatttgtttaaaagcaaacaacacgttataccacttttcttatttgcttttagtaatatttattgttgaattttcatataacactactaaaggaagacctgggatatttttaaatactctttttggaaatttttatttgaattaaattagttatatttcagtgggctttgga

SEQ ID NO: 196888 - DNA, 686 bp, Homo sapiens
tgcagtgtttgtctttatgtgtttagcatatttcactcagcataatgtcctccaggctctgatgggcacttggcttgtttccatgtcttggctattgtgaatagtgccgcaatgaacatgggcaaattgccgtgttgagttaaggaagctcttttccagtctgagtttgcaaatagcttttcatatatgagcgttgaatattatcaaatgcttttctgcattcactgagatgactttatgtatttaaaaaaatctgatggcctatattttctatttctaaactactcgtgtattcctggtataaataactcagtgtgttactctcgtttttatcatagctggattcgttttcactatattttgtttgagattctgcctcgtgatcatgtatgtgattgctctgtaacttttcattcacattttgtccttgtcctgtcctggtatcaaagttatattggctttcatagaatgagggaaatgtttatccctctaaaaatatttagtagagtggtctaagatgagagtgtaagtgagtaaactttctcaatcaaatattttgtgatatgtttcaggaatttcattacatgtttgggtcaatttttaaagcatttctttttattatttaaaacttttagcattggtgaccatccatgtgctgcttttattgccagcttaacttgttttta

SEQ ID NO: 196889 - DNA, 413 bp, Homo sapiens
tgcagcatctcccgccatgacctccagcctgtagaggagaggcgccacaggacctttacaggcacgccgctgttcccctcacccatgcatttcttaatgccttggtgaggagaatgcctctgggtcttccttggtgggagctaaaggaacaaaggtaaataatgctatgggacccactgagaattggggctgtggaagagtggccactgaagtaatagacagatgcagctattgccagatactcagtgccagagcagggagggagagggaagaaatacggacctcaccttcctctcacttccaggctccatcgggtgcccacattgctaaacctaactagaagtgtgcacacaggggagccagggatgcattctagaagggacaagccccaagtggcgtaagacaggatggaa

SEQ ID NO: 196890 - DNA, 423 bp, Homo sapiens
gtcctatcatattcatttgtataatcaaacctatgtgcatatagattacacttaactgaatttttttttaaggactgttacaaagaaaaattgtcaggtcccaccttagactgaatctgaaactctgcgggggggtggagcccagcaatctacttgtaacaagctgcttaaatttgagaattattgcctgtaatcccagctctttgggaggactaagtgagtggatcacctgaggtcaggagtttgagaccagcctggccaacatggtgaaaccctgttctctattaaaaatacaaaaattagccgggcatggtggcaggcacctgtaatcccagctactcaggaggctgatgcacgagaattgcttgaacccagaggtggaggttacagtgagccgagatccagcactgagccacccagcct

SEQ ID NO: 196891 - DNA, 207 bp, Homo sapiens
accgtcaaaagcctttgtggttgggtactatcattatcatcttttaggaaacaagttgatatagattagttggtttacctgaagtcctggagttaggtggcagagttgagatttaaatccagatgtttaagactccatagtctatgctgttaactttaatgctacatttgtaatttagcaaaggaataaaatttggtggtcacataa

SEQ ID NO: 196892 - DNA, 405 bp, Homo sapiens
ggaatgttttctacagagcattgaacacatttaagaatctgaaaggataagatttagaaaggaaggaacaatgttgtctccaaattatgaaagttaaaatgagtctgtctatggatgatgccaggtaattatccttctaccttataaaagttgtcaacagacaattagctatgtaagtaattttcccctcattcctttcttgttgaacagtttctgaaagagaagcactctattgtcatttccttaatgcacatttattttctaagcgtctgctttcaggcttcttctatgtgttcctaagaaattgctctcatagtgattatcaccacctccttattactaagtccagtggaaccttcttgttctggtcttacttgatgtctctctatagttgaatgctccata

SEQ ID NO: 196893 - DNA, 512 bp, Homo sapiens
ccagaggagtttaggatgggccccaggtcatgtagctggagagtggcagagccaaggtgtgaatcccgcacctggctctggagccctgttctcagccaccgtgctgggcagcccacacctggcatcctctctgttaggagcaggggcctgcccccacgccctctctgacattgctattcttgctaaaatgaagagacagagctgaggggagagctaaaaagaatgaatctggactggcatcagaaacatgctgcttcccaccagcgagttttgtgcttcactcttgggcccagggcctgcagggtgtgctgtgacctcatctgaagaagcacccacacgggcaggccctgaggggctgcagcagagccacctcgatgcctctcgagccccacccggccctacttatgccttccatctgcaccaacaccgatgagaagcttgcacctccccagtcttccctggttttgctcgtagctggctggctggatccctgcatggattgcccttggaca

SEQ ID NO: 196894 - DNA, 109 bp, Homo sapiens
ggatacaaatttcagttagataggaggaataagtttaagagatctattgcaaaacatggtagccaaggttaataacaatgtattgtattgaaaattgctaagatagtag

SEQ ID NO: 196895 - DNA, 470 bp, Homo sapiens
caagcatttgttgattctgtgagtcaggatgcagacaggatgaaacagggatggcttgtctctgctatctttatgtgtgccacagctgggaaggagctgaaagccagggactgcaacagttgtaactggagagtctacttccaagatggtttcttcattcacatttctgacaccttgatgggaatgactaggtgcgtgggacttgtcagctggagaggctacaggtagccttcccagcatgacagcctcagggtatttaaagttcttacataagtggttcagtgtctagtaggctgcatggcctcatatgatctagccttgaagttgcctggcatcccttctctgttggaagcagtcataaacccacccatatccaaggaaaaggggacataggtttcaccttgtgatgggaagtcaaaaaaatttgcagccatgttctaaaaccaacataaactagcaagaagaatgat

SEQ ID NO: 196896 - DNA, 408 bp, Homo sapiens
ctagcccacagaggggtgccatcgattaatcagctgcatgaatgtgcaaagtcatgattcggaagagctgaattcaagctgtggctctccaaaatacttacttagcactgtggaacctgggctaagttgacgagcctttctaattctcttgaagttggtggggttaagacaagttccctacctaacagagttcttatgaggtccatgagacaatggactgaaagggcagttgtgaactcacctgtgggctgctagttagcagattcacttcacaaatgtctgttgagcttttgtccttccaagcatgcttctcaggtctggtgatactgtagtgagcaaaacatttacaaatccctgtctttgtggggcttagtcctaagaggaagaacatacagtaaactaataaat

SEQ ID NO: 196897 - DNA, 303 bp, Homo sapiens
aaaaagccccaggtacagtcttaactttgattgatgggagtaagaccccttcttttatgggacttctttggctcaacaaataaaaaatgtagtcacagtcctagatcccacattgggccagtctagtcttccgttcattcatgcgtgcattcaagcttttatttactatctatgatagaggagtcatgtgggacagtaagtgagaatcaagggaagaaaggggtgattaacacaaatcagtgattgcagccataagacaactcaaagttcccagtccggctcagatgtgtcaatagcggtatc

SEQ ID NO: 196898 - DNA, 401 bp, Homo sapiens
aaaaaaaaaaaaaaaaaacagaacaagaaagaactcagggattggcagagtgagaatacattatgagtaaagacaggaactgacaggatgcatccatgggaaagtgaattaaccatcctgggtaaagttagggaagattgacattaggaaagagtcaaagagaagacaggaaaagaaagatggagtgcgaagaccctgaatatcagtctattaactgtgaactatattctgcaagcactggggactaattttatgtattaccatttatataacaattagccatcaacaatatatgtgattccctaacgttcttgaagcagctcaaccttataccttaagtttctacagggcaacaatcagagtaaaaaatattctgtgtatacaacatggatctgtaggca

SEQ ID NO: 196899 - DNA, 737 bp, Homo sapiens
cttaaatctccttaatcaatctccactagcttccaacttttcttctgcagcttcctcacccctctctgcctttacagaattgaagagttagggccttgcttctagattaggttttggcataagggaatgttgtgactggtctgattgtctacccagaccactcaaactttctccatatcagcaataaggctgtttattttcttatcattcatgtgtccactggagtagcacttttaatttccttcaaaaacttttcctttgctttcatgatttggttgtttgctgcgagagatctagcttgcgacccatttcagcttctgacgtgccttcctaactaagcttcaacatttccagtttttgatataaagtgagagatgtgtaactcttcctttcacttgaacacttagaagctattatagggttattaattggcctatcatatggtttgaatatgttttccctccaaatctcatgttgaaatgtggtctccagtgttgatggtggggcctagtgagaggtgtctggatcatgggggtgtacccctcatgaatggcttggtgccatccccttggtgataagtgagctcttgctctgagttcacacgagtaaaactccctgagccctccctagaagtccagcagatggtggcaccaggcttgtacagcctgaagaactgtgagccaattaaacatcttttctttataaattacccagcctcaggtatttctttatagcaa

SEQ ID NO: 196900 - DNA, 341 bp, Homo sapiens
ccctgctgtacccggcagcagctctgagccagtcctgagctccttctcctaagaacacccttcatgtggcctccatacccagctcaactggggtagtactgccccgtctagggtgctttttaagatacagaagagctggctggctggacatggtggctcatgcctgtaaacccaacacgttaggaggctaaggtgggaggatcacttgaggccaggagtttgagaccagcctgggcaacatagtgacatcctgtctctacaaaaattaaaaaattagccagggctgagagcaatggctgaagcctgtaataccaacattttgggaggccaaggtggacaga

SEQ ID NO: 196901 - DNA, 119 bp, Homo sapiens
agttccagccctgagtccccatggttttctccctaggctaagatagagaggaagaacatgaaatatgcagaaagcattctcttaagcaaacgtgtataatttgcctaaattgtaattat

SEQ ID NO: 196902 - DNA, 258 bp, Homo sapiens
tgctgctgaggctctggggcaggaatgagtgtagaatgttagggaactgaaagaagaccagagtggctggagtattgggagtgagtagtaagggatgtagtggaaaaagtggtaaggggccttgaagactttgataaaggtgtttgttttaatccaggagaaataggcagccatgggagggttttaagcagtggatgcaagactctggtaaggatttgtgtttttaaaagatcactttggctattgtgtggagaacag

SEQ ID NO: 196903 - DNA, 391 bp, Homo sapiens
gactggttttggattagccataaattttgattatccaaatctgtcttctgcccctttctaatctacatagaaaaaaaagctcaaatagcctatatgtggcaaatatatctactcataagaattttgcttaaatttgccttaaaaattctggaacaataatttaaaactgaattagtaacacaaatatggatgctctaccttaaaggctgtcagaaattcaataattaattctcctaattaaggtgataatgagaaatcaggttcattatagttgaattccgaaatgcctgaccccaacataagcatcctgtacactgagcaatgaaaaaggagagtccttttcacatgatagtgatttttaaccaagaagaacattacaagcacctgttga

SEQ ID NO: 196904 - DNA, 458 bp, Homo sapiens
agtcatcttgggtatctgagagtcttcctcatccagtgaagttcctccgtacagcgtttagaggcctttcctcttgctttgcccttctttggcatctgcatgtggattatttacttgctcatttgttcctggtgtctttgcattacctactctttctccagccaggaataataaacaccttattgacagattgacttctgattctctgtgtcctccttgtcaggttgatatcctgccatcccagaaggcactgtgtagatgtttgctaaatagatggttgaatagaagaggacttaatttttgctaaccgaccagattgatttaatttgttggtgttccaatccagccactttgaatatcaaggctttcttgcttaatatccttttaggcaacattataactgttcatgtttctatataaagatttctaaattggagggtttctcatccgaaaatagt

SEQ ID NO: 196905 - DNA, 934 bp, Homo sapiens
agggcctcttgagtcatcactggtcttaagaagaagagtgaatcagtcaacattattttgactgcaagtaacagaaactcacaccaaactggcttaactagaaaaagagatttatgggttatataactctaagattgtagagagggctggcctcaggtctggttggatccagggactccaacaatattaggaatccttccccatttctcacctccacttttctttacagcagctttattcacaggtgcaaagcaaagatacctcctagcagccctaggctcacatccaccagcttagccacctcagcagaaagagtgctgttttttccagttgtcccagaagtgtttcagagctgagtctcattggactattcacatgccagtcttggggcctggggtaggggtggaaagggcagactggccaagcccgaggctcatgcccaaccctagagagggtgagtggtgccagctcaacttgaaacggatggaggttggggaggtgctttcctgaactgggtgggtgtggctgccagcaggaggcagggataccaggtgggcagcgccaccaaacactcattgccaagaggctgcagctgtgacccggctcctctcttggacccaccttgcaggctgggcccacagagcaattcttccagttcctaatgaacagaagccccagagtgctgacagtttaggaagtaagtgtacgtattttcccagttggcacaagtgactttgtaggccaaaaatgctcaaatattgatttcctaaggttcatctaaaaacatgctattaagagctttggtcttaggccaggcttggtggctcatgcctgtgatcccagcactttgggaggctgaggcaggcggatcacctgaggtcgggagtttgagaccagccaggccaatatggtgaaaccccatctttactaaaaa

SEQ ID NO: 196906 - DNA, 338 bp, Homo sapiens
aactgtgagtcagttaaacctctttcctttataaattacccagtctcaggtatgtctttattagcagcttgagaatggactaacgcacaaagcataggagttaataatcataaccttggatttggcaatggcttctaagataagacatcaaaagcatgactaagacagaaaaataaataaaccagacttccgcaaaataaaaaaaaaaaacttttctgcatccaaggacatcaagaaagtaaaacaataacctacaaaatggggaaaaatatttgcacaaagtatttctgataagggtttgatatttagactatataaagagctcctaatgcttagtt

SEQ ID NO: 196907 - DNA, 396 bp, Homo sapiens
atggtatctgaaagattaattcataagcagaatggagatctgctgcaagcagccaaatgtgatagcgaaggaacagggccgcctgctaagggatgccccttcaggcataggcagtattttcctgtcagcatctgagcttgaggatggtagtgaggaaatgggccaggacgcgctcagctccagtcccagagagctcctctctaactcagagcaactgaactgagacagaggaggaaaacagagcatcagaagcctgcaggtgggtacttatatgtcttctttaagaaatgtcaactttttaatgggattgtcttcttcttgttgagttgtttgagttccttgtggattcttgatactaattctttttcaggagcataatttgcaagtattttatcc

SEQ ID NO: 196908 - DNA, 458 bp, Homo sapiens
cggatctttaagaaacaatcagtcttgcggcaggcgcggtggtgctcagcacagttctaaggcagacttttttatcctcattttacagtcaaggtagtggaggcagagagggaaactggcttctccaagaacaataactaaggtggtgggtggatccaggttgccaacccagacaacctgttgagctgcctctaaccctacactgagttaaatgtttgctcagtgaatggatgcgagaaccctgtaaacccaatgtaaggaattcttactgctgtggcaaatatctaactgtggtctcctaacagaagatgctctcctctggagccagccagccagcctggcagatggaatttctggatacccttccaaggagcagcagctgtggctttctctcccacctgcaccattctccccattacctgccacataaacacacttttttcctaatgaccaagggt

SEQ ID NO: 196909 - DNA, 441 bp, Homo sapiens
tcattagttgatgggcacgtaggttggttcctaagtgaattgtgaattgtgctgctgtaaatatatctgtacaagtgtctttttcatatgtcttctttatccaaagaaacctttatacaaaggtttactttgtataaccattatatagttgtcccttgatatccttgggggactggttctaggaccctcctggatgccaaaattcatagattcccaagtgtcttaaataaaatggggtgatattttcatataacctatgcatgttatctcatatacttttaatcatctctgggttacttttaaaaatgtaaatgctatgtaaataggtgttatactgtattggtttttcatttgtattatttttgtattcttttttattgtttgtttgctttttcccaaatattttctatctatggtttgttgaatctgaggatgtggaac

SEQ ID NO: 196910 - DNA, 465 bp, Homo sapiens
aagccggctcctcttgcactcacttcctttgtgtctctctctctctttctctctctctccccctcaccaatctctttcttccctccttgtccgattctctgctgtagcttccagtggagaaaaataattattcttcaatgggttagcacggggcgcacgcacacacgcgcgcgcacacacaccccgccgaggtacccaatcaatgcacaaatcttcggggtccctttaacctctgcggatgactccgggagttaattatgaagcctatttcggcgcggcataaatatgcattaagccccccagccccggggccggcgtgcccggcccaccccgccctccgcgccccccgacggccgcggtcagccggcattccggagcagcgcgtcggagctgcaacttcgcgcctaagcgcccgcacctcgcagcccggcgggcgggagacaaaagctgcggcgccgccgccgg

SEQ ID NO: 196911 - DNA, 255 bp, Homo sapiens
ttgttctgtcgcccaggctggagtgcagtggctcaatcttggctcactgcaagctctgcctcccgggttcatgccattctcctgcttcagcctcccgcgaaatatgtagtttataaaagcataacaaactcaactgcttagtgtttttcatgttttcagcaaggaatcttttataatctggtttctcctgggtagagaaacttttaagtttagcaattcttttagtctcactaggtgcttcttcttatctccaaa

SEQ ID NO: 196912 - DNA, 473 bp, Homo sapiens
agttacatttcaagtgctaaattgccatatgaaggtagtggttactgaattaaacagtgcagatctaggggcttggttaaattcaggtttaattctcttggcaagaagtgccaaaatacgtggtgctcacttcttcctattgcatcatcttatgaggcacatacatgtctggctgtcctacttttagtgttcctaataggtttaaagtgttgttaccctcactcattcattgtagttcacccatcagcctttgacttacttggtctagcagcctttgctgatcattgcctggatccactagaaggaaagaaagcctttcattataacttgtggagaataatttatttctattttatttaagcttttctctactaattagtatctaaaagggatggcagtcaggaccacagcatcaaagaaagaaaggctgcagagaaaaccatgtttgaaatggtggcattaaccaggttatg

SEQ ID NO: 196913 - DNA, 380 bp, Homo sapiens
gttcaagcgattctcctgcctcagcctcccgagcagctgggactacaggcacctgccaccacatccagctaattcttctacacttagtagagacggggtttcaccattttagccaggatggtttcaatctcttgacctcgtgatctgctcgcctcggcctcccaaagtgctgggattacaggtgtgaaccaccacgctgggcccagttggagaactcttagacatgggtactcaatacgcacggccatgtgtcattctactcccggggggacttcgggaactctcagtccacaccttgatcagttccagtgtcccagggcaaagcttcgcagtgcatcatctttgtccaaggagcctcaattcctgtgggatgtcgacgc

SEQ ID NO: 196914 - DNA, 460 bp, Homo sapiens
gtcatagagcttccagcctgtttgatgtggtgcttactagctttaatatccacaaagaacacaagcatgttgttgtcctgtcttcttcctggccaactcagtggtcaggggaacttgataatggcttgtttcctcactgccttcagtgaggaagccttatttaattgtctgtctctccccagagcctagaagaatacttggcacatagtgggtatacagtaaataattattaaatatttgaaatctgagatgaaagttaatgaatgtaggtatgggaattgtacaagggataggaagtaccttggagaacttctgtaagctccaggcatatactcaaagatgggaagagtaggaatcagcattttcaaaagtcattggggatgcccatttttttctgtactgtaggaagaagggtttgcctgatcttacaccatggttagagcttgagctctgaacaagt

SEQ ID NO: 196915 - DNA, 180 bp, Homo sapiens
tctttattttctttattcatgtggcctgctggccagaatttctttaaccaggtaattaaatgcttctcctcatagtctctctgctctctcccttctgtcctccagccctgatgtgaaaaatcaataacctcattatcagtatctgcagatgggagctgagctctcagtgcaacatctctg

SEQ ID NO: 196916 - DNA, 271 bp, Homo sapiens
aagggtaggtcagtactgagctgctactagggaaagaggggaagtgggtggaacaaaagtaagtcaaacatgaaaacccctggttttcataatttaagtgatcatgagactttcactcaaagtcagtagtttgaccatatacttgctgttacctatttacagaaccattataatgaaacaacttctacgcattcgatagacaacacttaaatgttttctgaactaaactccaaaatctaatagcaccagctctgttccaaatcactattaa

SEQ ID NO: 196917 - DNA, 521 bp, Homo sapiens
attcagatgatacctctttcaaaatgccctccctgtttgctctctctttatttactatgtgttataaactgaatgtttgtgtcccccttaaattcatatgttgaaaccctatctccatccagcgtgcccatatttgtagtaaggaagtaattaaggttatatgaggtcataagggtgaggccctgatccaacaggattagtatcctgagatagagagcttgttcttgctcttgctctctctctccctctctccccactgccccacgttctgaagaaaggccacgtgacatagtgataaggcagccatctgcaacccagaaagaaagccgttcccagaaagtgaattggctggaactttgatcttgagaaaataaatttctgttgttaaaatatccactctgtggtatttcgatatggcagcctaagcagactatgacactatcttaagtagaactttgttgttgttgttttgagatggagtcttgctctgttacccaggctagagtgcagtggggcaatct

SEQ ID NO: 196918 - DNA, 400 bp, Homo sapiens
aatccaaacatctataaatctgtggaagctcgtttcctatgaggtagacctcctatagtgctttcagagatcatgatgcaacttgggcaagataccctgaaaccataatgttttcatctactctgttttaagtatttttgcagtataaagattcctactgccaaaacccatctgtcagtttgtaagtttgtggtcacgcccttaaacatgtctttctggctttattccttaccctctgccggtctagtataaggtctctgcatactccacaactttctctgcatatatttttctgtttaaaaagcacttcacatctggccaggtgcggtgggtcacgcttgtaatcccagcactttgggaagtgggtggatcacttgaggtcaggagttcgagaccagcc

SEQ ID NO: 196919 - DNA, 842 bp, Homo sapiens
ttgtagagacagggtttcaccatgttggccaggctggtcttgagctcctgacctcaggtgatccgcctgcctcagcctcccaaagtactgggattactggcgtgcgcccatgcccagcctacattttttcataataagtccttgaaatccagtgtgtaatttacacttaaacacatatcaagtcagactgaccatgttttcagtgcacataaccagatgtgacaagtgactgcagtattgaacagcgcagttgtacacccgtgcttactctacataccctctcttgcagacactttttccctctctctttcccctctctctacctacacatactctacgtgtgtgtgtatatacatacatacatgcctacatgtacgtacatacatacacatacatacatgtatgtatatacacatacttatgtaatttttttgtgtatgtgtgttcacataattgtatttctgaactatttcagggtaagttgcatagtaatgaccctttacctctgaatgcaccagtgtgtgtttgctaagaatagggacattcttttacatatccatagtatagttatctacttcagtaaacttaacattgatacaatcctcttatctaatctattactctgttttattaacatattatccagtttattctaatttatattcatattccaattttgtcatccaataatctgttttatagcacttccccgcctccagtacaggatctagtctgggtcagttgtcatgtctctttagcctcctttaatctggaacatttccccagcctttattttactttcgtgatattgaataaacatagttctcaccacatatgctttg

SEQ ID NO: 196920 - DNA, 302 bp, Homo sapiens
ctacaagatggaatgcagacattcctcaacattctgaaagtataaattgatgagaagtgggatatggaagacaggaaaacagaggaaacagcagaggcgcttatactcgtcttacaaagcagggtgttgctagagaatggcgttattgatatggaccagaacagttcaaatacattataggcaatgtcaaagtaatcaatagaagaactaaaaatatttatatatcaaacattgggatgaagagagaggagagagggatagaataaaggtgatttttcctcatttttcttgttggtgagcca

SEQ ID NO: 196921 - DNA, 420 bp, Homo sapiens
ctgatggtttcactgctgaattcacctaaatatttaaacaaacactagtaccaattctccttaaactattccagaaaattaaggagggaatacttccaaactcattgtataaagccagcattactttgatttcaaaaccagacaaggacacagcagaaacaacaaagaaaactataagccaatattcctgatgaacgtagatgcaaaaattctcagcaagatactagcaaactgaattcaacagtaggttaagaagataattcactataatcaagtaggattcatcccagagatgcaaggatgactcaacatatgcaaatcaataaatgtgaaacaccgaaagacaaagaccatgtgatcatttcaatagatggagaaaaacatttggcaaaattcaatatcttttcatgataaaaaaaa

SEQ ID NO: 196922 - DNA, 420 bp, Homo sapiens
taagccttttcatttgccatcaaccagctgaaaaccagtcttttaaccctccatttaaaccactctccccaagtcagcaaatgaaatctaaagatggacaagagctctttattggccaggcatggtggctcacgcctgtaatcccaacaccttgggaggctgaggtgggtggatcacttgaggccaggagtttgagaccagcctagccaacatggcaaaaccccacctctaccaaaaaagcaaaacgaaaacgaaacattcaacgggcatggtggcagacacccgtaatcctagctactcgggaggctgaggcacaagaatcctaagaacccaggaagtagaagttgcaatgaaccacgatcatgccactgtacaacagagcaagactgtctcaaaaaaataataaaataatatttttaa

SEQ ID NO: 196923 - DNA, 637 bp, Homo sapiens
gctctttttagcttagctattcagcaggcatttataaagcgcccactgtatgcaaagcccagggcttgggggatccccccactcctgtcacctgcaagaagcctccctatcaatcataagagagattgtccctgaagtcccaggcgactctgccgagctggagaggtggtgaaggctgtcccagaaggaactggtcatggctttgcccgtggtgccctctcctctccctgtcccatatttgccattgccgagactgcactgtctgtccaccagcctggctttccttgcagggcgtgtgtcctgcctgctttctggctgaaggcttgagcctggccctgtcctctggcctgggctcaacttctgggacccaaggccccataagccagagtccacataggccatggccttctggtgtccctcccaaggcccctgcctctcctggctctttgctcaggccaggattgactgctcctccttcccttcagttctggggcagtaccctcacagcctctctgtgggcacccccttgggccaacactggtgggggtatggaacatcacatacactgtggtcaacagtagaggaacactctgccccagtgtgcagaacccagcccagctggggtcttctgattcag

SEQ ID NO: 196924 - DNA, 236 bp, Homo sapiens
ctgggtgttagatatatttattgctgctgggggatcattgtttctagaccctctcagcagatagagcaaggaaatatatgtgtgtttactaacatctatttttctatctttatattatgctaaatataaatttatgctgatgtctccaactctaatccagcatcacatgagttctagccgttgattttctacaacattccactccagcagtgagaaacctagctctagctctgcca

SEQ ID NO: 196925 - DNA, 364 bp, Homo sapiens
cttggctaagatgtaacttggctcttctctgaaatgatcagttctcctaaatcttctccactcgtgattgttcgtcactagaatttgtacacctcgggtttggaagttggtgagcttccttcttattccacatatttttctgctatgcttctctctagttgcctcatcattttcaggtcatcgctttggtataagactcacagcctcctccactctagatcctgctttcaacctgcaagtcactctgttctctctgtttattgatctcatgatctccaaaaacattcactttaaaccatcctctcctatgtccatgccttggattgtatcaacattgtccagaaccacttcacatctgaattat

SEQ ID NO: 196926 - DNA, 393 bp, Homo sapiens
ggcatcagccactgcgcctggccaaattcaacaaatatttatcgaaaacctatgacacttcccctacaaaaaaagacaaaacaaaacaaaaacaaaagctatgatgtgatgtgactgggcatggtgtctcacccctgtaatcctagcactttggaaggtcgaagcggcaggatggcttcaacccaggagttcgagaccagactgagcaagagagggagactgtctgtattaacaacaaacaaacaaacaaaaaactaaactaaaagaaactgtggtgtataatataaaattctggctgagcagattaagatgagcaaactacatggttgaataggggagatgaaccatgcacacaactataatacacagcaagaaggaataaacgacacatgg

SEQ ID NO: 196927 - DNA, 284 bp, Homo sapiens
cttcctcttgtacgatcaaaaaacagacagctggagtttatattttcccctcaacactcaaaaatgagcagctttgtagataagggtagtcctgatcagaaatcctactgcatttgcacaaagctatagaattagcctatcccttcctggtgcttccttctcttccttattaataaatatcgtttttgacttttttttttttttttttcagaatagagcacttttgtctacattaaaaactcattcaggctatacattctcctcaatgattttctttttctttc

SEQ ID NO: 196928 - DNA, 316 bp, Homo sapiens
ttacaggcgtgagccaccgcacctggcctaagggaagacttttaaaaaggggtgggaattgaggaattgagaaattgctagatgggaagtataaagtagtggaaagggcatttagggtaagaatagacacttaaagttgggtcagtcaagatatgctcaggacagtggtgggaatgagggtttatatgtaggagtatttgagagaatatggattactggaaaaattatgtaagccaaaattatggtcgagcctcgaatggtacactaaagttgtatgtgtgactacatagttggtaacattgtttaattgtcatat

SEQ ID NO: 196929 - DNA, 453 bp, Homo sapiens
caggattgccattcccacacaaatttgtagcagatgcattatccgaggtgaaattatagttccagtagaatttttcagacctcaaggcaagtgcaaaggaaatttctgtgtttctaaatccatttcactgtataattgaagagcttcagtctttgattggaggtgattaacttccaatgtaataatactctaaaaggcaaatgccaagagaagaatctaatagaattttataaatgcctttcaaactagtgaatatgctcaattaaaatcctatgcctgtggattgatatcagtatttggcagtaactacctctgtgaaaagacattaaaaaatcaaatatgtaaaatctcattacagatcagcattaatggattatcatttgcaatcagttttgatgatagagaacacttagctttgaacctcaattaagtgaaatgttatccacccctgaa

SEQ ID NO: 196930 - DNA, 502 bp, Homo sapiens
aactcccttaaacaccggctgagagccggcactaggctaggatggtgaggtgtgattgcgggtgagacaggccaccccttcttcgactgggtacagaagttataattggttgaatagtcccaggttgtccatcgggcccttcacaatgcaaaatataaccacttggatatacttcaggggctttaccaactctacctatgttaaattgagtgggttgaattcgccacgtggacagccagtgctgcagagaaatgatcgaaatgtccactcctgtatctaccaaacctttaaatttctttccctgaatggttgtttcacaggtcgcagagcagcctggcaattgggattagcattgtcgaaagctaataactgcagcactatatcctgagcagccaaatctgcgatcatctttcgaagagactcctgaaaccgagctataaaattaatgtatggttctcttggtccctgttttatagcactaaaggaaaggtattgttctcca

SEQ ID NO: 196931 - DNA, 342 bp, Homo sapiens
gcaggtatatgacaatccctgttgagacaaataactgccaaagctgtccctcaagtctgccatcctcatgctgattcctcacatctactcatttgaccacttggttctgtccctccattcctgtcaatatctctcattctacaaatatttcctccagcttctacttcatgccttgcactgtgtttgtgaaacaaactatagtgtgctcaccataaccaaagctgatatccaaaacagattcacactcagagtgttaattacttaataactacatcacatgtgggtactgaggcaggcataatgcagtgttaaaatggcaaaaatagacactggggactactt

SEQ ID NO: 196932 - DNA, 610 bp, Homo sapiens
ttatctgcacacctgcccttcataaagctctaatttaaatagaagattaactagttgcataaaccatacactgttgctgttatatttctcaaaaatgtagaaatacacatgcttgtgaattagtttcctattgctattgtaacaagtaaccaccaatttactgctttaaagccacacaaacttactatcttacagttctggaggtgagaagtccaaaatgcatcttatgcctcaagaggtaagcagggctgcgtggctccttctgcaggctctggggggagtctgctccctgcctctctcagctggttggaggcttcctgtattgcttggctgtggccccacatcactccaaacttcgctctgccatcacatctctgactatgaccttcctgtctcccttttgtaagaaggacccacccaactaaacctgggataaccctcccatctcaagaccattaatgtaatcacaccggctaaattccttttgccatgtaaagaaatatacaaattccagggattaggacgtggacatctcaggcgggaccattattctgcatgctacactccccaaagaatcactgacagatgattttcaagtacaatagtgatg

SEQ ID NO: 196933 - DNA, 694 bp, Homo sapiens
  misc_feature (662)..(662): n is a, c, g, or t
  misc_feature (673)..(673): n is a, c, g, or t
ggagatttcacatcgaaattcaaagtttcgtgaaacttagaattgcattggaaaccttcttggcatcaccaatattttactcatgggaaattgggtactgcagagcagaggagtggaatgtagtataaaatattagtaaagagcaagcactttgaattcaaataggtctgatttggttactgatgttgccacttcttacctgtgtgaccttgagcaacttaacttacctcttgtgttagttatctattgtcacataacaaattaacgaatttagtggcttaaaaaaacatacatttattatctcacagtttctgtgggtcaaagagttggggcatttttactggtcttccgcctagtgcctcagaaagctgcaactcacgtttaaatcaagcctgggttctcatgagaggctcagctgggaaacactccatttccaagctccctcaggttgttggcaaaattaattttctcatgcctgtagtatttatggcaacttgcatctacaaagccaccagtagagaaattgagtatgttagcaagatggagcattatgtgataaattgtaatcatgggaatgattcatcacctttgacatgttctgttggttaaaaataagtcacaggtctcactccactgaagaagaagggattataccagatacnggcccaggaancagggaagggacataagggcc

SEQ ID NO: 196934 - DNA, 775 bp, Homo sapiens
gtttttcaaaaagtcttttgaggtctgatggatgaagtaggcctaatttttaccattgtccctaatgaggaaaggaaaatggaaggctcacttgacttttttgccccagtttttccccagttactttttgcccttccctacctccttgaattggtagttatgatggtgaaagttctctcccagaatgtgtctcacagatctctttcacctctaacatcttagaggttaaaatctccttcccagttcagggcttcttcatctcctcacagctatactctacatctccacctccagatatttccctgggtttcaggccctcatttttttctaaccagaaataagcaacaagcaagatgggctttggggttgttctaccatcacttcagctgaatatgtcctaaacccctaactcatcaacttcttccacggactgcttcctttttcctggcttccctatttcttttaataatgtgattattcgtctcatgatctaggtttgacattctagtcattgtaactcctttctttttcttgaatctaataaaaaattaggtgaaaagatctaattagcggaagtctaaaattagttgaaaaatcccactgacttggcttctgaggtgctttagcatcagcctgtcatggatggcacccttggccattgccttgccacaatccctgtcacctccctggacttgcctttttgccaccatcaccccaggtggcctgctttcaaactgttcatggctccctcttatacatagcatgaggccaaact

SEQ ID NO: 196935 - DNA, 721 bp, Homo sapiens
cgtgtggatcatagcgtttacatgtggattaacatttgctaatccaaaactgaatctgtggcacatgatgagggcacaggctaaaagctagccttcatgaaagctgctgatggaaatctagctttggttaccacgacatcaacacacttactgcctttagcacgttccagaaatcctcctgggacggtgcggtggctcatatttgtaatcccagtactttgggagaccggggcgggcggatcacttgaggtcaggagttcgggaccaacctgggcaacatagggagaccgcccccgtctctacacaccactgacccccgtacccccaaaacttagccgctccagtagtcccagctacttgggaggctggggtgggaggatcacttgagaccagaagtcgaggctggggtgagctatgatcaggccactgcactccagcctgtttccaataagtgagtaaataaaccctcctgatgaagaagtagtgaaaaaaaatagtttagaacattaggatagcactacctttcccccttaagctcattatagtaaggaacagcctatttagcaatttcaacttaactgcatgtaaaacagtaatatccttggtatgttgcttccaaaactgtatttgaaacttaaatgaatttggactatttctaagcatcagaataaaggtatgtgggaagggaaaacgttgagaggtaataaaacgaaacatttgc

SEQ ID NO: 196936 - DNA, 401 bp, Homo sapiens
aatttgataaaaatatttccatgaaattttttgtgtagtgttctaaaacttgaaattagactacattagttgatagtattattagaatcttccaaatccttactaatttttatatgttcatctattgtttattttgagccgatgattaaaatcttcaactatgagtgaaagtctatttctctgtttagttctgtctgtttttacttcatgcattttgacactctgttatcagttgtataaacattgagaattataatgcattgctaatgagcttaaccttttatcattccatctctgatatttcagcttattttgaatcctactttctctggtattagccagctacatcagttttacttcctttcattttcaaccaattttatgactccatctcaaaaaaa

SEQ ID NO: 196937 - DNA, 272 bp, Homo sapiens
acttaataagaatcttaagaagtagatactgttatctatattttacagatgataaaacaaaggtttagaaagaatacattacttacccaaggtcatacatttagtgaatgataaattcacttaatttaccctaaccctgatttattattattattattattattattattattattattattttgagatggagtttcactcttgttgcagtgagttgagatcatgccactgcaatctaacctgggtgacggagcaaaactttgactcaaaac

SEQ ID NO: 196938 - DNA, 1319 bp, Homo sapiens
ttcctagtttgagtttttgtcattgttcagtattgaattttgtgaaatgcttttctgtgttgaaataatcatgttctgctttgttctgttcgtgtaatctattccatgactagattttctgatgttgagccatccttggattttcagaataaaccttagccagtcatcatttatgttattttttttttccattggtcagctgtgatgttaggataggtttgctcaatagttcaggaaattaaaatgatgaagctgagacagatttatgaatagtactgattttaatttcaaataatagatgaatggcttattagctggcttaaaatgaagatggcctatgtaagatatatcactaattttatttgagaagtcttcttaaagcacttatttttgagtagataagacaatcacatttcataattcaaattgtataaaggaatgtatacagtgatacccctcttccattcctatctcgacacctccagaaaccaatattaccagtttttttgtcctggagattttgcatatataagcaaatatatttattttctttgtccctctttaaaaaaaaaaagaacatgaattgcagtatacacgctattctgcatcctgcagtttttcttgatcttgaggaatgtatgagacaaggttcagtcagagaagtggagctactatgtgtgttaagacatatggcattcatcaaatgaattggcctttactcagttggagttgctgaagaaatgaaggtccagaagggaaaggtggagaatgagaggagtcactaaccaggctttctgaaggattagtgtggtgaacaagtcagagcttgttagggaaatctgggaaacagtcacatccagctgctgaggtgagattgcagaaaggatagtatgctttcaggaagagcgggatgtgaaatggaggagagtggggacaacctaaagctttccacatacctttgtgagtgtccatcactatcctaatcctgaaatcttcattgagtcacgtctgttgcattgttcctgccttctaaaatcttgtgcaaattcctcttggccaaatcttactcagagccatacaaggaaggggattctggaaaacagttccaagcttaactttactaacccagcacagttcagcaccaagagcatgctgtattgatatgtaaaggcagctttatccccctgcccttcttcatggggttaccttaatatatttatatctaggatttagtgtacattcgggttaataatctctatgggacggtcctcttccgaactaacatttttgtcgcgaatgagatagagtatttttggcct

SEQ ID NO: 196939 - DNA, 183 bp, Homo sapiens
ggatggatgagggttggaggggcataaaatgacagggctgagggttgtttatggaatgtttgtgtgttgtcttggtgctgtgttgacactattgagtgtctttatttttttatttatttatttatttttagagacagggtctctctctgtccctcaggctggaggtcagtgtcactatcatag

SEQ ID NO: 196940 - DNA, 412 bp, Homo sapiens
aactgatcctaagcagctgttgtcagtaggtctgttgctgatgcttccgaggaaacatttcaggaccatttatcaagggaactggtagcagtaatatggatgggcttgactcaaacaagaaaatatactgcagacaacaaggaacatagctcataagtgagatgagccctagtacagcaataaccatttcagtgtatttgctatactttccttagggcagaagagaaggaaagatactaaattggaggagggaagaatgtgtgccccacacactagtcctctggagcttatctggctccatagattttttttttttttttttttggggacttagagtctcactctgtcacccgggtgggaatacaggggccggatctgggctcacggcaccctccgcctcccaggttcaagc

SEQ ID NO: 196941 - DNA, 841 bp, Homo sapiens
atccaggagagacaaggggtggttttgaagcagggtgctagagagggaagactttccagacttaaagtagcccctgccagtgtctcctgaaagacctttggctccaggtaccctcacaggtctaatctttttgtggtttttgcatccctcttgtcttctgaataacttcaagtcacttgtcaagttctcctgccctttagttggaaaaaataaccccacaggaattattagctgtttgctttacagttcacaaagttgaatcgaggtgttttaggtggctcaggccctgatacttcatcatttaaataattggccagagctgcttagtggtggtaggagagcaatgacccccttgagaatattttagtgttttcttaggagaaatgccagctacatctacagggtaggaacagtgctttccttgtaggtgttacgctcctaatacaacattttctcttgtactttatgcaggaattggctccttgacttcatttgctttgccccggtctggtggggctccatctttgtgtctctcgcatctataaatgggttggaacagggattacagggtcaccctatagttctcccatggtttagcggtggggaaacttgctgaagtcactcagagaacccaactatttcctcctctgcctggaacaaccatgtagtggttttacttggagagttttgtatgatttggcctgctagcctgtgatgccagggggaataaaaaaccctaggcatatattgaatcattaagtgcttcttaagtttattcactcaccaaatatttattggatgcaggggcccagaagctgagcatgtggttctacctgcttgc

SEQ ID NO: 196942 - DNA, 152 bp, Homo sapiens
tttgaggaaagcaaatggcctgttgcatgctgcctcctcctacttcataaagtgactgacagctgtcaacaggcttcattcagcagctttgtattaatgttgtctggatcctctgtaacaggtttttattatcaggatataaagaatagata

SEQ ID NO: 196943 - DNA, 560 bp, Homo sapiens
tgtttaatatgcttatatagtaggtctaggcaccaaggagattttaatcgtatcctccaggccattcattttcctgtccagaatgtgttcaagctgtatctcagtggggttgggtaccatgtttcaggaaaatacgcaattgtaaatattattataaacacaacttggtaaatgcagtgggccttacccttgcaaaagtgacatagaaaaagagtgcccatgtttgaaatgtggtagttacacttgccttcttaacatgcttgtcactggaattggtagttaaataatagcttgcttatgccctgttccctttcccaaatagataagattagatacactgccttgacttccttgattttagaatagcttggctacctctctggaagtcatttcaggtatattcatagaagtggagtcagcccagttcagcaccacgtgcttaagttagtgcattgttaacctgacatgttatttttctgtttacagcaaggatacattcatttatacactgaacactttcctgtcctattggctgtgtacctgaggacttgctcacttct

SEQ ID NO: 196944 - DNA, 347 bp, Homo sapiens
gggacagggctgtctccgtcttgcgggtacctgccccttcaccaggggccttgggaggggccatcagaaatggcgtgacctgtgcagcctgtcctgggttctgtaagccagtgtaggtgctgtccctgtgaggcccgtgtgcctcccctcactgctccgagctctctggctgaggagctggggcaggagccccgggagggtctgagaagactcagagagaggtggactctttgtagctggtactaggtttgctttacagatggggaaactgaggcacagagaggttgaggcattagtagtactacatggctggctggagagccggacagtcagtgtcccagcccggg

SEQ ID NO: 196945 - DNA, 822 bp, Homo sapiens
gttgctttgttgtatggtaagtttttccaaagtacttacagcatctaccctcccaccaacagtgtacaagagttgcagttgttcgtcttaacccaaacttggtgtgtggtggatttaagctgtatgatcctgatgacaaatgttgttgactgtcttttcctgtacttagtggtcatttgtatattttcttttgtgaaatgtccgtttgaatcttttgcccaattttaattgatttgtttattaagtgacaactcaatagtaagacttcttcagatatcctggatacaaattctttgtcagatttatgtgttgcagatttttttgctagtctgtggcttgtcttttcatattcttggtggtttttgaagaacagaaatgtatggaagcccatttatcaacttttttcttttatggttcatgcttttttatgtgctagctaagaaatttttgcctaccacaaaattacgaagtttttaaaaaatggtttttcaaagaaattttgtacttttagcccttacatttaactcagtgataaattttgagttaatttgtgtatatgaaatgagaaagtaaataaatgttcatcctctcactccatggatatcaattattcccacatcatttgttgaagaagactgttatttccctattgaagtatcttgatgactttgtctaaaatcatttgaccacatatgcatagcactgtttgtatggttatgtgaataaaagaaatgaatttatataatgcctttgaaggaaactcaagatcatgtaatacttctcaagtattataataaacatttattttcataccctactgaa

SEQ ID NO: 196946 - DNA, 455 bp, Homo sapiens
ccctgttttctagggtgaggatggagagttttatcttgagctttaaattttccaaagaaatagttattcattttagatccattctattgttttatggtattcaagaaaaagataagtactaacaattcttttcctttgagaaggggtaataataatcttgaaattgtaacggagtttttcatatctttaaggtgaagttattggttgatttgttttaaattttaaatatagtgtcaaaactttgagtaaagccgttttttaggagagtgaccagatttaagtaatcatggactaagagaacctagagtctatagacagaaactcaagaactgtggttccgaatcagaataactttctactctgtttttttttcaatgtttggaaaaatatggattaattagatatgttgataaagaatgatgaagataaggtgccatagccaaattccatatggt

SEQ ID NO: 196947 - DNA, 510 bp, Homo sapiens
agaaatgaggtagctgtactgttattaatgtacccttcttcaaactacgtcctatggaaaattacatttttttttcacagatgcttagattttttgcaatagctaaaagcaaaaacctagaaagaatgaggcaatttaatccttgctgatgatgaggaaaaacattatgttaatatacacgagcattagggagtaatagtctttacatatatatatttttccttctatgagcccaagatcattcttaaattattcctcatagcaaaaatttagaactacttacataatttcagtctaggtctgctttataaaatgtagtagtcactggatctttgtccttatgatattgtggcattgttccgtaggtgtgacagtgttatggaaaaatatttgtgctaactgtttggacaggattcacaaagtgttaaactgaattctgaattacaatggcttgtgttgcgagaaagctccaggaattctctgctttttggtttctcacctctttttatt

SEQ ID NO: 196948 - DNA, 459 bp, Homo sapiens
cacacacacacacacacacacacacacacggcaggcacattacagaggaaactagcagatattaggatatgaggggggaaaatgcagatacactcagaggccaagtgcacgcacccaaataggttaggtgcatgcacagatgaaaaggcgggggcggatcacctgaggtagggagtttgagaccagcctggccaacatggggaaaccctgtctctactaaaaacacaaaaattagctgggcatggtggcacactcctgttgtcccagctacccaggaggctgaggcaggagaattgcttgaacccggaaggtggaggtttcagtgagtcaagattgcaccactgcaccccagcctgggcaacatgccaagactccatctcaaaaaaaaaaataaataaaataaaataaagcagggttagaagggataagaaaatggtgtggatactcggcgtgtgcaga

SEQ ID NO: 196949 - DNA, 362 bp, Homo sapiens
cagctaggtgtggccatccagctaagttttcatcagtgaattgtgagaggaaataatgcacgaaattttgatttcagccgggctcagtggctcacgcctatgatcccaacactttgggaggctgaagctggcaggtggatcacttgagctcaagacttcaagatcagtctgtccaacatggtgaaaccccatctctactacaaatacaaaaattagccaggcgtggtggcacacgcctgtaatcccagctactggggaggctgaggcaggagattcacttgaacccgggaggtggaggtggcagtgagccgagatcactctactgcactccagcctgggcaacaaagtgagactccatctca

SEQ ID NO: 196950 - DNA, 754 bp, Homo sapiens
accctgtgagataacaattattcaggtgagcccaatgtaatcacaaggtatttaaaaggggaaggagatggcaaaagaaaagagtcagagagaaagatgagatggcaaaagcagggttagagagatgctatgttgccagctttgaagatggaggatagagaccatgaaccatgaatgcaggcaagaagctagaaaagtgaagaaaacaaattctcccctagagcctccagaaaggaactcaaccctattgacacttgaattttagcccagtgaagcctttgttaggcttctgaactacagaactataccataataaacttttattgttttaagcaaaaaaaaaaaaaaaaaaaaaattagctgggcatggttgcacatgcctataaacctagctactcaggaagccgaggcacaagaacacttgcactcaggaggcagagattgcagtgaactgagatcacgccgttgcactccagcctgggtgacaaagtaagactgtcttaaaaaaaaaaaaaaaaaaaaaaactgggggaaggtttagaatatggttaacagagccaagagtgaaaaaaatgacaactctcagaaagcactgctgaacagggcctccatcacttctgggtatgaattaaaagatcatttctgtaatatccaacttcctagattctcaattattgccaaaaaaaaggatttaggaaataatatacacttttcccacaactatattgatacagataacacaggcccaagatga

SEQ ID NO: 196951 - DNA, 792 bp, Homo sapiens
ggttaacgtccctaaaacccgccggactttctgtaagaagtgtggcaagcaccaaccccataaagtgacacagtacaagaagggcaaggattctctgtacgcccagggaaagcggcgttatgacaggaagcagagtggctatggtgggcaaactaagccgattttccggaaaaaggctaaaactacaaagaagattgtgctaaggcttgagtgcgttgagcccaactgcagatctaagagaatgctggctattaaaagatgcaagcattttgaactggaaggaaggaaggaaggaagggtgggagggagggaaggagggagggaggaaggaaggaaggagaaagagaaagagagagagaaagggagaaagaaagggtaagaaagaaagaaagaaagaaaggaaaagaaagaaagagatagaaaactgattaagatatacatttatgattttttaaccttttggattataagttaaacttggctgaaggttttggaaaaaacctgggaagttacctaggctgggtattctagagataatggattctccgcggcggctgcagccatgggtgctgggcctgcgggggcgcggggggtgcgcgaggacctgcggggcggggcgggagagaaggctgcgggaccggcctagacactgagccgcgggggatccccaacggctctgcgaggccctgcgagcgcagggaggcgccacgaggagccgggagcggggcacttcaggggggcccgctcgccgccggcggcgaagaacctggggcccatattggggcgcgggac

SEQ ID NO: 196952 - DNA, 108 bp, Homo sapiens
tccagagtttcacggcagcacgagaacttgctctcaagaagttttctctctactgaaatgtagcataaactctgcagcaggccctaggctatttgaaaagtattgtct

SEQ ID NO: 196953 - DNA, 691 bp, Homo sapiens
agatgatttagggtatctgatggaagaaattctaagcagtaaagcatacaagacatgacttgggtgctgttaaaggcattcagttttaaaagggaaacagagcttaaaagttgtcagggtaggacgtggtgaaattgtgcactttttgagcttgtccagagagataataatcagcagtccatagcgccaacaagaccatttacgggaagaggaaaaatggcatagattcaggaaggagcagaggggtgggtaccagtagcatactggactccagacaccaaaaggtgagagttgtgtggagcctgagctcttcatttcaaaagtagatctttttcttttcaagtgatattttgtcactatgcaaatatccagttatctatcaactcttaacataatagttttagtatgattatctttgcctgaattatttcattaggagttgaaaatggtcatatttctaattctgttattagttctatttccattatttggcattcttctgaaaagacaggtttcccctcatgaactggtactgttgatttctctgaaatacagttcctactgaaaagagagggtagatttttaaaaatacttttgggttaattattcattctctaagtaagcagttggtgtaataatcacctcaaatggtgggaaatgagtatgaaagcctggtccctagtcaatgata

SEQ ID NO: 196954 - DNA, 520 bp, Homo sapiens
atagatagcccagaaatacactctcacgtatttgtcaaacgatcttcaacgagccagccaagactactcaatggggaaaagataagtctcttcaacaaacagtgttgggaaaactggacatccacgtacaaaagaatgaagctagattctaattaacaccatacacaagaattaactcaatatggattaaagtcctgaatgtaagacctaaaactaaaactccaggaagaaaacataaattaaagtttcatgaaattggaattggcaatcatttcttggctatgacaccaaaagcacaggtaacaagagcaaaattagacaaatgagatgacatatgtcaaattcatctaatcaaaaacttatgcacaccaacaactaagcgaaaagggagccagaatgggagaaaatggtcataagtcatatgtctgataacagtttaacattcaaaatacataaggaactcctacaacataaaaacaaaaacacaaaaatcaaaaataagcaaaggatgtgcacagac

SEQ ID NO: 196955 - DNA, 423 bp, Homo sapiens
aatttgaccatttcaagaaacaatgacaccaacagcacaccaccagtgcttgctgagtctccactgccatccacgtgccacagtctgcatctgcagctgccacagcagggatgctcccaaagtgtggcctctgagcagttcctccacaccctaggcagcagggtctccacatctgaatactgagatgcaagttctcctggcaaacaacttgcttttcatttcctttttcactgtcataaaaagggtatatggatttttttaaataacatgtgtaattaggatatgttattcacaaatttcattttaggattgtaaaggtggcaaatacacatgaaatagccagatggattcctggaatagtggaagcttagtgaaaatgctattttttttttttttttttttttgagatggagtctcgctctg

SEQ ID NO: 196956 - DNA, 376 bp, Homo sapiens
acgccttgctaatttaaaaaattgtagagacggggttttgccatgttgcccaggctagtcttgaactgttggcctcaagcaatcctcctgcctcagcctcctaaagtgctggtattacaggtgtgaaccgctgtatccagcctctttttcaactaacatcttatctgaggtataatatccgtatgcaaaaatacaaaaattccaaatatctaactcaagaatttttacaaagtgagcacacctgtgtaactagaacactggtcaagaaagagaacattcccagcaacccagagtatctcttgtgttcctttccgatggctttccaaaaataaccattgttctcacttctaacatcacagattattttgcctgtttt

SEQ ID NO: 196957 - DNA, 775 bp, Homo sapiens
ggagcggaggcacgctggccgccgcaggcacaggcgcagagtccactgcgcgggggcgggaccggggagctagctgcagactccacgttttgcaaagatcggttttgcctcagagtcaacaaactcttcagattggttccggtgtgtcctatgtttacaagtcagtggaaattaagcacaacacatataaattgaaaagtcaaataaggaaatgaattacctcccttgacggctctaattttacttggctaaagccaatttttaggttggcttgggcagaaaagtgaaaagagaatgctccactttaaccgatgtcatcatctgaaaaagataacacagaaatgtttttctagtatacatgttaaaacggataaacatgcacagcgatttctttcaagaacctttgcacttgcggaattgaggaagtcatggtattcaacccactctcttgttggagacaaaaatattatcctgatgggacctcctggtgctgggaaaacaacagtaggcagaataataggtcagaaactaggttgttgtgtcatagatgtggatgatgatatccttgaaaaaacctggaatatgagtgtgtctgaaaaattacaggatgttggtaatgagcaatttttagaagaggaaggaaaagctgtgttaaacttctctgcatctggaagtgtgatttcccttactgggtccaatccaatgcatgatgctagcatgtggcatctgaagaaaaatggaataattgtatacctggatgtacctctactagatc

SEQ ID NO: 196958 - DNA, 765 bp, Homo sapiens
ttagcggctcgtggacactgctcccccatttcctttcatttcccccgtcttctcagtgagatttccttgactccacgttttgcaaagatcggttttgcctcagagtcaacaaactcttcagattggttccggtgtgtcctatgtttacaagtcagtggaaattaagcacaacacatataaattgaaaagtcaaataaggaaatgaattacctcccttgacggctctaattttacttggctaaagccaatttttaggttggcttgggcagaaaagtgaaaagagaatgctccactttaaccgatgtcatcatctgaaaaagataacacagaaatgtttttctagtatacatgttaaaacggataaacatgcacagcgatttctttcaagaacctttgcacttgcggaattgaggaagtcatggtattcaacccactctcttgttggagacaaaaatattatcctgatgggacctcctggtgctgggaaaacaacagtaggcagaataataggtcagaaactaggttgttgtgtcatagatgtggatgatgatatccttgaaaaaacctggaatatgagtgtgtctgaaaaattacaggatgttggtaatgagcaatttttagaagaggaaggaaaagctgtgttaaacttctctgcatctggaagtgtgatttcccttactgggtccaatccaatgcatgatgctagcatgtggcatctgaagaaaaatggaataattgtatacctggatgtacctctactagatc

SEQ ID NO: 196959 - DNA, 313 bp, Homo sapiens
ggcgtgagccccttgactggcccactattgaagtcacagtaccaaattcaagatttagctagcattcctcctgagtcagtgagaaattggatcagttacatgttgctcagccaggtctgagaatcctggggccttggcacaatagctttcaaaatactacattgactcagcaagaactctgaccatgaacagacttcctctcctggttctaaaagtctgatctggagaaatcagaataaatgtagtccttcccagagaaggtcttgtcaatcaatgactatcactgtactactgcagtgagacgccaatcatt

SEQ ID NO: 196960 - DNA, 484 bp, Homo sapiens
agccaagattgcaccactgcactcctacctggatgacagagcaagactccgtctcaaaaaaaaaaaaaaaaaaaaaaaaaaaaactggagacttcatcagcctctgaaggaatgatacctgaaattgatcttgtaatgcagaaagtggctatatgttatccagaagagtaacagataccccaaatacacttgctaacacaagaaatcctgtgaaggtgcttagacatacccttccatagattttagatgggttatctgcctatgttccagacacaagccgatatgttgtggtttgcccagtacagtctctgtggtttactgagaggaagtggttcttgtgggtgaaggtctgatcttttcagagattgttggtggcatatgcactgtcagcctatttcctgttttattggctgtttagcaagaccttcttagggcaagtgctgctgaagaggtatttaaatattttgtattggcaggatagatg

SEQ ID NO: 196961 - DNA, 545 bp, Homo sapiens
tctttcccaagttccctcaactcacattttatgtcctcctgttgccctgccatctcttttctgagttcttaccattcctgctttgtaatcttctcttgtagaactatttacaagctttactcaagtctaaaaaatagatggtgaaatgctgggtcacaattttcatctgttctgtagcaacacttcactaatgactgttctttgtgtttgggaagttttgctgccatatcagcttcttttttattttgcgtaacagaataaactgaattttcctgaagcagctatttacatagattcctgggagtgggaaaggaaggaaataacaggcttcacagtccaaagactctctactcctttgacgctttaaataataaagggagtgtgtgctcttctgctgccctgcgaccagtgccctgtgcattgccttctcctgtatcccctaatctaactcatctctttatttcactcaacctcagagccgccaccaaaatgcagatttttgtaaaaacccttatggggaagaccatcaccctccagattgaacc

SEQ ID NO: 196962 - DNA, 546 bp, Homo sapiens
gggcattcagattcttctagagaatgagttgttttgcttttggcagaaaggacagctgcagtgagctgagataaagagcatggagctctgactttgatgcgtttcaagcactgggtgcaagaaaaaattaagcaatgttcatttttcctctttgtgctttgcctttgtttttgttttctttcgtaattttggaaagggttgtcacaaaaacagtgctgggtatgtgaaaatcttctcagtgctattggcagctgatgactcttgtgtaggtgtctttgagagggaggatctaacaaacacctttaaagtgatccctgatgaaccatctgggtcttaatactctccaaataactgttcgttattctcttttataagccattgtctgtcaaagatccagatgttttaccatttgttgaacttgtttttcaggtttatcaaataatcagagataataatagcatcaggctcttactatgacaccagcatagctggaagagaagtcatgaaatcattggaaacactagccttactgtatcttcactttca

SEQ ID NO: 196963 - DNA, 234 bp, Homo sapiens
atctgctttcagtccctgctgtttagtttagacttttctagagttttctagagttatgactggatcatacagtatgtctcctttttgtggctggcttttttgtgcatgtcagagttgggggcaggcatcctgatatgtttgagattcaaccatactgtttgctatggtttgaatgtgtccgccagagttcatgtgttggaaacttaacccccagtgcatcagagctgggtgttg

SEQ ID NO: 196964 - DNA, 381 bp, Homo sapiens
tatccaggagtgggcagggcctacacagccctggccttgtctgggatgctggggaggacaagctctggggcctgaggagccgagaggttcacctactgagaaagtgggtgaaccaggcgtggtggctcatgcccataatcccagcactttgggaggctaaggcaggcagatcacttgaggtcaggagtttgagaccagcctggccaacatggcaaaaccccacttctactaaaaatacaaaaattagctgggcgtggtgatgggcacctgtaatcccagctactcaggaagctaaggcaggagaatcgcttgaacccaggaggtggaggttgcagtgagccaagatcacaccactgggctacagagtgactccatctcaaa

SEQ ID NO: 196965 - DNA, 532 bp, Homo sapiens
gggcagcttcctgagagtgggagacttctcaaagtgagactgaaagaaggctcaggaaggtggtgttcaggagcctgtgacatgaggggcttctttctaacctatatcaatgctgctaaagttttacacttgagtgtaaaatactcccagggtacaggacttgaccatagtggagagaactggagattaatgctggacttgaagctggctgctcttcctatgaactgacaggttgtctccactgcagcatgaatgccttctagttctgcctgccacaccttggcataggcaggcaagttcatagaataatggaacacagacaaagctagatgtggaatatacatcagaagacaaattatctcaccaacaaaagaagaattcagaatcttagtattttgtggccttaaaggaataatgaaaactgggttttctcaaagtttaaaggaaagatatatggttaaagaaaataagaaatataggagatagaaagtgagctgattaatctgcgtgaagaaggagaaaaaccattagg

SEQ ID NO: 196966 - DNA, 171 bp, Homo sapiens
atgagattgacatttactgggttgggatgagcatgggaaaacagatttatgatggaaaacaaggagttcagtttgccatattaaaatgaagatatctattacaaatctaaaaatattgatgttgaataagcagctgttttctggactttagagaagactaggttggagata

SEQ ID NO: 196967 - DNA, 421 bp, Homo sapiens
caaacgagagaattttaggttctctttgtagctgtggctgggctgggacaaggacgatggacaaagttatgggggtgctaaaaacctcagtaatgaagataaatgatattctaatctaatattttaaaaaatcgaggctaggtgtggtggctcatgcctgtgattccagcattttgggaggccaaggtggacggatcaccagagttcaggagtttgagaccagcctggccaaaatggtgaaatgccatctctactaaaaacacaaaaattagctgggtgtgtggtagtgtgtgcctgtagtcccagctactctggatgctgaggcacgagaattgcttgaacctgggagtaggaggctgcagtaagctgagatcatgccactgcactccagcctgggttaacagagcaagactctgtctca

SEQ ID NO: 196968 - DNA, 409 bp, Homo sapiens
tcatatcttcccatcatcactggtctgggttagcagtccctaggcctgggtattttaggctcacagaaatgcagaggcatagctggtggcaactctggacgactgctccctccaaaagcataggttccagaggtcacagcaatgagatttcctgttggcagctgctaaaacccctgggtggtcaaaatttggagtactggaaggtagtggtggctggttttcattctaagaagcctggaaggagtaggagtggtctcaggggatcctgagcaggtgtcagaaggcaagcgtcccaaacaaaggctgaaaagttttcctaaaatatctgtccactccaagtctcacttctctctataatagggacaatgctagatgtcacattcctccaaatatcaataagcatttgaaa

SEQ ID NO: 196969 - DNA, 465 bp, Homo sapiens
tataggtcaaagtgaaaacagggttgcacaaaaatgtgaaggtacttaatgccactgacctgtacacttcatttatttatttatttagaaatgctcccagccaaactggacactttaaatcagttaaagaaggccaggcgcagtggctcaagcctgtaatcccagcactttgggaagctgaggcgggtgcatagcctgaactcaggagttcaagaccaacctgggcaacatgaggaaacctcgtctctactaaaaatacaaaaaattagccaggcatggttgtgtatgcctgtgggcccagctactcaggaggctggggtgggaggatcacttgaacctgggaggcagaggttgcaatgagccaagatggtgccactgcactccagcctgagtgacagagtgagattccatctcaaaaaataataataataattaacaaataaataataaaatggttaaaattgt

SEQ ID NO: 196970 - DNA, 420 bp, Homo sapiens
cccagaagctgcacctgtgggaaaggctatatttaatatttgtagtctcatatatcagccaaaagctgaacggagagattaacaacattcctaggtggcattattctaataagtttatttttttaattgaaaagtaatttaaatagcagatgtagaatctaatgagagcctcctctctgctgggtggtagcattcaaaatggttcagaccagctacaagtgccaatgctgtttaaaaagtctcaggtgaccaaaggcatgggttggcctcctgaagctggaaccaggtagagccacgggccaaacactctctcctctgaaccagtggagctagtggtgtcaaatactgtaattgctggtggggagagcagtcattttgatctaacgctgggacgtcggctcagttggtgggggtggtcca

SEQ ID NO: 196971 - DNA, 626 bp, Homo sapiens
gggggaggaaaagggagtggtatacttaaggggatcctaaccagcaaggtcggtcgcctgtcttaggctagactctgtcgattgatctgtaactaccattatccacaggccatgacccttttcctcttttttattttctttgtgtccccatctaacttcagggtttctgtattcattaagtcacctctttttctctttggcatctcctaccctattttgttttcagttcctactcccatcttgctcatcactccaggcgcttccttatccctctctgaccacaccgagtgtccatcccactgctaggagtgttatcacaggtggtttctaggtgccctggtgagggttcccaactcagactcaaaatgccagaagctgtgttctggctctcttgctcagtttggagtgcagtggcaccatcttgactcactgcagcctccaacttccagggctcaagccaccctccacctcagtctcttgagtagcacgggactacaggctcgtgtcaccacatccagctagtttttgtattttttgtagagacggatttttgccatatcgctcaggctggtcttgaactcctgagcttaagcaattcgcccatcttggcctcccaaaatgcaggg

SEQ ID NO: 196972 - DNA, 416 bp, Homo sapiens
ttaaatcattgataagagcaacttaataaaccttggtttcttgttgaaattctttttttattgtgccttgttttgtgtcttttctttatgagtaggtttattcgagggtgatgggaaagaatattttatctcagtgtgtctttatttatgccataggccttctcagcttggtgtgaggaagctttttttaaaattatggtaattttttagaaatagattgcatagaggtgtgtgtgtgtgagagagagagagagagattatagttaaaataaaaaatgtgattgtctgctgaactaattttcaggtagaaattaaaatggctgacttttaaaaaatttgtgtacaagttaacggagtaagaaaaccagactaaggtgcctaactttggcttttccattgactttatttagataatt

SEQ ID NO: 196973 - DNA, 394 bp, Homo sapiens
gcagaaactcaaaaaatcattagtggctactatgagcattatgagtgactatacatcaataaattgtaaaatctagaagaaatggataaattcctagacatacacagcctgccaagattgaaccatgaaggaatccaaaatctgaaaatctgaacagaccaataacaagtaatgagatagaagccataataaaaagtctcccagtaaagaaaatcctgagacccaatagcctcactgctgaattctaccaaacatttgaagaagaactgataccaaatcctactcaaactatttcaaaaaaatagaggaaaagagaatactttcaaattaattctaagaggccaatttatgaggcttctcttaccctgataccaaacccagacaaagacacatc

SEQ ID NO: 196974 - DNA, 623 bp, Homo sapiens
ctatccagaccactaaaactttctgtcagcaataagactgtttcatttcttatcattcatgtgttcactagcatagcatttttttatttcttttaagaacttttcctttgcattcacagcttggctaactgttcagcactagaggcctggctctcagcctgtcttggcttttgacatgccgtctttactgagcgtagtcatttccagcttttgatttaaagtgagagatgtgtggctctttctttcacttgaacattgagaggtccttgtagggttattaattggcctaatttcaatatcgttgtgtctcagagaatacggaggcccaaggaaagagatggggaaatagctggtcggtggagcagtcagaacacacacaacgtttattaagtgtgccatcttatatgagtgtggttcatggcacgccagatcaattacaatggtaacatcaaagatcaagaattaccaaaatgtgacgcagacacaaagtgagcacgtgctgttaaaaaaatggcactgatagatttgctcaacacagggttgccacaaaccttcaatttgtaaaaaatgtaatgtctacaaagtgcaataaaacaaggtatgcctgtaccggtgaaaggtgt

SEQ ID NO: 196975 - DNA, 541 bp, Homo sapiens
ctgtgaaattgagtaggattctctactcaaagacttctctgggaagtgtccagaattgaccacacaggtgctgacggtagaaagaacacagacccaaaaccctgatctagttgcattaactccattagccccgagttcctctgtaaaatgaagactgtggaggcaccaactagaggatttctgtgaccttctcaaactctaaaatttttggcactggactgttccactttgaagggtcaagaaagaaatctggaggttgcagaaatcagggtcaggcgcacacacacacacacacacacacacacacacacacagaaacagaagttccacaaagagagttcatcctgttatatatgatgtgctctgagactgtcttttctattgtatttctcttcatttatctaaaaactatcagggcccacaagttgatttcagaatccactctagagtggtgatgggcactttggaaaacagattagaaattggtccagaactccaaagatgtagcagattcagttagcctgctcaaggcatggttgcg

SEQ ID NO: 196976 - DNA, 224 bp, Homo sapiens
cctgtccacactgaacccatcttatctgacgtcccttctgttctaatagtagaggaactatcccttctatcctaggacagttattccattccatgctctgggctctattacctgcagtcttgctaggaatattatattaatgattattccttttatttttggacattcaacatctctccctctcaattatacatttcccattactttttaaacttgccagagtt

SEQ ID NO: 196977 - DNA, 609 bp, Homo sapiens
taatggctcagcattccaaaggcagtccaaatcctgacgtgttttgtgtagcttagaaagacacaggttctagggtatttgttttaaggtggggttgtactctccccattgcaatatttgcttccgttattgagaaattagggttaaaccagtgaaaccgatgcttcaaatgggaagatgatggggaaggagaattcagagcagtagcagagtttcttccattaacaacaggcagaatttaggagccgcaacctggcttttcttctcttacagttatctactagtttatagattatgcaaggtatccataaagtctggaatcacaagaaaatatacataatctcatcaatgacagtttatatcccaggaagtaggtcagattacaaatgaagaggtcttcaagatagaaaaatttcctgctcctccaagacctatccactgccctccatctgtagctgacccaccaggtcattttgtgatgtgaaggaagcctcccctgacctgctccaacccctctaaaaggaactcattgtcgtatctagaacttgaccctgtagagattcattaggatatgatcagtcattcatactctcatattgattattttaa

SEQ ID NO: 196978 - DNA, 315 bp, Homo sapiens
cttcttggcttttcttcctctcggaaataaacagacattagtcacatgcagaattaaacgctgctgcagaattttgtggtgtggcatgagacgctcagagctgatggaagtctagaaaggttaagccgttgtccgacctgaatcaagcaattcttttcaaacattcagtaaaatgcagccaagtaggcataatctaaaatggactatgtggaggtcctgtgggcaagactggggaggaattcctgggcagtcttcatccattttctttttcctattatggtaagctaactcaaagcttaagtcaatccatgaatc

SEQ ID NO: 196979 - DNA, 314 bp, Homo sapiens
caaaaagacatagtggatccttaaacacatattatcacataagagaaaccagtctaaaaatattggatactgtatgattccaattacatgacattcttgaattggaaaactgcagaggcagtaagaagattagtggttttcaagggttaaggggcatggaggaagggatgaacagatagagcccagagagtgataaaggtggtaaaattatgctgtaggatactgagtagaccgtgcatgtaattgtggatacatgacattattgtgaaaacctatagaacaataccatacaaagagcaaaccctaatgtaaac

SEQ ID NO: 196980 - DNA, 577 bp, Homo sapiens
ttttcgacggaagcatggcatcttgttatgtgaggctgaaggagaacctcaaccacaatcaagtggagagtcaatggctcccccagttgacaatcatccatttgctggtgatgtttgtcttccccaggggaaatcaggtttaaccaaccttcaaccaaatcatactgctgtgtaccagtgtgaagcctcaaatgtccatgggaactatccttaccaatgccaatattgatgttgtggatgtccgtccattgatacaaaccaaagatggagaaaattacgctacagtggttgggtacagtgctttcttacattgcgagttctttgcttcacctgaggcagtcgtgtcctggcagaaggtggaagaagtgaaacccctggagggcaggcggtatcatatctatgaaaatggcacattgcagatcaacagaaccaccgaagaagatgctgggtcttactcatgttgggtagaaaatgctataggaaaaactgcagtcacagccaatttggatattagaaatgctacaaaacttagagtttctcctaagaatcctcgtatccccaaattgcatatgcttga

SEQ ID NO: 196981 - DNA, 282 bp, Homo sapiens
tatctggcactagaacttatgccaagtatttgggtaacattgggcctctgggacttcctcagtgaaacttttaaaggaaggcattgaataaccttttaattttttgaatcttcacatggaacattttgtatgtcccaaatgctcctcaaacagggcaagtcacaaattcttgttttagcggccaatggttctcttaatatttggtctcgtgccatgtgactaaaatagtgggttggtcaatctagtgatggaaaaacgtaagttttaatttcttttaacttc

SEQ ID NO: 196982 - DNA, 392 bp, Homo sapiens
cagccagcccaacgcaagcggactacagggcgccaggccatcaccccaagtgggagatgaggacaccctgggctgccacccatgcagctctcgacatttcctctccacccactgctgccagcaggaccttttcctgctttctccactccaggcccacaccaccttaaacccagcagccctcagtggaaagaacactgggctggaacataagtgccctaattaaggccatgactgcacaccgagtggtcatgaggtcttgtgcacaacctgagaaggtggtcacttacctttttccaggtctcacttacaggtgtgtgcccgtgtgggtcagtggctctgctggagggaaccgcatgaccccactgaaggctcacattacctcccatggccgc

SEQ ID NO: 196983 - DNA, 230 bp, Homo sapiens
gagaatatttgtcatcagaaaggcaaactgattgtattgatgttcacaaagctcagtttccctccctggaggagtattgtccttccctgccccattgctatcgggactggacaagagatttacccagctaataaaacgtaaatggagatgaggcatgttacttctgggtagaagctatagagccagctcgtagctgatcctgttcccttttccctcaactacaatatcag

SEQ ID NO: 196984 - DNA, 390 bp, Homo sapiens
tcccagctactcaagaggctgaggcaggagaatcgcttgaacccagaaggtggaggttgcagtgagccgaagtcacaccactgcaccccagcctgagcaagagtgaaacttcgtctcaaaaaaaaaggttactttccttacagagttaaagtagaggggacttctttcatgctgcttcaggttgactggggccctttggattaattgctgcaaatctcctgttttgtttttgtttttgtttttttctttttgaaaattggcccatctctaagtatagtatgattatctagcaggagtgactccattctgttttggtcttgtctggtggcacttagtgcaggagcttagtccaaaacagtagcctcccatatattttatttagcaatataa

SEQ ID NO: 196985 - DNA, 630 bp, Homo sapiens
catcagttgaataattttttatattcttgctaatctagtcaaaatgaaaccgtttgatgctcaatgaatggctgcatacaaatatttaagacttgagagggtacaacacacccaggagacgactgtgatcactatcaagagaatagtatcaaaagaccaaagtacactccttaacaagagcccatacagaccaatctaaatcaaacaaaccaaacttctggaacttgaggcagttcaataatagctgagtctaactgatcatagcccctgttttggttttgatggcaatcaagggaccctatcttgttgcaaaatagtctgactcaaagaggtatccatcttggtagtgagcctggcaacacatgtcatagcaatctggagacacagtagaagaaacacagattggaaactttgaaaagccaagcttgccacccaccacttaggatgcctccaaaccaactgttagctgcttccgtaagcatattatattatgcattcctttccctttctcttatgggaaaggaacacataatatgtttattgccgtcccattgagggtggcaatttaatgtcgtccctctgtaaatgttcaaatggcccatcaggtagtggaaatgcaccacctaaagt

SEQ ID NO: 196986 - DNA, 218 bp, Homo sapiens
tattttaaaacttttttccaactagaaaaactgtcaaaaaccttgtgtaaatattagcctgaatccaatcccttattaataataatgaaaaatattctgaagaaaaagaattgggttatacagtgaagtactcagtgttggttctttcattatggcgactgtaatctgatttttaattggtgattgtcttttgccaccagtggttctcttcttttttc

SEQ ID NO: 196987 - DNA, 241 bp, Homo sapiens
ggctaagaagggtatccttgaaatacgaataactgctacatgaaatgctaatacttttaaaactgaaaaagctgtgaatgtgtatagggaaaaacaaagcttttgaccaaagttcaaggccaagctttgctcctaattgggctgtcatcaatttagcctgggtgggaagcattcaaatggagacagggggatgaggtgagtacacacaacagggaaaaatgttgcactgagtattggcttt

SEQ ID NO: 196988 - DNA, 427 bp, Homo sapiens
tcagatatccaacctccttcgaggggccatgtgcttcaggggaaggctggaccccagctccaggggttgggtcataatcgattcctcttttaattgattcctcttataattgattcctcttataaatggtttattcttgggcacagaacacagctctagccagtgaggtgtaagagttgagggcttgagggaaagatttctccttcccaagagaaatacaaatgaacagatggtcttgtctttttctggatgttgtcatttgtgagcataaaggcaaacaaagctaactaccaagaatagcaaaagagaagggttaaagaacatagatgaggtttttgagtcactgaattaaccaacaggcaccacctaccatcccctacccctagaccacttatgtgattataataaatgcttttaatattttaaa

SEQ ID NO: 196989 - DNA, 388 bp, Homo sapiens
aaaaagaaaaaaaaaaaaagaagagtggttggcacatagtaaacactcacatacatattagtcattgttcctctgtttccaaaggtaggaagaaagttcccaggaggtgtgcttagaatgtgggtaggcagataccactcgggtatttcctgagcacctatgccatggcacacaagtgctggggccacagttagggctcaggacaggcacggcccccacgctcttggagctgacattctagaaggcaggtggatcctagatacaacagatacatgacgtaatgttatgtagtgagaagtgctagagattgagggaggctactgttttattagaagtgaccaaggcaggcctctaaagaggttgcctttgagtcaaggcctgaaagata

SEQ ID NO: 196990 - DNA, 424 bp, Homo sapiens
ctgtggatgctgaggaagggctggtgacatgaagaggggtggcgtgacctgtggatgctgaggaagggctagtgacaggaagaggggtggtgtcacctgtggatactgaggaaaggctggtgacaggaagagaggtggcgtcacctgtggacactgaggaagcgtcggtgacaggaagaggggtggtgtcacctgtggatgctgaggaaaggctggtgacaggaagaggggtggcgtgtcctgtggatgctgaggaagtgtcggtgacaagaagaggggtggcgtgacctgtggatgctgaggaagggctggtgacaggaagaggggtggcctgacctgtggatgctgaggaagtgtcggtgacaggaagagaggtgtgctgtcagcccttacaaagggaggtacggagctcggaaatcgtaat

SEQ ID NO: 196991 - DNA, 227 bp, Homo sapiens
caaacctcacatcctccaggagaaacacaccagttgcttttaggctccctggggagtgttctgttgccacctcatcaaatcagtgaaggtggaaaaaagagtttggtgccagctaaggtgacactgaagtgtgcagcaggaaatctgaatccaacaccacatctaatgagcctattattacaggctattggcaaagcaagggaaatcgaatgctaatgaaaagcagg

SEQ ID NO: 196992 - DNA, 281 bp, Homo sapiens
ggttcaagcgattctcctgcctcagcctcctgagtagctagggttacaggcacatgccaacatgtccagctaatttttgtatttttagtagaggtgaggttttgccatgttggctaggctggtctcaaactcctgacctcaagtgatccacctgccttggcctcccaaagtgctgggattacaggcgtgagccaccgtgccctgcccacaatggttttcaacagctaaaaaaatggtggggcgggggtgactgagggagcatttacattttgtctgtatac

SEQ ID NO: 196993 - DNA, 241 bp, Homo sapiens
tatggggttgttgagagtgtgatgagagatagagactaaacaaaatattgaacaaaagagatatgaaacaacttgatattagaattataatctgtgataaaggccttaaagaaaaataagatatttctaagagaataatgaagacctactttaaaatggcctaggagtaacccaggcatccaccgacgaatgaatgaataaacaaaattggtgtacccatatgattaggatgtttctcagc

SEQ ID NO: 196994 - DNA, 421 bp, Homo sapiens
ttttcattttttgactatccttgcctcagcttgtgttcaatactcagagactctctaaacacagtaaggaaaacacacactggcagcctcaacttaatcacagtatcttaccttagtcatcctagtgggaaaagataggcgtgccggtttgttccaaaagaaaacacccaagctctaactggtccagcttaaagtagagggtagggtaactaggactgaaactttccctggaaccgtagagaaaagaaggcatggttcccaaaggaagggatgccaggaagaaaattcacatatgtccatataaacatacatatccttgacccggcagttccatttctatgatgaaaatgtggcactattattgtgtaccagacactgttttactttacatggtcaaactataatagggccgagctcgatc

SEQ ID NO: 196995 - DNA, 252 bp, Homo sapiens
ttgtgagttggaagggatgtatctaagggaattattctaaagaagatgaaagaaagcatggagagagtggacaggcagtgtttgaggaggtaaagactggtgactttccagaatggactcatccttgagatcaggaagtccccaaggaatcacacatgagaagcaaacattcattcctagtctcatttgaatgaagctgcagaacatgaacaaaaagaacaatcattaaacgaatgtttcaacgtaagccaa

SEQ ID NO: 196996 - DNA, 480 bp, Homo sapiens
tcatcactgtgctcatatagacgccatttacttattcaaccaatttttactgagctcctacaaataagatagggctcataccctccaggatctaactactggagcaatgaccttcaaacttttcagattattaaccccgatcagtaaaacaacttttgagcacacaaccacagtataggcatatttattagtcaccaaatatacatgtttactattgtaacaacatattaggcacattaaaaaatattcatgtaattgagatgagagttctatcctattcttccaacatccaattttggaaaccactagactagaggatttataggatgtggtggaaggtgctaaggagaaaggtgaacatggcacctctgagacttagagagaagagaggaatcaaatgtgggaagggctgtgagaggaagtttcaaaggaggggcatttgacctgagtctttggagatgagcaggcgatgatcaggca

SEQ ID NO: 196997 - DNA, 517 bp, Homo sapiens
tggccaacatggcgaaaccctgtctctacaaaaatacaaaaatttcccgggtgtcatggtgggtgcctgtaacaccagctactcgggaggctgagacaagagaatcgcttgaacccaggaggcagaggttgcagtgagccgatattgcaccactgcactctaacctgggcaacagagcaaggctctgtctcaaaaacaaaagagacacggttttgctcttttggccatgctggagtacagtggtgtaatcataactcactgcagcctcaacccccccaggctcacgtgatcttctcacctcagcctcacgaggagagggattacaggcatgcaccacaacaccagctaatgtttaaaaaaatttttttgtaaagatgggctgggcacggtggctcatggctgtaatctccacactttaggaggcctacacaggtggatcacctgaggtcaggaatttgagaccagcctggacaacctggtgaaaccctgtctctaccaaaaatacaaaaattagcca

SEQ ID NO: 196998 - DNA, 268 bp, Homo sapiens
aatttcaatggcttggtccagatgtagcttgtttcattcattttattcacttattgtctcattttaagtgatttgttttcagctctgggaattttcatttcttcttgtagtatttcttcttttttctcttttccaagaacttggagtaaacagatgtcattcctgcatctaagctctagtcaccaaactgttctttgatctttttgtaaaatctctctctttttttttttaattgttgtttctgagagaattatttaggtcactctta

SEQ ID NO: 196999 - DNA, 492 bp, Homo sapiens
taatgtaatatatgttaactccttaaatattaatgcaaagaagaagtatattatgtgttaaattacatcttaataacatagtgcttgaaatatatttttaaaactgcagtagtttttttttaatatataccttgtttagtattgtttttgagtactcaaacagcactcagtaaccagagttttacagctaaagacactctcagtattctaaatgcctatgattcatttcataaataagaaaatgcttatagacatttagagctttttcaaccatcatgttgaagattttataatgtttttgaattcaaaaccactaaaaatgaataaaaaaaaattatggaattggtgaattcaggtggaaagattaaaaattatatatattgtatttgcacttgactgcttgtttgatgaggttctcacttgaaaaagataattgtttagacgtaagctagcagtcatctctgttataccagattcagatagtatttagtg

SEQ ID NO: 197000 - DNA, 616 bp, Homo sapiens
gatggtcgtcctggactcacttaactctaaaatccatcttaatagtagattcactggatgtcagagtaggaagggctttatagggccttttcatccacagtgtcagatctaaatgccttcggaagccagcaagaaccgtcaatgagcgaaggcagaagcatccagccggcgctgtccagtcccgcactctaactgctggctgcatgcagcggccgaagacttggaacatggctagtgcaagctgtgaagcgctgtgagtataaaacagaaagtttctcaaagatgcagtaactgcggggatggacggtggggaccagagctatctgcaaagcaggtgtctttgtgagaagcatcagaattcaaactttaaagaaagaaacgaagactgcagaccaaattccactcgtaggtctccagattgtggctaatgatttcacacaagaacaggaagtgccccaaatggcccagctggagaatggaaagtttcaagtacaatccgaggtctctcaactcagaatagtccatcatttctactcagggaggcctgtttaaccaagccacaagcttcagcggtagctggaaggcaaactgtaaccttcagcgagggttcacctct

SEQ ID NO: 197001 - DNA, 603 bp, Homo sapiens
agatacagctaaaataattttaaattgataggaaagttcatttctaaggaatatttaacaagcaatgacttggctatcaacagaaaacaaatgtaaagcaaagctaaagattaatgtacatgagttaaaacttaagacaactatgagaaaatttctacacaaagaaattccctggtctaatctttcatacaagtttgaaatcgggaaacatccagagaccatcctcaagggtaccataaagcacatttgcaaaaatgccagaactccatatataggaaatggttttggcttaaagactagggaattactgggtgagtcattctaactgtggctcccagtaaccagactatcttaaaagggaataaagtcaaaagtaaaactaataaaatcaagattaaaaaatttatgattagcaatggtaaaagtaaataatgcagacatttgtgtaacacattagtttacaaggcactttcatttttcaaactaggaaaactaaactgagaaagttaggtggtatgtggaatcaggtcaccaagctgcaataagcaaagtaaaggaatttaactggctgttccaataccaagtctacagactcttccatta

SEQ ID NO: 197002 - DNA, 299 bp, Homo sapiens
tgcccgccgcagtactgatcattctatttccccctctattgatccccacctccaaatacctcatcaacatccgacgtaatcagccacccaatcaatgtgtctatctctaaactaacctctaataacaaatgatagccatacacaacactaaagggcgaacctgatctcttatactagtatccttaatcatttttattgccacaactaatttctctcggctcctggctctctcatttgccctgccgctcaactatctattagcctagccatggccatcaccttatgagcgggtgcagtga

SEQ ID NO: 197003 - DNA, 514 bp, Homo sapiens
aaatatcacacttcccaaatcttataactgattatgacatttcattgaatttttaaatttcagtattttatattctagaagctctgtgaaaaatataagtagtaaagaagattacctacaaattatagatatttgtaagagatagtgaaggataggaaaagttgtacgtctttgtgtatgtaattccccaaagaagacaatctatccttgactgtaggtaccctgctgtgctttcaaatgctagatcttacccattctatctacctatatttttgtatccattattcaacaaataaataatagaaataatgtctttgtaaaagtatggcgttgggtagggttgtgatgttgacatgcaggaattaaaatatttatacacccaaaccaagaatttttttataagcctagggaagaaataccttctgtttctcagtcaaaccagcctaatatgtaggcaaattcctgtatttctgaaatgttcagaagaaaaacttaataaagttcttacattgtg

SEQ ID NO: 197004 - DNA, 139 bp, Homo sapiens
cctggtggtggccctggatcgggggacagttcagattctgggtgtattttgaaagtatagctaaaagatttcctgatggattagatgtagagtaaaaaaaaaaaaaaaactcaatgtggtacatatgtatgtttgcttg

SEQ ID NO: 197005 - DNA, 497 bp, Homo sapiens
tgccttaccaacacttttccacatattgtgggaaagattatctcagatgactgcatgcatattgcttgggtaggacaatttcctactaattgccaggaacaaccaaaccctagtggtaatcatcaaagcttaggccaatcctgttacaagtacacaatgaatacgcatctaaaagacttggcgtagtgcctggtcttgacaacatgtaattaaccctagctataattctggatggcacagagtttcagtgagaagcaatttaaggaaaaacacatgctcctttaaacaattttagattttatcagtcaatgattttagaaagttaccatcatcctttataacatttaagaacatgtcaatggaaaagtcactggattcagagttgaggaactagattctggtcttgattctgctactacctatctgtgtgatgttaagtaagtaatgtcacttctatgcaccctggttttccaatttctaaagtaagggtgttgggg

SEQ ID NO: 197006 - DNA, 481 bp, Homo sapiens
gaagaaataggtttaagtggaaaaaataaaaaaattttattttggatgttaggtttgagtctaatatattagggctttgcagatcatactgcatagatggtcagcagccataacatctgcttagaagttatttcttattaggattatgtcattacattaatttttaatcatccattcttttacttttccaagctgaatgctctagttgcacctaaaattcttcagtcacaattaagatgcctataaaatctctactagccaccatctttaaaggaaacataattctgaattttacaatacaataaacttgattattcagacactgatgattttttcatctggttgtccttgacctttgcttttattaacacctcctgctctgtgcttgtaatgccagctactctgtaggctgactcaggaggatcatttgaggccaggaatttgagaccagccttggtaacataataagaccctgcctatt

SEQ ID NO: 197007 - DNA, 221 bp, Homo sapiens
gtattgtgcgaatatttttgggcatgtgtgctatgtatcttgtatgcctattataagttaatgcatcgtgtgtatatactgagtttgtgtgtattttatgtgtagaaacaatggtaaagtagcctttgtgtatcttatatgcatatgcattttgtccatgtagttttttatgtattttgcatctgagtttcaggttgtatattcgcacgtggatgtatgtt

SEQ ID NO: 197008 - DNA, 274 bp, Homo sapiens
gttcagtagctgtagtttcaaaaaagaaaaataaagtctaaccttagcctaagaattcagggatttaggttgagcacaccaaaagcacagtttgaggaagcacccagataggactgagatgctgctagtggaggcaggtgcctgtcctggctgaattgtcagaattgtggaggaggaggaggaagaagagaaacaagctctcttggagtatcctaaggatcaaagagttaaagaaaaaacaaactctagctaatgaatcaagaagttgaatgag

SEQ ID NO: 197009 - DNA, 455 bp, Homo sapiens
gagcatctggtgagtggtgagctctgaatatgtgtaagctgtcattgctgtttgaagtgtagtaaatttccagaatgctagtcactcacattcaaatagaagtacaaaatactttttcagaggcagagagatgaactgtttgtagcatttcatgtcctcataggtaactgagaattaaacagacttagtgcgtggtaccagattgtgagtcttctgttctggctgtctgaagtcttatgaaagaggggtgctgcagaagcctcactggcattctcctaacataatcattgtagtgtgtatttgcttcctagggctatacaaactgggtggcctagaacaacagacatttcttctccttcagttctggaggttagaagtccaaaatcaaggtgacagcagggccaggttccctctgagactcttagcagagtcctcccttgcctcttcctagcttc

SEQ ID NO: 197010 - DNA, 439 bp, Homo sapiens
gagttctcatctcagttattaagtttttcagctgcactcacgtccaatgggacaactcttcattttgtaaggtttttagcatccttgctcaggcttagtaaatttcagtagtgcacctcactccaggcccattaatgtgacagtgaggttcttctgagggtaactgatttgataccatctccactgagaaccactgcattgtgaaaacaccgattagcactgtattccaggaaagggttatttttggtttctttaaatcttaggcatcttggtaaaacggaacatctccacaagactaagggaagactgaggaatagagtttttgaactttatgcaacttcgtttacatcaagattcaaaatgacctaaactgtttcatgtggatgcttgaatcttttctagtacactggtggtgggcaagagggtgttggaaacaggg

SEQ ID NO: 197011 - DNA, 482 bp, Homo sapiens
gaaaacatgagaaaatttttgtaggtttgagttagatgatgatttctatataggacaataaaaatatggaacatacaaaaataaatttaatgcacttaattataatacaaatgatttactcactttaaactttgataaattagattttgttaaattcaaaagcttgtgttcttcaaagcacacagttaaggaaatggaaaggcgagtaatggactaaaaaaaatacctgtaaaacagctttggttaagaatagaagaaaaatcctaataagaaaattggtgaaagaatggtgtggaaagttcactacagaaaaaatatgaatggcaaataatcctgatttgggggagagtgttcaataccaatgctaattttttaaatgtcctgtgtttaattttttggagtttgtgatttgcaacatgcccctactgcatggagggagaggagatggtaaaatgaacagaagtaataattgtaaacataaa

SEQ ID NO: 197012 - DNA, 248 bp, Homo sapiens
tttcaaatcttcgtatgtttaaacatattcttagggaatcacttgatttttgttttttcgtgttgcatatttacctgccatttaactaggtagaaaataatatgtgatgatactttttaaatatatatttttaaattttcttatgatttagaatatgttattggattttgttttattacaaaatcagtggatgcttgatgtgacaattcaaacaacacagaggctattaaagtttatactctctgctt

SEQ ID NO: 197013 - DNA, 619 bp, Homo sapiens
caggctggtctggaactcctgacctcaggtgatccacccgccttggcttctcaaagtgttgagactacaggcgtgagccaccatgcctggcccaaaatgtttcttaacccatggttcagaattatattcaatcgacatgaaaatgatagaatggaagagttatatcaactcacctgcagtgttttattttgcatacatgtgcatgcagagattcctacacttgacaggattaaaagggaactgcatgccaggaatggttctgggtgctgggtagacattgttatataaagcagacatggtttgtacccttaaaagagatgacacctcagctgaagcgtggtaggattgattttttgcactggcacattgataacagaacttataccaaagaaggcatattaggaaaagttttgtttctcagtgtttcttattcttaaccctcaaaatcaaattcatcatgcttgcatgtcagcagctcagctaggtcagtgctgtcatgatttaatctcaggatgtttttgtttatatactgtagaatgtatacttaaacttttattctcttttcccacttttgttttaatcttttgactgtcttttcttccacttccccacagcagcc

SEQ ID NO: 197014 - DNA, 990 bp, Homo sapiens
cggccgctgtggtcaaggggcttgcggcccggccgcctcgtacgggcgtacacacgcgtgcagagcattgcgctgccccccggcgtagtgaactcgtacaatggcctgggagcccgccggccgcacccccgctccgcgaaccctcttgaagctgttcagaagccgcttgccgcggggcccactaggcggggcgggggttgggacccagcgggagccggggcagcctggctccacggcctgtactcggtttacaccgcgggcgggcgcggagggaggctgcgtttcctccgctatcagtcccgtcgcttcgggcacctccgggccccggcggctggctaatgttttgtttgaaagatcggtggaactttttaagagagtatttaaaaaaaaaaaaggaaaaaaaattcaccgggcaaccggggaagtattgtggccttggagtttgctaaatccaaatatgaaaatcaaaagctttagtattcctcatcttctcttctggaagatttgcgttagagtttttgttgggccttcaaaaagctgtgttcagagttaggagaatatatccaataaaagatggtttcgtctaccaattggggaagtttcaccctctccctatctgaagaaaaaaatcaaaaacaaatgtccccggatctttcgatgcaagtcctggaggcagggagatcactgcctgcctggcccacgctgctgggacggctcgtcctccctgctttttgtttttcaaacctcctgcttctcccaccttgggaaggagaaatgtgaaacccggcagcggccgacctaggcggtcttgtggcccggagccggcccggcccgaaaaccatagacctggttgtactgtagcttgttgtttgggggaccaaattttctagagagaactagagcacttttgttgtgtttttttgttttgtttttgttttttgccttgtcgattcccgaataaattttgtgttccttcttttaacacggact

SEQ ID NO: 197015 - DNA, 1606 bp, Homo sapiens
gcggccgccgcaccgccgcctgccccaccgcaccacggggccgccgcgccgccgccgggccagctcagccctgccagcccagccaccgccgcgcccccggcgcccgcgcccaccagtgcgccgggcctgcagttcgcttgtgcccggcagcccgagctcgccatgatgcattgctcttactgggaccacgacagcaagaccggcgcgctgcattcgcgcctcgatctctgagagcccaccgcatgccggtgcagacggatgcgaggatgcagggacgcgcgacgccggccccggtcgcagccgacgacgccgccgccagcctgacctcacaccctctgggcccgcctctggagccagcgcccagggtccctctgtgctttttcgctttcctaagctcctgtcgctcctctttgtcccctcagtttatgtcctcctgtgctcacctccctgacctctgtgaccttgcactcccctggcctgaagctgcctctctgcgcgctttctactgggctcgtctctttccggagccccagcgtctcctgcccaaattcaccgcggaaagggcccggggcggaggtgcgaccgggcgtcggcagcgcagacctcttggccttctctcacaggtcggtgcgctcgctctccgcgttccccgcccgactgccgtgcagtccatggctagacgcgccggacaggactgatggcgggaccgcgctgcccgagaaagggacggaccaatacgtgtgtttgctccgcgaaccctcttgaagctgttcagaagccgcttgccgcggggcccactaggcggggcgggggttgggacccagcgggagccggggcagcctggctccacggcctgtactcggtttacaccgcgggcgggcgcggagggaggctgcgtttcctccgctatcagtcccgtcgcttcgggcacctccgggccccggcggctggctaatgttttgtttgaaagatcggtggaactttttaagagagtatttaaaaaaaaaaaaggaaaaaaaattcaccgggcaaccggggaagtattgtggccttggagtttgctaaatccaaatatgaaaatcaaaagctttagtattcctcatcttctcttctggaagatttgcgttagagtttttgttgggccttcaaaaagctgtgttcagagttaggagaatatatccaataaaagatggtttcgtctaccaattggggaagtttcaccctctccctatctgaagaaaaaaatcaaaaacaaatgtccccggatctttcgatgcaagtcctggaggcagggagatcactgcctgcctggcccacgctgctgggacggctcgtcctccctgctttttgtttttcaaacctcctgcttctcccaccttgggaaggagaaatgtgaaacccggcagcggccgacctaggcggtcttgtggcccggagccggcccggcccgaaaaccatagacctggttgtactgtagcttgttgtttgggggaccaaattttctagagagaactagagcacttttgttgtgtttttttgttttgtttttgttttttgccttgtcgattcccgaataaattttgtgttccttcttttaacacggact

SEQ ID NO: 197016 - DNA, 1509 bp, Homo sapiens
gcggccgccgcaccgccgcctgccccaccgcaccacggggccgccgcgccgccgccgggccagctcagccctgccagcccagccaccgccgcgcccccggcaccggcgcgctgcattcgcgcctcgatctctgagagcccaccgcatgccggtgcagacggatgcgaggatgcagggacgcgcgacgccggccccggtcgcagccgacgacgccgccgccagcctgacctcacaccctctgggcccgcctctggagccagcgcccagggtccctctgtgctttttcgctttcctaagctcctgtcgctcctctttgtcccctcagtttatgtcctcctgtgctcacctccctgacctctgtgaccttgcactcccctggcctgaagctgcctctctgcgcgctttctactgggctcgtctctttccggagccccagcgtctcctgcccaaattcaccgcggaaagggcccggggcggaggtgcgaccgggcgtcggcagcgcagacctcttggccttctctcacaggtcggtgcgctcgctctccgcgttccccgcccgactgccgtgcagtccatggctagacgcgccggacaggactgatggcgggaccgcgctgcccgagaaagggacggaccaatacgtgtgtttgctccgcgaaccctcttgaagctgttcagaagccgcttgccgcggggcccactaggcggggcgggggttgggacccagcgggagccggggcagcctggctccacggcctgtactcggtttacaccgcgggcgggcgcggagggaggctgcgtttcctccgctatcagtcccgtcgcttcgggcacctccgggccccggcggctggctaatgttttgtttgaaagatcggtggaactttttaagagagtatttaaaaaaaaaaaaggaaaaaaaattcaccgggcaaccggggaagtattgtggccttggagtttgctaaatccaaatatgaaaatcaaaagctttagtattcctcatcttctcttctggaagatttgcgttagagtttttgttgggccttcaaaaagctgtgttcagagttaggagaatatatccaataaaagatggtttcgtctaccaattggggaagtttcaccctctccctatctgaagaaaaaaatcaaaaacaaatgtccccggatctttcgatgcaagtcctggaggcagggagatcactgcctgcctggcccacgctgctgggacggctcgtcctccctgctttttgtttttcaaacctcctgcttctcccaccttgggaaggagaaatgtgaaacccggcagcggccgacctaggcggtcttgtggcccggagccggcccggcccgaaaaccatagacctggttgtactgtagcttgttgtttgggggaccaaattttctagagagaactagagcacttttgttgtgtttttttgttttgtttttgttttttgccttgtcgattcccgaataaattttgtgttccttcttttaacacggact

SEQ ID NO: 197017 - DNA, 614 bp, Homo sapiens
tcaaaaccatcatcaataccaagatcaaacgggtaagaatccttcaaaaaacaggaaaaatctcctaaaacaccaaaaggacctagttctgtagaagacattaaagcaaaaatgcaagcaagtatagaaaaaggtggttctcttcccaaagtggaagccaagttcatcaattatatgaagaattgcttccggatgactgaccaggaggctattcaagatctctggcagttgaggaagtctctttaagaaaatagtttaaacaatttgttaaaatttttctgtcttacttcatttctgtagcagttgatatctggctgtcctttttataatgcagagtgggaactttccctaccatgtttgataaatgttgtccaggctccattgccaataatgtgttgtccaaaatgcctgtttagtttttaaagacggaactccaccctttgcttggtcttaagtatgtatggaatgttatgataggacatagtagtagtggtggtcagacatggaaatggtggggagacaaaaatatgcatgtgaaataaaactcagtattttaataaatttaaaaaaaagagaaattaatagcctgaaacacacttaccagtaaaagtgga

SEQ ID NO: 197018 - DNA, 636 bp, Homo sapiens
taagagatagggtctttctatgttgcccaggctggattcaaactcctgggctcaagtgatcctttcatctctgtatctgggactacaggtgcaccaccacaccaggctcattgcaagagatatggagaaatatttccctaggacctgagtattgttagataagactgcaggttttttagattacaaattgctccatgtcaacactgagaaccagatgacaagtgacagaggtacccatgtgtccttaaaaaattcttttgtgggtatagatgtaatatatggggccactaccaactcagtactactttacacaaaatgattgatatggaattgtttggataatatgatgtctaactccagaaggtagagactttggttaagaatttcaagggagagatttctttccttttaattttttccaccaagatccaaagcctccacagatatgcctcttcatcattcttgccaggcaggttttagttttcctaatttactcaatgaatgtggtgtctttcggaaatctctactttgtgtaagaattgtcaagctaattaagcctgtgtgcttggttagcacccctatctttattgaagcacttatcacaatagctaagatatggaatcaatctaaatgtcc

SEQ ID NO: 197019 - DNA, 168 bp, Homo sapiens
ggatcctggctgttttataaaacatcaagaaataacagtctttctacttttatatttctttatttttcagcagtaaaatcttttttaaagtagcaaattagtattttttttttttttttttttttgaaactgagtctcactgtgtcacccaggctggagtgcagtggc

SEQ ID NO: 197020 - DNA, 864 bp, Homo sapiens
cggaagtatccgatcaccttgcgaggagtccgccggctgtccgagcctgatgtcactgcaacttcgattcctccgacgcccctactcttacttcccagtcttcaggcaacttctccgcttcggcctcccctaggccttggccccagagaggggacgcactccacaggtggattcgcacgtgtgggccctcggcagcactttctcgtgcaaattaacaggtggccctcattgtggaagcaccgcccagcctttcccggggaggtcaccagggcgaggccgctcaaggtctgcaggcgcccggcgttagcgggatcctccccgcgcactggtccgaggaggccaggagagggcgaaccagtccccgaccagcggcccttccgggggtgggctctgaccccaccgagcggttagagggtccaggagctccaaagggtagggcagaattgggtagatgagggtgcatttttctgggaggagtctaaggcgtcgctgactctcaaaggcccgcatccggagaaagggaaagagccccgtcccgggaggaaggacgagaggctggcccgcgggaaggagccctggcagtccctcctggcctaggtctacctctttgatctcaccgtccccgtggcggcgagtgccaccaaagatgagagaggccagcaggtatcgggagagagctgaggggtcggcgccggcgggaccccagattggagccgccgtcgtcggacgggcagaccctgctgtaatagctcccggccggccacggtaggcaggtggggccaccgcgagtcctagtgaaaaacaccttcctcttgatctctcaaaggaacccgagccctgggaagggacatcaaggcgctcccg

SEQ ID NO: 197021 - DNA, 295 bp, Homo sapiens
gagagactattgatttgttcagtgccaagtttcctgtgatctaaaaatggaggaactaagtggtgccaccctttgtttgcaggccaacagaagtaaaccaaagagaaatgagaagggggaagaattgaataagttgatgatagtgaagtaaatacccaccatttcttgctttgtttagcatggaaaacagctcacttgttcctttaaacctttataggcctcgttggcaacaaagcacatttcattgagggatgcctctgctggcagcaatggttatgctttcaaaataaaagac

SEQ ID NO: 197022 - DNA, 221 bp, Homo sapiens
gctatcatcactgtgatactgatggaggtcagaggggatggacagcttgtggactgagagccacagaaggctgtcctttaacacaagctccttcattctgccaagcagacctccgtagggagttgctaggccatccaaggttcagctgtactgacatggaactggaaacagatgttccatggaactatggcagtggctgaaggtgagtaggaatggaaaaa

SEQ ID NO: 197023 - DNA, 385 bp, Homo sapiens
tccccgcacagagagagagggcgcttcctccgcaggcttccctgcctgctgggggccagggaggagaccagcttgttggaagcggagacgtctaaggagtttccaaataggaaaaccagcggctgcaggcctcaggacgtggccgggcgagccgcagcctcatcccgcgagcgggcgttcctgagctgcctgcaccgtagtaccttcatatgctttaaaaatgtaaagcggccgggagcggtgcctcacacgcctgtaaccccggcacgctgggaggctgaggcaggaggattgcctgagaccaggagttggagggcagtctgggcgacagagggagaccccccgtctcgacaaataaaataaaataaagatataaagatctgga

SEQ ID NO: 197024 - DNA, 869 bp, Homo sapiens
tgagccactgtgcccggcccaaagctcaaaatcttaagttgtgcacgccaacatcaaatcacagatttctgtgaggacgtacacatgcattattcatgtaccctgagcatcttcagactatagctgcccccaccccaacacacatgttgatgaattctagagtgatgctggcctacttcaacactctgctactttaatttctatcataggggttgaggcacagcatagtcttttagcctttgtccctgcttttaaagaaatcaccattgttggtatattgtatgttggcataaggagaagagatgacttggggagatataacataggtaacttgcaaagattcattcctcacagagagtgaaagagggagagggggcaggtagagcatccaacagaataaatgtaagattttaagtgtgtcactttctccactcatctttgaatagaaagatgactgtagtatctcttcaatttcatttgcaaagtacttattcaaattcccctgaagtcactttttaatagcaagaccaatttagatccttttggattatcgatgaaattctagatctagtagtatagcaaacgtgatttccatatgtcaaatagagcaaaagcataagggataaatttgctatcctgtatttgcatacctcataatatcatatactatccctaacagatattatctccttatagctattatttcagtataaactactttaaaagactccttcattagacttttctgcagttacctacttgcctattatcagtgaaatgcagctgaggtatattttaggatcactattcttctggctgtctgagattgtacctgagaatgcattaagatacattttcacattcattta

SEQ ID NO: 197025 - DNA, 360 bp, Homo sapiens
tggtgttgtaaaggaagctgtactgtgaactacaaaagttagatcgatttatgagaagccatgacaaaatttgcggataatgcataagaattgttttcaaaatgaagactagcacaagtgagctaatgaaaaatgatacttggctattccactgcacttgactataatattttgataattagaccaaggaaaatgacctcatcttacataggtacagagccacaaccttctaggttatttgacacattcctagctgtcaggtgtaagaagggacaaaaacatatgtactttagtataagttctaactagttggaccctgtttttaaatagcatccagtacagctcctacaactccaactt

SEQ ID NO: 197026 - DNA, 297 bp, Homo sapiens
gatacgaatcgagctcgtaccggaaggtagctgttactgcatcattgataaatgtcttgggtgtgacataggtactgtggttatgtacgagaacacgcttcttcttaggagacgtatgttgaagaatttaggggtgaagtctcattacatgtgcgatttactttcaaatggctcaggcaagaatatactgcaagagtgacggtgataaaggagagggaggagggccagggcgtgtgtgaatgagcaagacctggcaaatgtggcaaacagtaacagctggtgaactggggaaggtat

SEQ ID NO: 197027 - DNA, 460 bp, Homo sapiens
acttcatattgaaagcatgtaatggtttttgtctcagttactgaaccccaacattttggtttggagtactctcttcagaagtgttcaaggttcaaattgaggtcttctgttgtcatggaataactttctcaacaatggtaagtagtggagataagagttaatggggaatatcctattcacttttctctgagccctctgaaacagattttctaaacccttccatgtgatcccgaccatgttatgggtttgctaactttgcagtacattggattgaaacatcgtaattctttccatgacaacagtgtctgatgttacagatgtacaaccagtgaggtcaatagttgacagatggacgttgaagccatgcaattacacctcccaaaccattataaagaatgtaacagaagaaaggtggaacccagtctaaaacacaccaaacaataaaaggcactaaaataat

SEQ ID NO: 197028 - DNA, 249 bp, Homo sapiens
tcaaactcctaacctcaggtgacccacccttctcagcccccaaagtgctgggattacaggcacgagccaccgtgcccagcctctgtcataatttcatctctctcatcaatagcagaaatatttgaggcttctgcttctttgagaatttccagttagctgcacgagccagagcctagataatgagtggaaacgtaaaatattagtgaagtgtacttcaagttgaatggattaatcctgtagactaaccag

SEQ ID NO: 197029 - DNA, 296 bp, Homo sapiens
ttaattaggagaggaaactttcatctgttgctttcaaaaagcttatacactgaagagagcacacagctgttctgtcacctcacattcacacacttccgcctcttaggtttgagctcatgttctgctttcagtcttgttgtgatgggcagagagaaagtcgttaaagtatactgtccttaccacattctcgaaacacaccatacaccctgtacttcaggcagagtcacagtgtggggccagaagcttctgtaggtaagtaggactgagagagaaagtcctggttacctaattccttt

SEQ ID NO: 197030 - DNA, 239 bp, Homo sapiens
catgaccagaggtgtaggttttttcacccagcccgcgtctgctgcttggtgtgtggtgaaaaaacctacacctctggtcatggaagtcttcttctgcgttgatattactgtggtggtatgagagcagaggaaaaacacagtttgagagagcttttcccgaaacacaaacagaaattgccagccccgctgtacagaagagcagtatgtacagaatgctatgtgtccatcaaaagaagagt

SEQ ID NO: 197031 - DNA, 505 bp, Homo sapiens
tgacgctctacccccctgacatcctggatgccatgctgaaggagaagaagctggcacaggaccagaacggggctctcatgattcccatccaggatctggaggacatgccggccccgcagtacccttatatcccccccatgaccgagttcttcttcgacggcaccagcgacataaccatcttccccccgcccatcagtgtagagcctgtcgaggtagacttcggtgcctgcccagggcctgaggcccccaaccctgtacccctgtgcctgatgaaccacaccaagggcaagatcatggtggtctggacgcgaaggtctgactgccccttctgggtgactccagagagctgcgacgtgcccccactcaagtccatggccatgcgcctgcacttccagccgcctcaccccaactgcctttacacggtggagctcgaagccttcgccatctataaggtgtgtgcacgcaatgagagggaggaatgcggggtctctgctaggagcctgag

SEQ ID NO: 197032 - DNA, 357 bp, Homo sapiens
cctggcctagtgtatggtactttttaaaagatactattgtttgcctatcaaacaggcaaaaagtatgacagtaccaagtgttggggagaacatggcaaaacagcactttgacacggtggtttcaggcatggaaatggctacagttgctgtcttcaaatttgggagtatctaacaaaatggagaaatatgtcacataccctgtgtctctgcagttctgtttctgggtaaattcttacctgtatgtacaaggagacatgtatcattccctaccacgtcgtcgtcattagcagaagctcgtaagccatgtaaatgcctgtcagtcaagaaatagatgggtaaaatgcagtctctttacat

SEQ ID NO: 197033 - DNA, 544 bp, Homo sapiens
gatatttggttgcttggttcatatgcatagaaacagttgtcataactgtaaaaagcagtacttagcaagtatttctaagtgattggaatagctttcctttaatgttacaatactgcctattgatttggaaattagatcacgctctatgatgtttcgattttactcaaaggcatcatgagtactctgctcattctttcattctttatagttttctagttgagttaggaactattttatcagaaatcattttagcattataataaggattttttttttttgagacagagtcttgctctgttgcccaggctggagtgcagtggcacgatctcagcttactgcaacctccgcctcctgggttcaagtgattcttctgcctcagcctcccgagtagctgggactataggcatgcgccaccatgcccagctaatttttgtatttttagtagagatggggtttcaccatattggccatgctggtctcgaactcctgacctcatgatccacccaccttgtcctcccaaagtgctgcaattacaggtgtgagc

SEQ ID NO: 197034 - DNA, 509 bp, Homo sapiens
gagtccaagactcatccagattgactctgtccccctgctcctcctgcgtagccactcaggcagcaaataatttcatttccaaaatttcatttctaatccacctcctcctttccctctctgtgagcactgtgttctgcgccttaacatttcttgtctggaaaatttcaatagcctttcttaactacccaacgcttatatttcacttgcgtcccctcaacgtgcccttccactggaagttccagcaatcctgaggccctcagacctcccctcaccttcgggactggcacgggcctctcccttggtctcttttccactcggaactcctatgcttcctttgaaacctatgttagagagtcaggcatggtggcatgcacctgtagttgcagccactcaggaggctgagggaggaggatcgcttgagtgcaggaattcagggctgcagtgagctatgaccatgcctctgaatagccactgcactgcagcctgtgcaacgcagtgagaccccacct

SEQ ID NO: 197035 - DNA, 214 bp, Homo sapiens
tgattcctgactcagacaatacaaagtggagtctgggaatctgcacttataacgggcatctcaggtgttatatgcaggagcattttgagaaacacgggcactgtgggaacctagaagggactaccaacctagcctggaggatagaggccatcagagaaggcttcctggtggaggtgatgccttgagagatcttaaaggaagtgtaagagtttgc

SEQ ID NO: 197036 - DNA, 415 bp, Homo sapiens
caatctctctctcctttctaaggacaacagtcattagataaggccccccaccaatcctaaatccaggaccatctcatcttgagatacttaattacatttaccaagataaagtcacatttacatgtcccaaggcctaggacttggacatattttggggttggggggacacttcaacccactatatctccctgggtcctcttgagatgacactaatagtctttgatatttttcttgctttttgtgtaacatgatgttctgattcatcttgtagatttcctgcccttgacctggaattagtcatttctccaggaatctctggtttcttttagtggaaaattgtatttagagatcacaataaaggtgctaagaatgtattacttttgtaatcaataaaaacaattttcactaaataaaa

SEQ ID NO: 197037 - DNA, 625 bp, Homo sapiens
actctgtagttccttacccttctctaaattcttcgtagcacttgtcgccagctgaaattgttatttttctgttagtttattttctcttcctttccatagtattttaagctccgtaagaacagggacctggtctgtctttataccactgtacaccaagagcgcaaatggctgtgtgctcaataaaaacttgtcaaatgaccacaactacccaggtaatttactttaaggtcaccaagtacacataagatcaagtcaccaccaataaatcagtaagtccaatgaaacagtaaacacaaaataaattattactctgttcctgggtaaaatgatcttaaattgtaccagctttcagcttggaaggtttgataaaagtttgatttggaagacaggtaatttttatatatttttatggagaatttttatgaaagacaaacactacaacaaaaacaatgtcatgaaaggagcaaaaccactgctgtggattaccaggaaacatgagtaagaggcttgggctttgcccagtgtaggtaccttatcttatttctgggagtttttctacctaaaaagcatcacacgatgatgcctttttgaagcttccagcaaagatcatagctatgttgtgttt

SEQ ID NO: 197038 - DNA, 361 bp, Homo sapiens
gagctgtactgtattaaatgttctcttgttttcttcagataccaactcacccactgaatgattcctatttttgtatcccagccttttatttggaaaaattcctaaatctgttatgatccttgccagacaattcaactaaaatcagataagcagatgagcaacgcctcctgcgaacagtcaccttgttcctcaagggctgtgtctctgtgtggtcatgcctgacgtcgccgaatgtgccacaccttttctctgtactatggcagtgagacagctgagaagcatgctttatagagagtgtatgtgtcagatcatttgctgctcatatcaaactccacatggaagggcagtaacagctgacttc

SEQ ID NO: 197039 - DNA, 671 bp, Homo sapiens
tcattgtaaaattcagtttactatatcgattttatgctgctatgtccacaatcaataactattttatatttgtataattatcctttttaagctatatcctatttccctgacatcactctagttgctcacagatcaagatttttaatctggttctccaagaatttcacccactgacccactcctcacatttatattaatgaagtaacactgattctagaataatcctgcagaaaactggtaaacctctgtagaagtaaatcaattagctcaatttagccattacaccacatatacatatttcaaaagaacatactgtacttaataaatatatacaattttttctcaattaaaaaactgtgcaaaaaataagtaaatgaaatttccaaagattgaaaactaaatcatagagagtcatcaaaacactggttatgagtttctatggtttcaaataaaaagggaacattatatttaagttacaaatatgtatttaagtttaaaaattaaataaaaaaattacaatctagttgcaaaagtgtttgaaaacagtctgtaaaggataatggaagggaaactaaaagcaaagctacggaaggatacaatgctctacaggtctacagaagtaaagttattcttacttaggaataacttaggccacatgtacaagtcattgt

SEQ ID NO: 197040 - DNA, 161 bp, Homo sapiens
ttaacagttagtgtcacaatgattgttattagatactcactcatccttttcatcattcattcattcattctgtgagccttaactgattattgtactaagggctgtggggccacccgaatgcacaagacacaaagagatgttcacacaaatacagtgtatat

SEQ ID NO: 197041 - DNA, 361 bp, Homo sapiens
cagaggactttgcagtgcctgatcagggcagaaaaaggaggcatgcacctgggggaggatcacatacgagtgaaacctgtccccgctgaagcactaggtttggagaaatctactgggcatttacacacctttcccacttctgcttatgacttgtagccaaactcaagagtaccacccacttccaggaatagtgtaccaaggtaacagaaacattctagattcatacaattggggttagattaggatcatctgaaaatgaaggttgtgtatgtcaattgccttctaacaggatgggtggagagatgtacttaatgaatgatttgggggaagggctagaagtgaagcacatggcctctctgcc

SEQ ID NO: 197042 - DNA, 620 bp, Homo sapiens
gaccctacaggttctgctgattctcccactgagtggcagggcccaagccatcattaggggaggatttattttgaaagtgtcatcttaaactgcaaggatgtctgtcagatatcacaattaaacatgccaaaggagaaatcatattgtcaaaatgcccacttaacccactgaaacgtctcaaactcaccccttgctgaccttctataaccccattgtttaagttttttttttctttttttaaacaagagaaaatagacagatacatgttggtatatgctaactgtccatattcacatagagacacagtgtgctctctgatcccaatatacagagaaaggaggaaaaaactagaattgtatgcactactacacagggacttagcaccctccagattccagtagcgtgaagggagcaggttttttcttttttcccacagagcttgggggtgttgattccatatagttcagacaggaagggataaaaatgaattttgaacagaaaggggtagagactcttttcctgttctattctgctcaaggtattttctccaaaataagttgagaatcatggtgtagagaaaagagacctcaagaacagggtgactgaggacaagattaaaa

SEQ ID NO: 197043 - DNA, 459 bp, Homo sapiens
ggtcggtgaaggaacccagatcgtcaacctgcggctgcccctgtccccagggtccccaccaggcagtcatgaccccccaccgagccctctccctttcgcctcgcctcccagccccacgccccactccctcgggttcgcgctcctcagtcaagatgaaagagcccgcgagcagcagataggtctaggttcgaatcccacctctgccccttaatggctggaggccttctcccagcgccggcctgtaaaatgggcccatcacgcaccgactttggctggaggaggcgttcaggaaatgtcagcttcctgccctcatccgccctcatctcacgtttccctctgcttcccccctccttttagttttgttttaaatccctccctcctgcgccctttctcttctcggctccgcaatcttagccaaaccgcagcgtttagcaatcctgcgcccacccggcgccctgg

SEQ ID NO: 197044 - DNA, 432 bp, Homo sapiens
ataccgcaacatataaatctgctgagccacctcaaatatctacctaaagaataaaggtttgccaccaaatacaaagttccatttcctatgagcttataatgcactctagaactctataattgtttgtaatctaagcagtatgacaaatggctctctaataatttttaatccaagtaagataatgaaaatttgtaataattagtgcactatgagtactccccaaaacttccagatagatttttcaattctagagtaactctgtaagaatttcagcttccacatactaacaacaggctacataaaacagcttgggcttagagacgtctgacttccacagcctatctccttgaaataaaggagaagatgtggaaatatttctcattagccacatcaacctttacagtagaggaagctatatgtgtcaattcacag

SEQ ID NO: 197045 - DNA, 594 bp, Homo sapiens
aatgaagtcaaattatttttcccgtcattggggggaataagaaataaataatcaaatgttggaaaaggaagtgaattacaacacttatgatgatgaaaatatgtttgataaaacttttaaaaacattatgatgtaatggttgggtgtggtggttcatgcctaaaatcccagcactttgggaggccgagatgggaggatcatttgaggtcaggagtttgagaccagcctggccaacatggtgaaacccagtctctactaaaaatacaaaaattagctgggcgtggtggcatgcacctgtaatcccaaacactcaggaggctgaggcaggagaattgcttgaacccgggaggtggaggttgcagtgaactgagattgcaccactgcactccaggttgggcgacagagctgaacccagtctcaaaacaaacaaacaaacaaacaaacaatatgatgtattaatatagctaaataacatgctggcagtttgccaaacatgatgttctctttcacacttggtcccctctatgcatgttgtttccttggcctggttccctttcctcttttctgctgatatatagcttttcatgttagaag

SEQ ID NO: 197046 - DNA, 358 bp, Homo sapiens
ctaagcaaaatagaaatatatcgaagtccaaaaagaaaaaaaaagacgttataaactacgttttaaaagtctggtaggtaatttttgaatcgttctctttttcatgatctgtacctgcattaaccaatgatagccactagccacatgaagctatttaaactttaattaacattaagtaaaatttaaaatccagttactcaggccgggtgcggtggctcacacctgtaatcccagcactttgggaggctgaggcaggagaatcgcttgaacctgggaggcggaggttgcggtgagccgagattgcgccattgcactccagcctgggcaacagaacgaaactctgtctctaaataaataa

SEQ ID NO: 197047 - DNA, 3683 bp, Homo sapiens
  misc_feature (771)..(771): n is a, c, g, or t
  misc_feature (1836)..(1836): n is a, c, g, or t
  misc_feature (1853)..(1853): n is a, c, g, or t
  misc_feature (2230)..(2230): n is a, c, g, or t
  misc_feature (2261)..(2261): n is a, c, g, or t
  misc_feature (2334)..(2334): n is a, c, g, or t
  misc_feature (2466)..(2466): n is a, c, g, or t
  misc_feature (2746)..(2746): n is a, c, g, or t
  misc_feature (3011)..(3011): n is a, c, g, or t
  misc_feature (3433)..(3433): n is a, c, g, or t
  misc_feature (3458)..(3458): n is a, c, g, or t
  misc_feature (3618)..(3618): n is a, c, g, or t
  misc_feature (3683)..(3683): n is a, c, g, or t
gtcagcatactgaagacatatatgtgttatttctaagcacatttcctatttatgtgataatggagatcgccctttaaccatcacttggacgtgaaggaggattcttcttcctccattagtaaatattccttgacttgataatactgaaaatatgtgaggtgaatgagctttaatcctgtggtttggtttggtttttggttgtttgcagtcttggactgttcacctgcactgtcttgtgcctttgagtatgattaactgccttgacgccttacagtgcattacacaactctacttcttccatttcttgactaatctctcatgctgtttgactgcccattggaatctttaagttagctacttaggaaagactttaggaaggagaatgctaagagaactggcagagaagtcaggagcctgggctctgtccaggccctggcgtaagtcctttcacctcttcctttgactcctttacaaaatgaagttgaactcattcgagctttaaaaagatgacgccaagaggcaagacagagggcagtagatgtgaaagtaacatgaaagagaaaggaacatctgaaaaaaaaaaaaaggtagaaaaagattttgacaaatagtactaaaaacaaagaatatagaatagagagacccaattatactgataattacaattatcagtattgtaaaaactacagcaaaaaagctaaaaacatattcagcttttattgtccataaaaagtgatcacaccatgtctaactgtaattcgtttgtcaaanacactagaggccaaggactaaattgcggattaagagtttcttccttttatttcctgcatatccagaaacctggggtcatagatactcttccatggtgtgttgtttggcacaacttgcaagtattttggcagatggttagaaaaaaagactttaagaaatatgcaatagtactcaggactctaaatataataaataaagctaagataccagtatcctgccattcattacaatcaacatttattgaacagcagttatatgccaggtagcagggatacctagaacttgcccctcccactagcactccagaagagttcctgctttcccagcctaaagcaacagcaagtcttacatgagctaggcttactgtgatagctgtcctgacggcgagtggcaaacatggcccagtgccttcctcatggatgaacatgactctacactgggactccccggtagacctttttgtgatgatgagaaagtcctgtgttggtgatgttcagtatggtaactagtgactgtatgtgctgttgagaacttgaaatatggctactgtgactgagggacagaacatttaattttatttaactttggttgagtttaattcaaataactacatattactaatggctactgattggacagcagctttctagacccattgttaaaaataattataagcaatgagtacctcttatgagatagaattaataatcccatttattgagggcccatgacagattaagaattatgtttgacatatattatccctaatcctcacaagaatggttcatttgacaaataagataactgaagttctgagagataaattgctttgttatgtcctcgcaaggaattgtgagagctggaatttgaacctaattggtcagactccagagctgggtgatttctagtaatctgccaaatctgtgtatgtactgtccggatgctgtgtcttctgagtacatcttctccttgctttatggattagttagcaatgtctttatcttggtcacataggacagttacagggtccatcttatctcttctgaatatggacgtatcactgcnctggaaccattcatttntcttactgaggcctatgtccttcaaaaaatattaagagttgagggtccaacccagcttcttgagtagtaagctaatcacctacaagtatatttccccagtagatgctgagagaagcatcaaagtacatgggtagttctgtggacatcagtggcactcagtaaactcttggcatttgagtgtttaactgtcacagttgaggatatctgtgaactctcccaaggcctgagtcactgaatgagcccagccagtacttgggcgtctgtggctccattctgctttgctgttttctgctttccatggaacatacagtaactctcttgaagggtctgaaagcctcaattacaacgtttcagtgattctgaactgatttttcttnggaaagtatatatgcagatggtacttgcagnatcaccagggggtagtaacgtggaggagtggtaaaggtctactggacaatcaggtggctaccacccaaccacncatggtgatgtgatatgaagccacttttctttattccttcagatttaaggtttccccttcaggaagcaggttacttaacaagtacttgatttcaccataacatgcattatgacattatctttttttcttttntctttttttttttgagacggaatcttgccctgtcgcaggctggagtgcaatggcacgatctcggctcactgcaacctccttctcccaggttcaagcaattctcctgcctcagcctcctgagtagctgggattacaggtgcatgccgccacacctggctaattttttgtatctttggtggagatggggtttcaccatgttggccaggctggtctcgaactcctgacttcgttatccacccacctcaacctcccaaagtgctgggattacacgcatgagccnccgttcctggccgatattttattttcttaaaaggtcattatcagatgccacaagagtatttctataaactatgacccaagtatagcctaatgttaatagcttaaaataggttttatttaccttttttgccctttaaaagcaaggaattattttttaatggaaagaacatagactttgatgatcagttcacatccttgctttaccccttgaaaaatgtgcacctggaaagacagcttaacattcctgagtcacatttgtccaaatnatacaaacaatggcaacaagacttcagcactaatgtctgatgttttttgtatgattaatctgtgccaggttccattctagtttctttacacacattataccatctaattctcacaacaactttgcatagcaggcattgtcatttccactttacaagcaggaatctgaggaccagagttaaaagtaactggtccaagattgcctagttaataaatggtggaatttgcagtcagacccaagctggtttgggccaatacacttgaccttcttatgatacgtcagccttgtgaaatagggcagatactattaataatatccaccttgtgtgatcattatgaaggttagatataatgtatgtggaactcttgccaccaaagtggttccacaagaggccctaaacaaatgagtaatcattattatttnaaaatgtccgtaagtgaaaccgatntgccaagaccagtaaaaatgagagcttcttaaggaaaagagtaggaggcatacctttgtttcattttgtttgttggtttctgtgcttgctttttgttcttttctgttaggcacaggttttatttagaataaattaaatttttttttctttgatgagtgcngaaataatagttggaaacattgaatggaacagctaatgtaccatagtaatacttcttggattacn

SEQ ID NO: 197048 - DNA, 336 bp, Homo sapiens
tacagcactcagcatctccgtgtgggagaaaggaaagtcataaaactggagtgagatcatgaaaggtttgcgaaatgttcaggggccacctcaggtaaccatcaaaagttatgtatctaatatgccacctcatccaaatgtgttttgggcaatactttcttcatagcatgatttcaggtaagaaataaacattgtggatgaagccacaggacatgtaggaagttttgagataaaaatatttgcatctccggtcttgtcatgacggacagtaacatatagtggtaagaactgaaaacctgcagtaaacaaagctcggtttctgatttttccctgagt

SEQ ID NO: 197049 - DNA, 521 bp, Homo sapiens
atgcacatctcacatgactactgtgtaagaccttgtcagaagttagaaacaccaattcaatgtctgtgaaaccatcaatacttattttgatgcaactttgttaaaaatgtaaagtctaagacagtagatttgtacacgatgtttggaaacaccaatcataaatgaagacttgaggtcaaacagacttatggtcaccatacttgcagcagaatttgctggggggttgatatatgttcatcaagtaaacagaaacatcaaaccagagtagttctctagttagtaaaatgagaataaacaggttattaattaatctatttcagaggatggtcaggtggcctagagaatgctgtcctggggaaatgacatttatactgctacatgagatatgattagaagttaggtagaagaacatcattccaggcagaggaagtgggcacaaaaaggtccttagtaaaggagctttttgagttcaaagaactgaaagatgatgtgtgttgcaaatgtgacttgtgaggctagca

SEQ ID NO: 197050 - DNA, 426 bp, Homo sapiens
caaagtaacttgtgaatgaaagaagtaatttactagaacaacgcttgttgatgataattgacatttaggtataacgtcatatatgaatgattgtatttatgtatttatttgtcaaaattgtacatactgtttcgccaaaagtaattgtctgtaaaagtgcactctccaggtttgtagtactatttagggttacatgggttgccaatcaagctgctaatcagaatactatttttttgtatcaatgttataaaactaaaaatgacagacactgaagatatcattacactttcttcaccttcctcttgaaatgtaaactgttgactgaaagcgcaatgcttatgtacaggcccatctgtcatgaggaagattatggttccataaagctgatttttttaaaccattgggacaaataaacagaaggagaac

SEQ ID NO: 197051 - DNA, 397 bp, Homo sapiens
  misc_feature (14)..(14): n is a, c, g, or t
atcccccgcttggngctttcgagttgctattacaacatgtaatttactgagttacaaacagcagggtcagggctgggcaggtgcacacacttatccatcctgaggaactgccaggacaagacaaaggcatatctactcctcgcttgctctgatgccagtggcagtgatccaggttgtggcaggtggcttctgtttctatgcacatcagtaatctaaaactcagtcccatcgtcctctgtggcctgtgttagaggtgaggggaccaggtgcttccatgaaaaaacttctcatctccaaccagccatgctcccagagaatttcacagtctctgtggggtcaaatcaaagggcgctcaaaggcagtttaagctctccatcaggcgagtacatagctggac

SEQ ID NO: 197052 - DNA, 488 bp, Homo sapiens
tgaaaaacccagttaacatcatacctaatggtaaaagaattattctttccccataaaatcatgaacaaggcaggaatgttttctctcaccacttttattcaatatcatactggaggtctttgccaatgtgatatggtaagaataagaaataaaaggcacaaaatttgaaaaggaaaaaaaaatggctttattcacaaatgacatgactatttacacagaaaatccttaagaatctaccaaaaaaagctactagaattactagtgagtttaggaaagttgcaaaatacaatgccaatatataaaacccaattgtgtttctataatgaacaattagaaattgaaattttaaaaataccagttcaaaggcatcaaaaacacatggaggcactgatgagacaaattaaagacgaccaaaaaccatgttcacgaatcaaaagaatcaatatctttcctgacatgacctaaaaaaagaaatcaggctgggcgcg

SEQ ID NO: 197053 - DNA, 379 bp, Homo sapiens
tctttctttgttttgaccatcacaatctggaatgacatggacaaaagggaaaatacttcatgtccacgttaactcgtcaattcttctcctggagaacaggccttcaatgtgctctacacgttgagtaatgagagcctgcactgcccaccttccgtctctctacaccttccttacttgcgtggttgacactgcttttctcccgaccaactgttaaaaatgagaattgcaaacatttaaaatgtctataatataaatgttattcacatgatatttgctagttttctttgaatgttctgtatagggttatactagtttcttgaaggaaatgtaaataaaggataggtagatacatggttgaatttctccacaaaaatccagc

SEQ ID NO: 197054 - DNA, 714 bp, Homo sapiens
ttggtagtaacgtgcaggttgaactggtggatggaaggattatgtctgtgctccccatctccactgtccctttcctgttcccactccattaggccttgacaaaggtcaaggacttcccgcagtccaataataatctcctaacatctctccttgcttctactctctccctaaatagggtggtggcagcagaatagaaaggatcagatacaacagataacactgaaggaaaaaatctacgacttcagaaagtaaatatttctaaaagaaatagagaagttatgaagcacagattttattgcagcggactggcagtttttactcttagggttggccagctagtaaatttattgcatacctgcgtgtgtctgtggctttcgaactctgaaattgtgcattgactccatgaacaagttaatactgtgagactgccaccctgtggacaaaatatcaggactaaaaccatcaagaattaaagtttcattcatttgcgatttactgttttagaactggctttggttcttccacgttggtgcatgcagtgatgctcattaaatagaaagcttgaaattaattttttctctgaattttttctgaggcttttaaataaagggaatctaaaatggaaccagtagttttaaaaagctgcaatgattcaagagtggtttttagatggtacttctttgctctagaaatttcatatggaagggttggttt

SEQ ID NO: 197055 - DNA, 550 bp, Homo sapiens
tagccggttcattagtctgtttacctgagtagatttcaggcacctaattgccacaattggaataggttccttgtagataatgaaaacgtttgcagttctaggcaaaaggtaacttagtagtgcttagtcagagccttatgctttcataccatattgtttatgaatgattgatcacttacaatagatctcttatggcttatgtcctgacatccaaaattttcctactgtatgaacttagttgaaaatctcaatttaaattgtggcagattaaggaggggaagacatagaaaactcattgaaaacatagaaaaagcgtttgttatggcagggtaaggtcctgccttgtcacagaatttggaagcagtacatcttcacactgtaaagctagttttcacactttggatcctaagagatggctgctttcatatgttgctgatgtctgcattcctcccaccctcctacagagtcaccccgctctgtttcttttaattgcttgtatacctagagtagtcagctgtccttgtctgcgtaggactgtcagagaaaagtc

SEQ ID NO: 197056 - DNA, 726 bp, Homo sapiens
gtaatattcaacaaccaggatccctacggattgtctcaggtgcttgtaaaacacagcagactatgtctttttgcagagacagactttggcagcagtatcaaatctgaatcacctcctctggctgcctctcttctggccatattgtctggtatggctctttgacaatccctgcttccttgtgatggtcccatattggagagagaagatctgctttgagatgctccctcaattcttcctcatttctctttactgcccagctgttctctggggtgcacatttactatattcttcctctttctaatgcagatgactcttttgaaccccattattatgcctccattttatcatctagatccaggtcatttttcccaggatttgaatcattgccctgtcaacgactctgtcccatccatctcccattacagtgctattccaggtgacataacagggtcaagtccacgcacactccagagtaaaaaatccaaacatctaaaggctgaatctataataacctggatggtttcatctcaaaatgtgctgatgagctaactcatagaaaacaagaattctgactatattgctgcctcactgcccatgggtgcgtcttttcttttcatggatctcattggtcaggcatttaggagaatatggagactagtgggctgattcacctaactcatactgctcttccacccttcccatcttaattgttcctaaagaaatatc

SEQ ID NO: 197057 - DNA, 240 bp, Homo sapiens
tccctgaatatatatacctgagaactccctgtactatctttacaacttcctgtgaatctgtaattatttcaaaattaaaaattagtaaaaaaaaacaaaataattcaataaaacaaacatggcactgagatagtaaactcgtaaaccctttttgttatggttaaattattggttatattcaggaaaattgttaaaaacttggaaatagggcaaatgaatagctgcatattcgcaccattc

SEQ ID NO: 197058 - DNA, 364 bp, Homo sapiens
gatgtttataaaagttaattttttaaatctaaactgtttagtttataggcctttgaagaagagtttttgagatagatgctagacccataataatctatttgggacaaatggaagaacaaattttgtgaattttacttgttcataaaaaacttgaaaatatagtagttagtcaaaggtaataccagagtaggaaaaaaactagctgcagaaatccaaattgcaaatatacattgaggcttaaggataaatcacagtactttgtcctagtttgatttgtgaacaaaagaagggttcacactgggagtagaatttatgtttttgtacttaggtgtttaagtgattaaaagctttttgtttgatatat

SEQ ID NO: 197059 - DNA, 452 bp, Homo sapiens
tttacacacttcagaatttgctatgcatgagtctctctgactgcggatagttgtattgtggctattctgtgcacacaccttgttctatttcaatttttttccatgacttattattcaaaacagtgtgatacagtgaaaatcagatccgctatggtccctgcccccaggttgcttagagtctctgaggggttatggaaaagtaattaggaaattgggaatcagagtggtttgtgttctgatgaggaaggaacaggtccttatgagaacacagaaaagaggtacctgttttattctcctctgcatctctagcacctggtacagtacctggcatatagtaggtgtctcactaaatctttgttgaatgaatgaataaactcagaggtgggttgattgcatggtcacttttggggagatcttacatctgagctaagttagtgatatccactggaagt

SEQ ID NO: 197060 - DNA, 164 bp, Homo sapiens
caaaactgcagagaagggggaccactgtatagcattctccgcaaagaacagtacatttttagagaaatgatgacataaaggaaacggactctagggatatcaacttgtgggaaggcaaataaatggtagataaagaatagttggtagtttgttgtgtgcatttc

SEQ ID NO: 197061 - DNA, 689 bp, Homo sapiens
cgtgggtacataaagaacactagccagattcgattcggctcgtaccatactggtcatacagtgacagcatagattatcccagggctcaatcagttgttccagctaacttcctgctaaacagagctggtcaccaggagccaggctgacacctttgaaccccttcttcccctctgcctcctttctcagaaaatataaagtgcaaaatggtccagaggtggacagtgtggggagggaggggacattgagtcttgatgacctgcaaatttacaccagtttctgcataatcctatatgggctttatctgatcttagaggcacccatccctttgcaataaaagattgcatctgtttttatttcccctttctgttggaagctgataagccaagaatgtactctccccacctgctctcagctttgattcccattaacacaggggcattcccaggaaagggttgggctccccaaggtgtttgctggagaacctgctgtcactctgcagagatgtacaagtatttactgaaagaagaacttctccaggaatattgtgtaagcagattacaccggatctccctgcccttgggcaaatatatatggtgaagctcaaagaggggaatccaatgcacagaaacctccatgcttaaaaaatatcttgtggccggcacggtggctcacgcctgtaatgccagcac

SEQ ID NO: 197062 - DNA, 506 bp, Homo sapiens
agctgctgtaaacatttgcgtataggtccacctgtgaccacagttttaacttcacgtgatcagatgcccaggaaatgaattgatgtggcatatgagcaatcatatttaatttctggttagaatgtaataataaggatctaatttactcttattattgaaaagaacttaaaaatactggacaacatatgtgaagcaattgttttaagatattagacatcaagcaatggaggacagtgatcattgagagaggagaagcaaggaggatgagccctaggattgcctcagtttcccacctgatcaaaagcttccaggccacaacacagaaaaggaaaacacattttagatataaaggaaaatagactaacattaaaatgacgaatacaagctatatcatgaaaatactattcaaaagaagctggtgtggctatatgacatcagacaaagaagacttctgaaccaacactattactttgcataaataaagtcatttcctaatgaaaaagaag

SEQ ID NO: 197063 - DNA, 203 bp, Homo sapiens
aaaacaataaacaccggtgactacacgggtagggaatggtggagacagatggggacagcggctgaaaaactacctattgggtactgtgctcactatgtgggtgatgggaccatttgtaccccaaaccccagtgtcacacaatatacttatgtaacaagcttgtacatatatctgcataattgaaagttgaaattatttttaaa

SEQ ID NO: 197064 - DNA, 783 bp, Homo sapiens
  misc_feature (680)..(680): n is a, c, g, or t
gttggagtcctgacccatggtacctcagaaagtgactgtatttgaagataggtctttaaagaggtcattgtaaattaattaataaggtcattagggtggactctaatccgatatgactggtatccttataagaaaaggaaattagcacacagacacacaatcagagggagaagacagccagtcatctacaagccgaggagacagacctcagaagaaaccaaccctgcctgcaccttgatcttggacttctagtcgccagaactgtgagaaaacaaatctcatgtttaagccagaacctagcacgtggtacttgttaaggcatccctagaaaactaatacactcactgaatgaggcaggtagctgtttcttttattttttgagacagagtctcactttgtctccaaggccagagtgcagtggagcgatcacagctcactgcagcccctgccttccgggctcaagccatcctcccacctcagctacttgggaggctgaggtgggaggattgcttgggcttgggaggtgaaggctgcagtgagccttgacagtgccactacactccagcctgacgacagagtgagaccctgtctcaaaaaaagagttgctgtaattcccagcaacaaagtaggagactcaaactaaataattttctatagtcctagaacttcttagtttacanaacatttttacttctgttattctccattgatcttcatacccatgtaaggttaggcaaatgtttccccgctgtgggtgcatatcccgaatcctggaaaccctgt

SEQ ID NO: 197065 - DNA, 708 bp, Homo sapiens
gtcaaggatctcctgggtggtttttaagaataacaactagtatttgttgagcaccatgcttggtgttagctttatgtaatcttcacaacaaccccatagtatcagtcccatgttataggagtggaatctgagactcagaaaggttgtttcagttatctgttgtataacatatcacccccaactcactggcttaaaacaacaatgatttattatttctcatgattctctgagttggctgggaggctcttcttgcttcgtgtgatctttcgtggggtcactcttgttacttaattcagctgtcagcctgtctgggtgtaggctatccaagatgacctcactgacatgagtagggtcttggtttgcctccacgaggcctctctcagcacatagtctgtcatcattaggtggtctagcttaagctgctttacatgacaactagcttccaatagagtgaaagtggaagctgccaggattttgggctaggcccagaactggcacagcatcacttaccccttattccagtattcaaaacaagtctcaaggccagtcactttcaacaggagggggaacagatatcaccttcctcctccccctctttttttggtatattcgacatacaattcatgtaccatacaatttacccatttaaagttgtacaatccaatggttttcagtatatcaacagagtttttcaaccatcaccactat

SEQ ID NO: 197066 - DNA, 695 bp, Homo sapiens
gtccaaccctagccaatatgggaaagacacagcagtagagactagctgtgtaagagataggaaccccttccccttccttgtcggtgtgctctcgccattgctccatccgcaagatgcacccttctatagaaggaaatttgccttgctgagaaaactgtttgccagagtgctgattcttctttgcggcacccaaaatttatttccaacaagcctgaccaacatggtgaaaccccctctctactaaaaaatacaaatttagccgggcgtggtggcatgcgcctgtaatcccagctactctggaggctgaggcaggagaatcgcttgaaccctggaggcggaggttgcagtgaaccgtgattttgccactgcactcagcctgggcaacagagtgagaccctctcccccaaaaaacaaaaacccacaggaaagggtgctccttttccctccatctgacaggaagaccaacgtttggaaaggccacgtgcccctcaccaaggtgacagggcctgcatgtggcagagcagggctgggcatccagagccctgtccccagctcctgagctcttctgctgcctcactgtaggctccggcccgtccaggtacctgtgccttcacctcagctcacattttcccccttttctgtccagatacaggcctggcgagctatgatcgatttgggttacccgaaaaccaatc

SEQ ID NO: 197067 - DNA, 439 bp, Homo sapiens
ttgaatgcagattagttagcacctggaccatgtggtggaggatctggaatgctagaaaacttatcatttatccattaatacgttttgactggaagagtttcatgaggagtttcagggagattgatctggtgtcataatgtagatagatttttttttttttttttttgagacggagtcttgctctgtcacccaggctggagtgcagtggcgcaatctcggctcactgcaagctccgcctcccgggttcacgccattctcctgcctcagcctccccagcagctgggactacaggcgcctgccaccacgcccagctaatttttgtatttttattagagatggggtttctctgtgttagccaggatggtctcgatctcctgaccttgtgatctgcctgcctcggcctcccaaagtgctgggattactggcatgagtccagcca

SEQ ID NO: 197068 - DNA, 273 bp, Homo sapiens
atgtcaactccagtgataaagaaagaaaaagtctgagatattagcaagccattacagcaatatatttgaaaacagtatatactgagtctactgcaaaagactcatcattagatatgattacttctattttcattagtaaacacttcagtggatggagaaaaagcattcaatgaaattcaacattcattaaagtttaaaagaactctcaagaaaccaaaaatggaaaataatttactaagccttataaaactaatcagtccaaaaggtacggca

SEQ ID NO: 197069 - DNA, 402 bp, Homo sapiens
tgaggtacatgctgtcagcttgatgctggagtttggcctctcaaatctctaacctgttaaatgaagttaattaggattaattttttttaatgtatgtttactactgaaaataagtgctcggccagacgcagaggctcacgcctgtaatcccagcactttgggaggccgaggctggcagatcacctgaagtcaggagtttgagaccagcctggccaacatggcgaaacactgtctctattaaaaatacaaaaattagctgggtgtggtgatacatgcctgtaatcccagctactcggagcctgaggcaggagaactgcttgaacccaggaggcggaggttgcattgagccaagattgtgccattgcactccagcccaggcgacagagtgagactcatgtctca

SEQ ID NO: 197070 - DNA, 481 bp, Homo sapiens
cagcaataagaacaaatggtaaatgaacaaacccaagtatgacaattaaatttattcaatatgttgtatttacaaatataaatgcaaatctgtattagtattttaatcctcatagtcattatgaaccttatctcaaaggatttgatctgcaaacgtcaaaatttcaggtttgggtttatttatgagtcttccaatgatcttactttcaatgtttttatacttagttctgaaaattaaattaaccaaataactaaaaagatgattttaaattttattttatgaaatgacagatggtttctggttaactgtgttttattttttgttgcatatttgttaaaaagagaatggttagatctggaaaatgctgttaaacattccttcttttagttttatgttcagacatttattattcagcagtgagtatgatggctttttaaataaccaaatcagttggaaattaaagctgcttttaaaaatgtct

SEQ ID NO: 197071 - DNA, 639 bp, Homo sapiens
ccccctgccgttagttctgagtgacgctgttcattcttcccacccaaatattctcccaaatgtccgcagccctagagagctcgacctccaatccttgcttgctcacactcagccccttcagcacttcaggaaggcagggatttgaacaactgaactcaaggcatttggcaggggccagttttgctaagaaaagaaaagaaaatgcctcttttattgttgcaatgccccagacaaaggcagagaacagttcatgtcaccctcaggaatacctaaggatactgagcacatgtctaaatgggatgagaggtgggcgtcgggagttctaccgcctgccccctttattccctgagaaggggcgttgccttgtcttcaggatctgtgtttctggatgtccacagcagactgcatgacctccttcttaggcagatgtggcaggtgtggctacaccagtcaagacgggggagagagctccctcctctggaagcttcagttctgagcccaggtgtttgtcctgcactcaggatatgctggtttctagcaaacaggaatcacagagagacacttaccttccggttgatgtgagcggtcatgagtgcatgtcggtgcatcttcacaatgcagagaaccagaccagtccac

SEQ ID NO: 197072 - DNA, 203 bp, Homo sapiens
ccagagtattcgacactctaggggcactgatttagatttcagagaagaaataattgccaatcttttcttagcaacagaaggggaccaacttttctggggctttccaggggctggggacggccatagtgtgggaggatgtctagaggtgggagggatccataatgaagaagctcgcccaggaagggtccatgttgccagatgct

SEQ ID NO: 197073 - DNA, 381 bp, Homo sapiens
ctagcataagcaagttcattgtcagttttcaattgtttagggacccccctatatgggcaaatgacaacaatgtcaccaggcatgaccagctatttcccctgtttggcatgtggcatgcagcatatgggagtaggagtctatagtcacatggacatagctgagtttgccaaaggtggctatattggtaacatccatctgtcagatttcatctggagccaaacctcgtggggtgcatccttctacacgggcaacaccagggacatactggcaagtggggcaggcttgcacaatagcttaagcttggctgcaaggcagatgaaacatacgagtaagtgcagagttgttttgatgcagtaatgcatgagaagcttgggcttgttg

SEQ ID NO: 197074 - DNA, 635 bp, Homo sapiens
  misc_feature (248)..(248): n is a, c, g, or t
  misc_feature (288)..(288): n is a, c, g, or t
  misc_feature (321)..(321): n is a, c, g, or t
  misc_feature (341)..(341): n is a, c, g, or t
  misc_feature (343)..(343): n is a, c, g, or t
  misc_feature (348)..(348): n is a, c, g, or t
  misc_feature (414)..(414): n is a, c, g, or t
caccgttgaaatgacaacaaaggactgaaaacactgcataaacttagttgatagagcagtggcagggtttgagaggattgcctctgattttgaaagaaattctattctagctgagatggcatcaaacagcatcacatgctatagaaaaatcgtttgagggccgggtgtggtgactcatgcctataatcccagcacttgagaggcccaagcgggcagatcacctgaggtcaggagttcaagaccagccntggtgaaacctatcccagttacttggggaggctgaggccngagagtcgcttgaaccgggaggcgaaggatgcnggtgagctgagattgagccncngcgcntcagtctgggttggcagagtgagactcggtctcaagggggaaaaaaaaaatctctagcttagattnggctttatctttcttagaaatgctccattttagggtctattaatatgctggttaactgataatatagaaataatgactgatatgtgtatcctaaagttagagattcagcatgttaatagtgtgtttgctaatgaacctcagtaaactattaggaaaatgaacttctagacatttttttgcttcctgtagttgcgtggatgatcgcagcaaatcaggaaagg

SEQ ID NO: 197075 - DNA, 388 bp, Homo sapiens
tgctgacataggtgtgagccaccaggcctggccccattagtggtctttttcttattgtggttttctcgtgttatacactcatgtaaaatgaaaagtttttgatggtaccctatatgatttaatatcacaaccttgctttacactgcccctggcatctttgttgaggaattatttataattatgtccttttgacgcttcaataattaaacttgtgctgtattttggtattccagaataccaaatttggaaacactggaaaataattaagaatttattaagtttttttgcttttcataactgttgggtattatctaacaattatctggaaatcagttcagaaagacagattttaggccaggagccatggctcatgcctataatcccagtg

SEQ ID NO: 197076 - DNA, 296 bp, Homo sapiens
aattcatttattcattcaacaaatattcattgaacacactacatggcacagtagggaacaaaacagacaatcccctaccctggtggagcttacatgctaatgaaggagacagacattaacaaaaaaaagataaatacatagccacaaacttgttaagtgatattaagaaaatacagggtgtggccgggtgcagtggcttacacctgtaatcccagcagtttgggaggccgaagcgggcggatcacctgagatcaggagtttaagaccaggctagccaacatggtaaaatcttgtct

SEQ ID NO: 197077 - DNA, 570 bp, Homo sapiens
tatgtactaccagtagaaaatctacttatgttatttatgtgaactgtacttaataaatgacataaatatatgtttagaaacaacaacactccattttcaaggctgagtggctgtttactgagatctgggaagagcctcagtaactgcctgtaaaataaagaacaatttttattaactcttttccttagtaagaaagatgtaaaccttgatgcaatactcattaactagaatccttccatcacaaaatttttgttcacatatgtttaaggactttttgtttgtttgtttggagatacgagtttcactctgtcacccaggctggtgtggtggtggcatctcagttcactgcaacctccgcctcccaggttcaagcgattctgctgccccctgcggcccccagtagctgagattacaggcatgtactaccacgccaggctaatttttgtataaaatttccaaaaacttaaaacaacaatggctacatttattgaacctctagtctgtcaatccttaaggatttaaattaattacttggtagaatatatcgggtatgttttgttgataacataa

SEQ ID NO: 197078 - DNA, 1231 bp, Homo sapiens
gaaattcattaaagtaggaaaagctctcattcaagagcacagggaaatgaaaacctttaaggatttgaatgactgcaccaaataatataatatcaatgtttctaaaacataaaataatggagttctaagaacttaaaactcattagaattaggacatcataatgtctcatctgattaaacagtaggtacagtggacattaaataaatatgcctagagaggctataaattacatttgtattaaagtgaaccatacatttgtgtatatgtatgctaatgcaaaaaacaaaactttcatgttttaattgaataatgataaaatagagtatactattagtctaaagagaaaacctcaataaatctaacaaattagaataaacacaaacagtattctctgaacctagtttggtaaatctagaaattaataataaaatgaaaaaaatccacttgaaaaaattttagtatctcttttaaacaatatacaaaaaagtgtaatgcaattttggatttgatttctgtaatgaaataattgtaactgcaagttagaaaccatcaggtatagctaaagtagtggacagaaggaagttcgtagtctcattaattaagcaagaacagcatcaaaaatacaatagtgaaaacagaagaatttaaaagtaaaattaaaaataaaatggaaaacagaaatggaatgtttcttacaagaaaaataaaatgaattaaacttaaccctatcaaagaaaaaagagaggaaacacctatataataaattcaagtcaggatacatctgtaaagaggtaacgctataccaaacacaatcccattcataaaaacgagtgatacaggaggatttgctgctctaccagatattgaggctttatgtaaagtgctgtgtagctaagtagcatggagctggggggtgggatgatttagtaaattagtgaaacagagtagaaagttaaagaaaaaaacatgaggccaggcgtggtggctcatgcctgtaatcccagcactttgggaggccaaggtgggtggatcacaaggtcaggagatggagacccgtctctactgaaaatacaaaaaaatcagccaggcgtgatggcaggtgtctgtagtcccagctacttgggaagctgaggcaggagaatggcgtgaacccaggaggcagagcttgcattgagccgagattgcaccactgcactccagcctgggcgacagagcaagaccccatctcaa

SEQ ID NO: 197079 - DNA, 418 bp, Homo sapiens
gaggattcatgctgggggacaaggggtgtcctgtataccctgagttgttgagttgtcatggaagggctgctttgaggatgcctttgctgggaaggttcttcccagtactccctaaattcccatcttttcatccttcaggtctcgcggtaaattctgccttcccagagatgccttccttgagtaatgtgggtttcccttactcccattcatgtgaacaccctttatagctctatgtcccctaataattattttatttatttgcttgtctacttattttctaagaaaattttcctcccattcaactgtaaactatggagggcaggggacatatctctgatttatctttgtatttctagaacctggtgtagcatctggcaagagtagaagctcaaaaattatttctcgaatggataaatga

SEQ ID NO: 197080 - DNA, 381 bp, Homo sapiens
tttagtaacatctacacctgcagtagcctttaaatctggttaataaagatgcctattgccacttaattgttttatctactgcacagcaagctgaacccatggctcaaatctgaattatccatgaaacaaaataccagaaactataaatgaagtattaccacacatcctttgatataaccattattaaaaccttaaagataaaatttattagcacatatttattgagtgcccacaatgttccagatactgtgtatacaacagtgattaccaccatttgaattgtgtctcccaaaattcatatgttgaagtcctaactgccagtacctcagaatatgactgcatttggagacagagcatttaaagaggtagttaagttaaaat

SEQ ID NO: 197081 - DNA, 272 bp, Homo sapiens
atattggatcaggggaggatactggaagaagagctccatgggatttgcttggtgctcgtgagattttgactgacaagagatcttagggctactatattacccaaattcaggggactctgttcactttgccagcagcctgggattaattctgtagtgctaatgccattctgagaagcctttcaatgaatctgagctcagggttcttagtccccctgttactgaagcttctccccagacagtgtcgtttttgttttttccttcctttctaagct

SEQ ID NO: 197082 - DNA, 258 bp, Homo sapiens
  misc_feature (48)..(48): n is a, c, g, or t
gaccgagatcggcaagggggtcggccaagggggtcggcaagggggtanggccaaagggggttcggccaaggtcaggtcactggataaagccaacagagtagagagattctgatttctcagttcaccttgagttcagtaatattctcaaaatcatagtaacagaaaaccacagaattaattcagctctataggctcatggtctgagtagtgaatcttcttagatccaaacattggcacctctgcctaccagctgggcaa

SEQ ID NO: 197083 - DNA, 3691 bp, Homo sapiens
cgtgtgggcagcggaggagccaccctcaacgccctgctggtggctgctgaacacctgagtgcccgggcaggcttcactgtggtcacatccgatgtcctgcactcggcctggatcctcattctgcacatgggtcgagacttcccctttgatgactgtggcagggctttcacctgcctccccgtggagaaccccgaggcccccgtggaagccttggtctgcaacctggactgcctgctggacatcatgacctatcggctgggcccgggctccccgccaggcgtgtgggtctgcagcaccgacatgctgctgtctgttcctgcaaatcctggtatcagctgggacagcttccggggagccagagtgatcgccctcccagggagcccggcctacgctcagaatcatggcgtctacctaactgacccccagggccttgttttggacatttactaccagggcactgaggcagagattcagcggtgtgtcaggcctgatgggcgggtgccactggtctctggggttgtcttcttctctgtggagactgccgagcgcctcctagccacccacgtgagcccgcccctggatgcctgcacctacctaggcttggactccggagcccggcctgtccagctgtctctgttttttgacattctccactgcatggctgagaacgtgaccagggaggacttcctggtggggaggcccccagagttggggcaaggcgatgcagatgtagcgggttatctgcagagcgcccgggcccagctgtggagggagcttcgcgatcagccccttaccatggcctatgtctccagcggcagctacagctacatgacctcctcagccagtgagttcctgctcagcctcacactccccggggctcctggggcccagattgtgcactcccaggtggaggagcagcagcttctggcggccgggagctctgtggtcagctgcctgctggagggccctgtccagctgggtcctgggagcgtcctgcagcactgccacctgcagggccccattcacataggcgctggctgcttggtgactggcctggatacagcccactccaaggccctgcatggccgggagctgcgtgaccttgtcctgcagggacaccacacgcggctacacggctccccgggccacgccttcaccctcgttggccgtctggacagctgggagagacagggggcaggcacatatctcaacgtgccctggagtgaattcttcaagaggacaggtgttcgagcctgggacctgtgggaccccgagacgctgcccgcagagtactgccttcccagcgcccgcctctttcctgtgctccacccctcgagggagctgggaccccaggacctgctgtggatgctggaccaccaggaggatgggggcgaggccctgcgagcctggcgggcctcctggcgcctgtcctgggagcagctgcagccgtgcctggatcgggctgccacgctggcctctcgccgggacctgttcttccgccaggccctgcataaggcgcggcacgtgctggaggcccggcaggacctcagcctgcgcccgctgatctgggctgctgtccgcgagggctgccccgggcccctgctggccacgctggaccaggttgcagctggggcaggagaccctggtgtggcggcacgggcactggcctgtgtggcggacgtcctgggctgcatggcagagggccgtgggggcttgcggagcgggccagctgccaaccctgagtggatgcggcccttctcatacctggagtgtggagacctggcagcgggcgtggaggcgcttgcccaggagagggacaagtggctaagcaggccagccttgctggtgcgagcggcccgccactatgagggggctggtcagatcctgatccgccaggctgtgatgtcagcccagcactttgtctccacagagcaggtggaactgccgggacctgggcagtgggtggtggctgagtgcccggcccgtgtggatttctctgggggctggagtgacacgccaccccttgcctatgagcttggcggggctgtgctgggcctggctgtgcgagtggacggccgccggcccatcggagccagggcacgccgcatcccggagcctgagctgtggctggcggtggggcctcggcaggatgagatgactgtgaagatagtgtgccggtgcctggctgacctgcgggactactgccagcctcatgccccagggccctgctgaaggcggccttcatctgtgcagggatcgtgcatgtccactcggaactccagctgagtgagcagctgctccgcaccttcgggggcggctttgagctgcacacctggtctgagctgccccacggctctggcctgggcaccagcagcatcctggcaggcactgccctggctgccttgcagcgagccgcaggccgggtggtgggcacggaagccctgatccacgcagtgctgcacctggagcaggtgctcaccactggaggtggctggcaggaccaagtaggtggcctaatgcctggcatcaaggtggggcgctcccgggctcagctgccactgaaggtggaggtagaagaggtcacggtgcctgagggctttgtccagaagctcaatgaccacctgctcttggtgtacactggcaagacccgcctggctcggaacctgctgcaggatgtgctgaggagctggtatgcccgacttcctgctgtggtgcagaatgcccacagcctggtacggcaaactgaggagtgtgctgaaggcttccgccaaggaagcctgcctctgctgggccagtgcctgacctcgtactgggagcagaagaagctcatggctccaggctgtgagcccctgactgtgcggcgtatgatggatgtcctggccccccacgtgcatggccagagcctggctggggcaggcggtggaggctttctctatctgttgaccaaggagccacagcaaaaggaggccttggaggcggtgctggccaagaccgagggccttgggaattacagcatccacctggttgaagtggacactcagggcctgagcctgaagctgctggggaccgaggcctcaacctgttgccctttcccatgaagctggcttctctctgcaacaggagaaaacctggagctacagtgtcccccaccttccttgccccatgggaacctccacctcctactccccacccacctctgcgaatctgctcccaaaggaagctgaccagagcaagatctgggcaagcagagagtgcctgggacaggactgtgacctggtggacaggggcctagatgtagcctctgttcctcctggacataggaaggtcccaagcttagtatcccacgtggcctttacaaatcctatggctggccttctcattccacaagggccctggaaagggttgacagccagccttggcatatggctgggagtcccttagcaaggccaaccctgaagaggccctttgaggcattccctatggcttagagttgtagacttacactcaaccctcatgtgagcgtgggagtgagggtggcggtcccttgccaagttggtagcagtgacccagtgattcactgccatcccaggccttaactagcaaaactacggagcgtgccaagtgacctggtgcctgtgggaagtgggttctcaggactggcattcttggaataaattcactctgtccttgc

SEQ ID NO: 197084 - DNA, 2625 bp, Homo sapiens
cgtgtgggcagcggaggagccaccctcaacgccctgctggtggctgctgaacacctgagtgcccgggcaggcttcactgtggtcacatccgatgtcctgcactcggcctggatcctcattctgcacatgggtcgagacttcccctttgatgactgtggcagggctttcacctgcctccccgtggagaaccccgaggcccccgtggaagccttggtctgcaacctggactgcctgctggacatcatgacctatcggctgggcccgggctccccgccaggcgtgtgggtctgcagcaccgacatgctgctgtctgttcctgcaaatcctggtatcagctgggacagcttccggggagccagagtgatcgccctcccagggagcccggcctacgctcagaatcatggcgtctacctaactgacccccagggccttgttttggacatttactaccagggcactgaggcagagattcagcggtgtgtcaggcctgatgggcgggtgccactggtctctggggttgtcttcttctctgtggagactgccgagcgcctcctagccacccacgtgagcccgcccctggatgcctgcacctacctaggcttggactccggagcccggcctgtccagctgtctctgttttttgacattctccactgcatggctgagaacgtgaccagggaggacttcctggtggggaggcccccagagttggggcaaggcgatgcagatgtagcgggttatctgcagagcgcccgggcccagctgtggagggagcttcgcgatcagccccttaccatggcctatgtctccagcggcagctacagctacatgacctcctcagccagtgagttcctgctcagcctcacactccccggggctcctggggcccagattgtgcactcccaggtggaggagcagcagcttctggcggccgggagctctgtggtcagctgcctgctggagggccctgtccagctgggtcctgggagcgtcctgcagcactgccacctgcagggccccattcacataggcgctggctgcttggtgactggcctggatacagcccactccaaggccctgcatggccgggagctgcgtgaccttgtcctgcagggacaccacacgcggctacacggctccccgggccacgccttcaccctcgttggccgtctggacagctgggagagacagggggcaggcacatatctcaacgtgccctggagtgaattcttcaagaggacaggtgttcgagcctgggacctgtgggaccccgagacgctgcccgcagagtactgccttcccagcgcccgcctctttcctgtgctccacccctcgagggagctgggaccccaggacctgctgtggatgctggaccaccaggaggatgggggcgaggccctgcgagcctggcgggcctcctggcgcctgtcctgggagcagctgcagccgtgcctggatcgggctgccacgctggcctctcgccgggacctgttcttccgccaggccctgcataaggcgcggcacgtgctggaggcccggcaggacctcagcctgcgcccgctgatctgggctgctgtccgcgagggctgccccgggcccctgctggccacgctggaccaggttgcagctggggcaggagaccctggtgtggcggcacgggcactggcctgtgtggcggacgtcctgggctgcatggcagagggccgtgggggcttgcggagcgggccagctgccaaccctgagtggatgcggcccttctcatacctggagtgtggagacctggcagcgggcgtggaggcgcttgcccaggagagggacaagtggctaagcaggccagccttgctggtgcgagcggcccgccactatgagggggctggtcagatcctgatccgccaggctgtgatgtcagcccagcactttgtctccacagagcaggtggaactgccgggacctgggcagtgggtggtggctgagtgcccggcccgtgtggatttctctgggggctggagtgacacgccaccccttgcctatgagcttggcggggctgtgctgggcctggctgtgcgagtggacggccgccggcccatcggagccagggcacgccgcatcccggagcctgagctgtggctggcggtggggcctcggcaggatgagatgactgtgaagatagtgtgccggtgcctggctgacctgcgggactactgccagcctcatgccccagggccctgctgaaggcggccttcatctgtgcagggatcgtgcatgtccactcggaactccagctgagtgagcagctgctccgcaccttcgggggcggctttgagctgcacacctggtctgagctgccccacggctctggcctgggcaccagcagcatcctggcaggcactgccctggctgccttgcagcgagccgcaggccgggtggtgggcacggaagccctgatccacgcagtgctgcacctggagcaggtgctcaccactgtagagacggggttcccgtgttagcaggatggtctcgatctcctgacctcgtgatccgccgctcggcttccaaaagtgctgcgatttcaggcggtggcccccggccagactgtgtgtgctctcatgctgttggaccggggtg

SEQ ID NO: 197085 - DNA, 363 bp, Homo sapiens
ggctagctactgccagctatcttgggccaggcatccgctggggggcactggctgtctttgaagcctgcagggggagggaagggaagacgtgatgtaaccttggttcataacagctgtctgcgacttcattttccaggaaaggagaggctgtttgaccccatgggacacagccttctgcaactcctccctgggaatcgtggggctgctggtggagggctctggctgatctgctctggtggttctgagggctctggtggagggctgctgcttttgcgggttgggtagagccagtcctggttatctatcttggcaggctttgctcgtgtcctgtgatgctgcacaaagtatgaattacggagcttg

SEQ ID NO: 197086 - DNA, 144 bp, Homo sapiens
cccccttccctctcttctctttctctctctgtcacacacacacacaccacacacacctccccacctctcgcaaaactggcttctacctactctgtgagtgctgcagacttctgtgatcgttgtttttctgttgcttcttctaga

SEQ ID NO: 197087 - DNA, 551 bp, Homo sapiens
gatcatcctttaaattgtttttccagaacctggcctccttttatgtcatgtgatttcctccaaagcttcagtatgtgggtatttgtcttctaacttgccaactatgctaagcagctgcagctctgacctcccccagatttttataaaatcacatcataagcctccatctctctttaatatgataatataaagaatcagtagactgtggatattatgtttatttcctcaggtgttgatatatcgatgggcacacacaggaacatgcataaacattcaatggatattcatactgaaaccatattataatcctaggctttaaggaagaaagtttagcactttctggtgttctggtatatatatcatggggacattttacaggtgactaatagcagctaatctcttattaactatatagataggtggttaaaatttaaagcattttagaagagtaacataggccttctgacttcctaaatgcatggtgggcatggccaaaatgcacaggcaatgtccaaattctccagttaaacttgacatatgttcataatgtc

SEQ ID NO: 197088 - DNA, 572 bp, Homo sapiens
cgaaaaggaaaagatgtgcttattattacaactagcaagttcagcatttatgacctgtcattataaaacagatcaccatgctgtctgacccacccttgaaaatcgtgaagtgcaaacacactaattatgttcctactgaaattcaggttcttaacttcaggcttcagcttaacctgctttagagcacgcatactttttgccacgataatactcataggactagaaacaactaggagatgttattttattttttaaatcagactgaacttcaggcagatttccttatattgtaaattagtggcttatttatatgacctttatagggcatctaatgatagtgggtttttttttctttttttttttgagatggagtttcgctcttgttgcccaggctggagtgcaatggtgcgatctcagctcaccgcaacctccacctcccaggttcaagcagttctcctgcctcagcctccagagtagttgggattacaggcatatgccaccatgcctggctaattttgtatttttagtagagatgggatttctccatgtcggtcaggctggtctcaagctcc

SEQ ID NO: 197089 - DNA, 756 bp, Homo sapiens
taaaacacagtgagggtgggccaggcacagtggctcacacctgtaatcccacctgaccaacgtggtgaaaccccaactgtactaaaagtacaaaaaaattagccgggcttggttgtgggcacctgtaatcccagctactcgggaggctgaggcaagagaattgcttgaacccgggacgcagaggttgcagtgagcagagatcgcgccaccgcactccagcctgggtgacaaagcgagactctgtctcaaaaaaaaaaaacgatggggtattgacagacaactaaataaatttttaaagacaattaaaaataataaataagatggaaatttaagattaaaatggttatttgggagttgtctacatagagatggtaactgagaagttatgagtcgatgcactcctttaactggaacataaaaagaaagaaaaataggtgaataatgactgaatattggggtactacccccatgaagtaggttaattaagaagacaaatgatcagaaaagtagtgagaaaactgaaaaatcctaatgccttgtaagtcagtattagaaaactttaagaactaagatttcagcctgaggaagctgattaaaaaataaaaataaaaaaccacaccaagattgatggcaatagatgtaattgaaaagaggaaacagaactgaggaatgatttttgaatttgagtaggaggaggtcattggtatttttagaagagtttctgtggaatacagaacacagaaatcatgttacaga

SEQ ID NO: 197090 - DNA, 501 bp, Homo sapiens
tgacctagaggttcccaatttccaactaaataaatttttaaagacaattaaaaataataaataagatggaaatttaagattaaaatggttatttgggagttgtctacatagagatggtaactgagaagttatgagtcgatgcactcctttaactggaacataaaaagaaagaaaaataggtgaataatgactgaatattggggtactacccccatgaagtaggttaattaagaagacaaatgatcagaaaagtagtgagaaaactgaaaaatcctaatgccttgtaagtcagtattagaaaactttaagaactaagatttcagcctgaggaagctgattaaaaaataaaaataaaaaaccacaccaagattgatggcaatagatgtaattgaaaagaggaaacagaactgaggaatgatttttgaatttgagtaggaggaggtcattggtatttttagaagagtttctgtggaatacagaacacagaaatcatgttacaga

SEQ ID NO: 197091 - DNA, 455 bp, Homo sapiens
ttttatatggtcacgtagtcttccacgatttttgtgtaccatattttgtttttactaaatctttattttatttttggaagagcgtctcactctgtcacacaggctggagtgcagtggtgcaatcttggctcacttcagccttaacatccaagtctcaaggctcaaggaatcctacctcagcccgttaagtaactgggactataggcacacaacatcatgcctaatttttcttttttgtattatttgtagagatacagttttgccatgttgcccaggctggtattttattttattttattttattttattttttgagacagagtcttgctctgtcaccaggctgcagtgcagtggcacgatcttggctcactgcaacctctgactctctgcttcaatcaattctcctgcctcagcctcccgagtaggtggggtaacaggtatgtgcaccatgctca

SEQ ID NO: 197092 - DNA, 642 bp, Homo sapiens
gccataaatagataagtacaggtacttcatttaagttttactttcataggcacttgcataaggtcttaaaaattgatcgaaactcaccaatgtaatccttacacagtcttttaaggcctggatcaaactttgcctctttcaagaaatcaccctatattcctcgagtcaggattaatctatccagtgttaacaatggtgataacaataacagcttgcatttattgagttcttactagtcagccactccacaggtttcatttcatttaacacccaaacagaactgtagaaggtaggcactaacaaggatttactgaaagtctgttacatgatcactgtcttcatgacactcagaattttgtgggaagggaataggaacaattaattacaatactaagcgatgcctgcaacaacaggattagcaataggagcactccaggacagcagttcttaaagctgattatgcataagaaccagtactcttaaaatccaaaccatctaatacaacatttaaggccttgaatgatacaattcctgccagcctcgaccatctaccttaccattctaccactcaggaagggcttcacagagatgacttttgagctgactctaaaagagtgaacaaagtttatcaggtgaccaaag

SEQ ID NO: 197093 - DNA, 185 bp, Homo sapiens
cctgtttctcaccaataagaggggtcagggcagagtgagtctgggagagagagttctaccaccacggttcccaaagcatcgtctaggggcctgttaggggagcccgaggtctaaactatttccacagtttcactaagatatgattttccttttccatcctcacattcgttagtgtgcagtgaagt

SEQ ID NO: 197094 - DNA, 293 bp, Homo sapiens
aaatgctctgtaatcaggaaaaaataaggctgcttcaaatttatacatatttaacaaacatgtatacgtaccatttccctagatagtacatatctaaagactcagtaactgtgttaaggaagaataataatgaacatttattgaactctcactgcggggcagactgtgttttaagatttttaagggtattatctaatttaatgtgtataacaaccctataaagaaaaattactcttattactcttttctataaatgatgatgctttagttttagaaagcttaaatcattttcc

SEQ ID NO: 197095 - DNA, 491 bp, Homo sapiens
acagaaggaagatttaatgtagtaatggtttagaactttccaaacttgtaactgacaccaaaccacagatccagaaagctcaacgaatgccaacaccaagcaggataaatgccagaaagtcaaccccaggccaccttgtattcaaactgcagaaaatcaaagaaaaaagagaagatcttgaaagaatccaggagattccttataggcgaggtgattccttatctgtaaaggaacaaggataacaattacattggaccttttcccaggaaccatgcaagaaggaagagagtagtgtgaaacatttaaagcattataagaagaagaatatcatattcagaaaaagattattcttcaaaagtgaaggaaattgactttgtcagataagcaaaaattgaagtaatttgttgccagtagacctgccttgcaagaaatgctaaaagaagctcttcaacggaaggaaatatcatatagcccagaaactctggtttacc

SEQ ID NO: 197096 - DNA, 178 bp, Homo sapiens
catgtccagctgaggaatgagactggggtggggagcgaggagagcactgcttcacgctaacagccacttttccttcacacttccagtcttgcccggcttgcaaattttcgctgatgtattttatgaggtcacttattattacttagtacctatcacatttactacttctgatggctca

SEQ ID NO: 197097 - DNA, 377 bp, Homo sapiens
tctttgctttttaagagaagacaggccgggcacggtgactcacacctgtaatcccagcactttgggaggatgaggtgggcggatcacgaggtcaggagtttgagaccagcttgaccaacatggtgaaaccccgtatctactaaaaatacaataattagccgggtgtggtggcgcacgcctgtaattccagctctgtaggtggctgagacatgagaatcgcttgaacctgggaggcagaggttgcagtgagccgaggtcgctccactgcactgcaccctgggcaacacggtgagattctgtctcaaaaaataaaaaaagaaacatcctaagtcgaatcatggtaagttgggggctgcccctacctctccccagctgaa

SEQ ID NO: 197098 - DNA, 462 bp, Homo sapiens
ctttggcagggggtggttattggggaaggcttctcaaggagaacctctgaactgaaacccaaaggatgagaagaagccagcatgccgagatcttgggaaaaaggttccagccagagggaagagtcactgcaaaggctgctcaggccctagaaagaagacacaggtggctggagtggtaggaacaagagggaagtgaatggaaatgggtcaaagaggttcgctgtgagtctctgcaaattctagtagggaacaggaagccactggaagattttcaaatggaaaatacaatcagattcgtttccaaaatctcattctggctattatatggaaagcgactgtttcacatgtgtgttcaaggtcccagctcagtttttctacccagcagcatgttcccaattcacaggcataaaaagattgaacctcttcttgaccaatgctgactagtaactcactggcccttct

SEQ ID NO: 197099 - DNA, 513 bp, Homo sapiens
attgtatgaacatactacagtctacttattacttgttgacagacatttagtgtctttccaaattttactgtaacaaacaatgctcctacaaatatttgtgtactttatgtaaaactcacgtgcatgtattaaaatttctccagggtatatatctagaagtaaaattagtatgaaaaaagtatgcagtatgcatatcattgtgggctattgtctgtttacattatatggctattgtattagttaacactttcaccagcaatttataagattctcatttctcctcattttcccacatatgcatacatacataaatacatacatacataccctttgtgacttatttatcaaataatagttaatgatatgtctgagcaatgctaaagagatcaactatggatatgtgctattgtacataataaccattctcctattgtaatataattacatcattgttttcttttcctgaaatcaatttctttgcaattatttattcaggataatgttcaaattgaa

SEQ ID NO: 197100 - DNA, 795 bp, Homo sapiens
ctgcactccagcctgtgtgggagagccagaccctgtctcaaaaaaaaaggccttgggctgggcgaaatggctcactcacacctgtaatcccagcattttgggaggttgaggtggacggatcacgaggtcaggagatcgagaccatcctggctaacatggtgaaaccccgtctctactaaaaatacaaaaaaaaattagctggtgtggtgacacgcacctgtagtcccaactactcagaaggctgaggcaggagaatcacttgaacccgggaggcggaggttgcagtgagccaagatcgcgtcattgcactccggcctggcgacagggagaataaaaaaaaaaaaaaccctttatggggtgacaggacaggactaagcctcagtgagccaggctggggaggtcatcatcggcccaatctttcttttcaaaaaggtcaaattgacttacttatctagggagaaatggggccctcctgcctaggtgagaaactagagctgggcttcttcaccagataaaccgtcttggtacggtgatgcctggagactggtagaggcaaccatgggctccagcagcataaatgctttcaggcaacaggctgaaacacctttccagaatcccagctacacacctgaccgagcacagtggctgatgcctataatcccagcactttgggagcctgagttggagatgaccctgggcaacaaagggagccaccccgtatctacaaaaaaatataaggagccgggcacagtggctcacacctgtaatcgcaacactttgggaggctaaggaggg

SEQ ID NO: 197101 - DNA, 208 bp, Homo sapiens
gacacacaaaaaatggagatatcccacgttcatggattgggagaattgatgttgttgaaatgcttatgctacccaaagcgatatactgtcaatgtaatctttatcaaaataccaatgacgttcttcacagaaatagaaaaaaaaatcctaaaattcgtatgaaaccacaaaatgccttgaatagccaaagtaatgctaagcaaaaaaa

SEQ ID NO: 197102 - DNA, 274 bp, Homo sapiens
tgacttttctaattccttggctttccatataaatttcagaattagtgtgctgatttctataaagaaatcttgctggaattttgattggaaatgtattgaatctatattgagtccaaaatctatattagatctatcagtttgaagaagctgacatttaaagaatattgaatcttaacaacattatgtctttcaacctatgagcatggcatatttttctacttatgtaggtattctttttttttttaaagaaatatagaagagagatgacttgatt

SEQ ID NO: 197103 - DNA, 507 bp, Homo sapiens
tcaggtggccacactatgtcaagaagcctctccacactctgtggcacttccagtcccataaatcctgtttcttatccactttggaaatgcatgaacactttacaaagaacatgcccgggtttttacattttaaaagttattctagacaatcactattggcttttttcttttatttttaaaaaactcacatagaggagacaatcagaaatttaccatagtcccaagaattcagctacatgatgactcgaatttaaatttagattaatcaaatggtctcctgttctctgatttctggtggcttttagacactaatttttgagaactacttttttttttttaccaaacttcagggacactctgctagttttgaataagtaaccatcaaagttactaaaacatggccaggcgcagtggctcatgcctgtaatcccagcactttgggaggccgaggtgggcagattgcctgagctcaagagttcgagaccagcctggccaacatggtgaaac

SEQ ID NO: 197104 - DNA, 568 bp, Homo sapiens
aacgagctcttaccgggtgggagtacggaatcaaaagttcaagaccagcgcaagatggtgacactcgtctctactaaaaatacaaaaattagctaggcacggtggcaggcgctgtaatcccagctactcgggaggctgaggaaggaagaatcgcttgaacccggcgggaggcagaggttgcattgagccgagatcatgcaatggcgacagagcaaaactccatctccaaaaaaaaaaagtcaggttatgattctgtagttgaagaaaaaaaaccttttttgaacttgtctttatagttgaacccaaaagctactttataaaaggtggaatttcagactttgatgttttaatcttttggtttaattatctttgagcactcaagttggagactgatgtcacttgcttctgttttctgcttttcatcctcttgtgctagtgagaatagtttgtctgctttttgtgttgtctaacttttctagtcagtttgtaaatagtgctactattataattgacaactctcagaatagacataaacagattaaacagtaaagtttattgtgaacatttg

SEQ ID NO: 197105 - DNA, 791 bp, Homo sapiens
gcaggcatttctgagatgaaagttgcaccccttccaaaggccttctcctcggctctcccttagatcctcaggagggtttccccaatgtacaaaaaatgaaagattcaaaagggacagtgactgttctaaagtcacacagcaagtgtggcaaagtctagatgagggccctggggcagggctgcctttcccctcatgggcagcacccacatcccgcctggcccagtctccattgcaggatgctggacccgctcagctttcgtgtacatggtttcaggagcagactgggcaggcaggaggtaccatgaagccacatgaagccacttccacaaggtctgggctgggggccaacatttgtaagcctttagtgtggtgtcccttggagtaaatgtgcttgttttcaaagaacctcagacacagcattggaaacaaagcctcattcttacaggcgtgcatcctaggctggtaccacacttctctctgcctctggcctcaggaaggcacattatgtggttgggctcaatttggaaaaatagtttgcagtgctgtcgattgaagagagcaaatctttttctgagaaattgtactggttaggtgcagtggctcaaacctgtaatcctagcactttgtgaggccaagacaggtggattgtttgagcccaggagttcgagaccagcctgggcaacatggtgaaaacctgtctctaccaaaaacatacaaaaattagcccggtgtggtggtgcatgcctgtagtgccagctgctcgggaggctgaagcgggaggatcacctgaa

SEQ ID NO: 197106 - DNA, 317 bp, Homo sapiens
aaagtagacttccctccatctaatgctgcttctgtgatgctataatatttatggtgcagaaatctagatttagaaagagaactttattcgaatctgtttatacattccctaatacttactgaggctttatgaagtaccagatattgtccttagcactttacatgtttcaatacatttaatctttgagtcaatctagaaggtagactcaatctccattttaccaataagaagtgaggagcagtggttaacttacctaaggtcaacttgtggcaaagctggaattcaaactctgattaatggttttgttttatcaaaaa

SEQ ID NO: 197107 - DNA, 226 bp, Homo sapiens
caaggaaatgtgaacagcatgagtgaatcttgaagcagatactaaaaaaattcatcagcaagttattttcaaactcaaagagaagaaaatgtcaagttgagctccattatagtttcattctcatcgagaaatcacagcttaaactatccacagagaaggcttgtctccggcaaagaaattcaacactcacttacatatgcttgggtttgaaaaatcataatattga

SEQ ID NO: 197108 - DNA, 228 bp, Homo sapiens
ccgaacagtagatgggcatagggaggagggggcaggtcatggaaggcacagtgtttacaaagccattaaaggagaatgaatagatctagcctggtcccaaaaggcaaagaaatgtgaattttcacatataaatagaaaacgttaagaatggtattaattcaagaccaagctcctaatgtctttccaagattagccggctgtgcggcgtctgcttagctgcactgaccc

SEQ ID NO: 197109 - DNA, 319 bp, Homo sapiens
tctgattgatcgatggctctttctctaaatttgccagtaacttttctgaaaatggaaaatccttgcctctgttactcaccaagtaatagagtacagaaaatttttaggtattcaaagggatctgttgaataacttcatggctgagtttaggcaaggagaagaactgccaacaaataacattattataaccactgtactggagttcaggcataggacaccagatcctgggagagccatgtcttagaaagagaacagcaaaaacctgccttagacactctgggggacttgtaaatacaactgacacttattagtctttttc

SEQ ID NO: 197110 - DNA, 2039 bp, Homo sapiens
tcaggtggtacgctgggcagaggcgggcagaggcggcgagaggcggcgagaggcgggctgaggcggcccagcggcggcaggtgaggcggaaccaaccctcctggccatgggaggggccgtggtggacgagggccccacaggcgtcaaggcccctgacggcggctggggctgggccgtgctcttcggctgtttcgtcatcactggcttctcctacgccttccccaaggccgtcagtgtcttcttcaaggagctcatacaggagtttgggatcggctacagcgacacagcctggatctcctccatcctgctggccatgctctacgggacaggtccgctctgcagtgtgtgcgtgaaccgctttggctgccggcccgtcatgcttgtggggggtctctttgcgtcgctgggcatggtggctgcgtccttttgccggagcatcatccaggtctacctcaccactggggtcatcacggggttgggtttggcactcaacttccagccctcgctcatcatgctgaaccgctacttcagcaagcggcgccccatggccaacgggctggcggcagcaggtagccctgtcttcctgtgtgccctgagcccgctggggcagctgctgcaggaccgctacggctggcggggcggcttcctcatcctgggcggcctgctgctcaactgctgcgtgtgtgccgcactcatgaggcccctggtggtcacggcccagccgggctcggggccgccgcgaccctcccggcgcctgctagacctgagcgtcttccgggaccgcggctttgtgctttacgccgtggccgcctcggtcatggtgctggggctcttcgtcccgcccgtgttcgtggtgagctacgccaaggacctgggcgtgcccgacaccaaggccgccttcctgctcaccatcctgggcttcattgacatcttcgcgcggccggccgcgggcttcgtggcggggcttgggaaggtgcggccctactccgtctacctcttcagcttctccatgttcttcaacggcctcgcggacctggcgggctctacggcgggcgactacggcggcctcgtggtcttctgcatcttctttggcatctcctacggcatggtgggggccctgcagttcgaggtgctcatggccatcgtgggcacccacaagttctccagtgccattggcctggtgctgctgatggaggcggtggccgtgctcgtcgggcccccttcgggaggcaaactcctggatgcgacccacgtctacatgtacgtgttcatcctggcgggggccgaggtgctcacctcctccctgattttgctgctgggcaacttcttctgcattaggaagaagcccaaagagccacagcctgaggtggcggccgcggaggaggagaagctccacaagcctcctgcagactcgggggtggacttgcgggaggtggagcatttcctgaaggctgagcctgagaaaaacggggaggtggttcacaccccggaaacaagtgtctgagtggctgggcggggccggcaggcacagggaggaggtacagaagccggcaacgcttgctatttattttacaaactggactggctcaggcagggccacggctgggctccagctgccggcccagcggatcgtcgcccgatcagtgttttgagggggaaggtggcggggtgggaaccgtgtcattccagagtggatctgcggtgaagccaagccgcaaggttacaaggcatcctcaccaggggccccgcctgctgctcccaggtggcctgcggccactgctatgctcaaggacctggaaacccatgcttcgagacaacgtgactttaatgggagggtgggtgggccgcagacaggctggcagggcaggtgctgcgtggggccctctccagcccgtcctaccctgggctcacatggggcctgtgcccacccctcttgagtgtcttggggacagctctttccacccctggaagatggaaataaacctgcgtgtgggtggagtgttaggaccaacggttctcgtgccgaattcaaaaagctt

SEQ ID NO: 197111 - DNA, 352 bp, Homo sapiens
tcaggtggtacgctgggcagaggcgggcagaggcggcgagaggcggcgagaggcgggctgaggcggcccagcggcggcaggtgaggcggaaccaaccctcctggccatgggaggggccgtggtggacgagggccccacaggcgtcaaggcccctgacggcggctggggctgggccgtgctcttcggctgtttcgtcatcactggcttctcctacgccttccccaagcccgtcctaccctgggctcacatggggcctgtgcccacccctcttgagtgtcttggggacagctctttccacccctggaagatggaaataaacctgcgtgtgggtggagtgttaggaccaacggtt

SEQ ID NO: 197112 - DNA, 2628 bp, Homo sapiens
tcaggtggtacgctgggcagaggcgggcagaggcggcgagaggcggcgagaggcgggctgaggcggcccagcggcggcaggtgaggcggaaccaaccctcctggccatgggaggggccgtggtggacgagggccccacaggcgtcaaggcccctgacggcggctggggctgggccgtgctcttcggctgtttcgtcatcactggcttctcctacgccttccccaaggccgtcagtgtcttcttcaaggagctcatacaggagtttgggatcggctacagcgacacagcctggatctcctccatcctgctggccatgctctacgggacaggtccgctctgcagtgtgtgcgtgaaccgctttggctgccggcccgtcatgcttgtggggggtctctttgcgtcgctgggcatggtggctgcgtccttttgccggagcatcatccaggtctacctcaccactggggtcatcacggggttgggtttggcactcaacttccagccctcgctcatcatgctgaaccgctacttcagcaagcggcgccccatggccaacgggctggcggcagcaggtagccctgtcttcctgtgtgccctgagcccgctggggcagctgctgcaggaccgctacggctggcggggcggcttcctcatcctgggcggcctgctgctcaactgctgcgtgtgtgccgcactcatgaggcccctggtggtcacggcccagccgggctcggggccgccgcgaccctcccggcgcctgctagacctgagcgtcttccgggaccgcggctttgtgctttacgccgtggccgcctcggtcatggtgctggggctcttcgtcccgcccgtgttcgtggtgagctacgccaaggacctgggcgtgcccgacaccaaggccgccttcctgctcaccatcctgggcttcattgacatcttcgcgcggccggccgcgggcttcgtggcggggcttgggaaggtgcggccctactccgtctacctcttcagcttctccatgttcttcaacggcctcgcggacctggcgggctctacggcgggcgactacggcggcctcgtggtcttctgcatcttctttggcatctcctacggcatggtgggggccctgcagttcgaggtgctcatggccatcgtgggcacccacaagttctccagtgccattggcctggtgctgctgatggaggcggtggccgtgctcgtcgggcccccttcgggaggcaaactcctggatgcgacccacgtctacatgtacgtgttcatcctggcgggggccgaggtgctcacctcctccctgattttgctgctgggcaacttcttctgcattaggaagaagcccaaagagccacagcctgaggtggcggccgcggaggaggagaagctccacaagcctcctgcagactcgggggtggacttgcgggaggtggagcatttcctgaaggctgagcctgagaaaaacggggaggtggttcacaccccggaaacaagtgtctgagtggctgggcggggccggcaggcacagggaggaggtacagaagccggcaacgcttgctatttattttacaaactggactggctcaggcagggccacggctgggctccagctgccggcccagcggatcgtcgcccgatcagtgttttgagggggaaggtggcggggtgggaaccgtgtcattccagagtggatctgcggtgaagccaagccgcaaggttacaaggcatcctcaccaggggccccgcctgctgctcccaggtggcctgcggccactgctatgctcaaggacctggaaacccatgcttcgagacaacgtgactttaatgggagggtgggtgggccgcagacaggctggcagggcaggtgctgcgtggggccctctccagcccgtcctaccctgggctcacatggggcctgtgcccacccctcttgagtgtcttggggacagctctttccacccctggaagatggaaataaacctgcgtgtgggtggagtgttaggaccaacggttacaacacaaaaaaaaaaaaaaaaaaaaaacaaaaaaaaaaaaaaaaaaacaaaaaagaaaaaaaaaaaaaaaaaaaaaaaaaaagggggggggggcgaaaaagacctctccggaggggccaccaactgggccccacgtgatcgaagaacaagagggggcaccactataagggaggggacagtaattataaaacacaggaggagcgtgacgggtattataaacacgcctgagcagaggagggaaaaaaaagttcgatgagatggtaatattgtaggggagagagaacgacatcaatagacggggggggggggcgacacattagggaggaggaaataatctgattgagagagagagaataggaagacgcctcgacgaggggaggagaatgtattaatagagtactgaaagggagaggaggagaagagggtgtgtaaaaaaaaaaaaaggagggtgtatgatgatgatggtagagaggtaggagagagaagaaaatgtgtcgagcatcaacgggtagaagctagaagtgagtgatatgaatagaagaaacattatttaaaaagagaggggggcgttagtgtttattgatatacaaaataagacggttaaaatagg

SEQ ID NO: 197113 - DNA, 1732 bp, Homo sapiens
tcaggtggtacgctgggcagaggcgggcagaggcggcgagaggcggcgagaggcgggctgaggcggcccagcggcggcaggtgaggcggaaccaaccctcctggccatgggaggggccgtggtggacgagggccccacaggcgtcaaggcccctgacggcggctggggctgggccgtgctcttcggctgtttcgtcatcactggcttctcctacgccttccccaaggccgtcagtgtcttcttcaaggagctcatacaggagtttgggatcggctacagcgacacagcctggatctcctccatcctgctggccatgctctacgggacaggtccgctctgcagtgtgtgcgtgaaccgctttggctgccggcccgtcatgcttgtggggggtctctttgcgtcgctgggcatggtggctgcgtccttttgccggagcatcatccaggtctacctcaccactggggtcatcacggggttgggtttggcactcaacttccagccctcgctcatcatgctgaaccgctacttcagcaagcggcgccccatggccaacgggctggcggcagcaggtagccctgtcttcctgtgtgccctgagcccgctggggcagctgctgcaggaccgctacggctggcggggcggcttcctcatcctgggcggcctgctgctcaactgctgcgtgtgtgccgcactcatgaggcccctggtggtcacggcccagccgggctcggggccgccgcgaccctcccggcgcctgctagacctgagcgtcttccgggaccgcggctttgtgctttacgccgtggccgcctcggtcatggtgctggggctcttcgtcccgcccgtgttcgtggtgagctacgccaaggacctgggcgtgcccgacaccaaggccgccttcctgctcaccatcctgggcttcattgacatcttcgcgcggccggccgcgggcttcgtggcggggcttgggaaggtgcggccctactccgtctacctcttcagcttctccatgttcttcaacggcctcgcggacctggcgggctctacggcgggcgactacggcggcctcgtggtcttctgcatcttctttggcatctcctacggcatggtgggggccctgcagttcgaggtgctcatggccatcgtgggcacccacaagttctccagtgccattggcctggtgctgctgatggaggcggtggccgtgctcgtcgggcccccttcgggaggcaaactcctggatgcgacccacgtctacatgtacgtgttcatcctggcgggggccgaggtgctcacctcctccctgattttgctgctgggcaacttcttctgcattaggaagaagcccaaagagccacagcctgaggtggcggccgcggaggaggagaagctccacaagcctcctgcagactcgggggtggacttgcgggaggtggagcatttcctgaaggctgagcctgagaaaaacggggaggtggttcacaccccggaaacaagtgtctgagtggctgggcggggccggcaggcacagggaggaggtacagaagccggcaacgcttgctatttattttacaaactggactggctcaggcagggccacggctgggctccagctgccggcccagcggatcgtcgcccgatcagtgttttgagggggaaggtggcggggtgggaaccgtgtcattccagagtggatcgtcgacgcgcccgcgaatttagtagtagtaggcgg

SEQ ID NO: 197114 - DNA, 1840 bp, Homo sapiens
tcaggtggtacgctgggcagaggcgggcagaggcggcgagaggcggcgagaggcgggctgaggcggcccagcggcggcaggtgaggcggaaccaaccctcctggccatgggaggggccgtggtggacgagggccccacaggcgtcaaggcccctgacggcggctggggctgggccgtgctcttcggctgtttcgtcatcactggcttctcctacgccttccccaaggccgtcagtgtcttcttcaaggagctcatacaggagtttgggatcggctacagcgacacagcctggatctcctccatcctgctggccatgctctacgggacaggtccgctctgcagtgtgtgcgtgaaccgctttggctgccggcccgtcatgcttgtggggggtctctttgcgtcgctgggcatggtggctgcgtccttttgccggagcatcatccaggtctacctcaccactggggtcatcacggggttgggtttggcactcaacttccagccctcgctcatcatgctgaaccgctacttcagcaagcggcgccccatggccaacgggctggcggcagcaggtagccctgtcttcctgtgtgccctgagcccgctggggcagctgctgcaggaccgctacggctggcggggcggcttcctcatcctgggcggcctgctgctcaactgctgcgtgtgtgccgcactcatgaggcccctggtggtcacggcccagccgggctcggggccgccgcgaccctcccggcgcctgctagacctgagcgtcttccgggaccgcggctttgtgctttacgccgtggccgcctcggtcatggtgctggggctcttcgtcccgcccgtgttcgtggtgagctacgccaaggacctgggcgtgcccgacaccaaggccgccttcctgctcaccatcctgggcttcattgacatcttcgcgcggccggccgcgggcttcgtggcggggcttgggaaggtgcggccctactccgtctacctcttcagcttctccatgttcttcaacggcctcgcggacctggcgggctctacggcgggcgactacggcggcctcgtggtcttctgcatcttctttggcatctcctacggcatggtgggggccctgcagttcgaggtgctcatggccatcgtgggcacccacaagttctccagtgccattggcctggtgctgctgatggaggcggtggccgtgctcgtcgggcccccttcgggaggcaaactcctggatgcgacccacgtctacatgtacgtgttcatcctggcgggggccgaggtgctcacctcctccctgattttgctgctgggcaacttcttctgcattaggaagaagcccaaagagccacagcctgaggtggcggccgcggaggaggagaagctccacaagcctcctgcagactcgggggtggacttgcgggaggtggagcatttcctgaaggctgagcctgagaaaaacggggaggtggttcacaccccggaaacaagtgtctgagtggctgggcggggccggcaggcacagggaggaggtacagaagccggcaacgcttgctatttattttacaaactggactggctcaggcagggccacggctgggctccagctgccggcccagcggatcgtcgcccgatcagtgttttgagggggaaggtggcggggtgggaaccgtgtcattccagagtggatctgccctcgtggccagcagtggctgcgtggctgggagcccggtcagaggccgccgggccctcagtaggtgcgtcgtgggcgctggggacgcagtacggtgcctggcggccgcgtgcaccggagagattccattccagctctctg

SEQ ID NO: 197115 - DNA, 2049 bp, Homo sapiens
  misc_feature (13)..(13): n is a, c, g, or t
cggaagttcaggnagggcgaggccgtgccccacatccaggcagcgcaggccgcgggccgctcccctagccaggaagagccgccgtccgcaccgggaccggagaggaagcggaggtgaggcggaaccaaccctcctggccatgggaggggccgtggtggacgagggccccacaggcgtcaaggcccctgacggcggctggggctgggccgtgctcttcggctgtttcgtcatcactggcttctcctacgccttccccaaggccgtcagtgtcttcttcaaggagctcatacaggagtttgggatcggctacagcgacacagcctggatctcctccatcctgctggccatgctctacgggacaggtccgctctgcagtgtgtgcgtgaaccgctttggctgccggcccgtcatgcttgtggggggtctctttgcgtcgctgggcatggtggctgcgtccttttgccggagcatcatccaggtctacctcaccactggggtcatcacggggttgggtttggcactcaacttccagccctcgctcatcatgctgaaccgctacttcagcaagcggcgccccatggccaacgggctggcggcagcaggtagccctgtcttcctgtgtgccctgagcccgctggggcagctgctgcaggaccgctacggctggcggggcggcttcctcatcctgggcggcctgctgctcaactgctgcgtgtgtgccgcactcatgaggcccctggtggtcacggcccagccgggctcggggccgccgcgaccctcccggcgcctgctagacctgagcgtcttccgggaccgcggctttgtgctttacgccgtggccgcctcggtcatggtgctggggctcttcgtcccgcccgtgttcgtggtgagctacgccaaggacctgggcgtgcccgacaccaaggccgccttcctgctcaccatcctgggcttcattgacatcttcgcgcggccggccgcgggcttcgtggcggggcttgggaaggtgcggccctactccgtctacctcttcagcttctccatgttcttcaacggcctcgcggacctggcgggctctacggcgggcgactacggcggcctcgtggtcttctgcatcttctttggcatctcctacggcatggtgggggccctgcagttcgaggtgctcatggccatcgtgggcacccacaagttctccagtgccattggcctggtgctgctgatggaggcggtggccgtgctcgtcgggcccccttcgggaggcaaactcctggatgcgacccacgtctacatgtacgtgttcatcctggcgggggccgaggtgctcacctcctccctgattttgctgctgggcaacttcttctgcattaggaagaagcccaaagagccacagcctgaggtggcggccgcggaggaggagaagctccacaagcctcctgcagactcgggggtggacttgcgggaggtggagcatttcctgaaggctgagcctgagaaaaacggggaggtggttcacaccccggaaacaagtgtctgagtggctgggcggggccggcaggcacagggaggaggtacagaagccggcaacgcttgctatttattttacaaactggactggctcaggcagggccacggctgggctccagctgccggcccagcggatcgtcgcccgatcagtgttttgagggggaaggtggcggggtgggaaccgtgtcattccagagtggatctgcggtgaagccaagccgcaaggttacaaggcatcctcaccaggggccccgcctgctgctcccaggtggcctgcggccactgctatgctcaaggacctggaaacccatgcttcgagacaacgtgactttaatgggagggtgggtgggccgcagacaggctggcagggcaggtgctgcgtggggccctctccagcccgtcctaccctgggctcacatggggcctgtgcccacccctcttgagtgtcttggggacagctctttccacccctggaagatggaaataaacctgcgtgtgggtggagtgttaggaccaacggtt

SEQ ID NO: 197116 - DNA, 2511 bp, Homo sapiens
tcaggtggtacgctgggcagaggcgggcagaggcggcgagaggcggcgagaggcgggctgaggcggcccagcggcggcaggtgaggcggaaccaaccctcctggccatgggaggggccgtggtggacgagggccccacaggcgtcaaggcccctgacggcggctggggctgggccgtgctcttcggctgtttcgtcatcactggcttctcctacgccttccccaaggccgtcagtgtcttcttcaaggagctcatacaggagtttgggatcggctacagcgacacagcctggatctcctccatcctgctggccatgctctacgggacaggtgagggtggcctcacaccgggccccctgtccgggctctgctggcggatcctgctgggcgcgtgtagctgggctcagcaacagggccttccgcctgctccccagggaaccctggagggaagcccttggggccaggatcctgctgggcagcaacatgctctccacggggccaacccaggcagggcgcgaagtccatcctggcccctgtccaaacgggtcggctgtatttatagaccgtctcagaggacaggctcctgagagccgttcctgaaaaggtggctgttcctgagctgcagggacccaaggggcccagcaggcggcgctcacgtgtcatcatggcctgcgctcggggagcctgcccacggggtgcccctggtgcccgcggggggaggggtggtgtgggaaggggaggccggctccaggctgtgagctcagtcggctggcgggggtagagctggctgcaggcccggcccctctcagctgctgccctctccaggtccgctctgcagtgtgtgcgtgaaccgctttggctgccggcccgtcatgcttgtggggggtctctttgcgtcgctgggcatggtggctgcgtccttttgccggagcatcatccaggtctacctcaccactggggtcatcacggggttgggtttggcactcaacttccagccctcgctcatcatgctgaaccgctacttcagcaagcggcgccccatggccaacgggctggcggcagcaggtagccctgtcttcctgtgtgccctgagcccgctggggcagctgctgcaggaccgctacggctggcggggcggcttcctcatcctgggcggcctgctgctcaactgctgcgtgtgtgccgcactcatgaggcccctggtggtcacggcccagccgggctcggggccgccgcgaccctcccggcgcctgctagacctgagcgtcttccgggaccgcggctttgtgctttacgccgtggccgcctcggtcatggtgctggggctcttcgtcccgcccgtgttcgtggtgagctacgccaaggacctgggcgtgcccgacaccaaggccgccttcctgctcaccatcctgggcttcattgacatcttcgcgcggccggccgcgggcttcgtggcggggcttgggaaggtgcggccctactccgtctacctcttcagcttctccatgttcttcaacggcctcgcggacctggcgggctctacggcgggcgactacggcggcctcgtggtcttctgcatcttctttggcatctcctacggcatggtgggggccctgcagttcgaggtgctcatggccatcgtgggcacccacaagttctccagtgccattggcctggtgctgctgatggaggcggtggccgtgctcgtcgggcccccttcgggaggcaaactcctggatgcgacccacgtctacatgtacgtgttcatcctggcgggggccgaggtgctcacctcctccctgattttgctgctgggcaacttcttctgcattaggaagaagcccaaagagccacagcctgaggtggcggccgcggaggaggagaagctccacaagcctcctgcagactcgggggtggacttgcgggaggtggagcatttcctgaaggctgagcctgagaaaaacggggaggtggttcacaccccggaaacaagtgtctgagtggctgggcggggccggcaggcacagggaggaggtacagaagccggcaacgcttgctatttattttacaaactggactggctcaggcagggccacggctgggctccagctgccggcccagcggatcgtcgcccgatcagtgttttgagggggaaggtggcggggtgggaaccgtgtcattccagagtggatctgcggtgaagccaagccgcaaggttacaaggcatcctcaccaggggccccgcctgctgctcccaggtggcctgcggccactgctatgctcaaggacctggaaacccatgcttcgagacaacgtgactttaatgggagggtgggtgggccgcagacaggctggcagggcaggtgctgcgtggggccctctccagcccgtcctaccctgggctcacatggggcctgtgcccacccctcttgagtgtcttggggacagctctttccacccctggaagatggaaataaacctgcgtgtgggtggagtgttaggaccaacggtt

SEQ ID NO: 197117 - DNA, 1742 bp, Homo sapiens
aaggctgagctgagaaaaacggggaggtggttcacaccccggaaacaagtgtctgagtggctgggcggggcggcacgacagggaggaggtacagaagccggcaacgcttgctatttattttacaaactggacggcatggtggctgcgtccttttgccggagcatcatccaggtctacctcaccactggggtcatcacggggttgggtttggcactcaacttccagccctcgctcatcatgctgaaccgctacttcagcaagcggcgccccatggccaacgggctggcggcagcaggtagccctgtcttcctgtgtgccctgagcccgctggggcagctgctgcaggaccgctacggctggcggggcggcttcctcatcctgggcggcctgctgctcaactgctgcgtgtgtgccgcactcatgaggcccctggtggtcacggcccagccgggctcggggccgccgcgaccctcccggcgcctgctagacctgagcgtcttccgggaccgcggctttgtgctttacgccgtggccgcctcggtcatggtgctggggctcttcgtcccgcccgtgttcgtggtgagctacgccaaggacctgggcgtgcccgacaccaaggccgccttcctgctcaccatcctgggcttcattgacatcttcgcgcggccggccgcgggcttcgtggcggggcttgggaaggtgcggccctactccgtctacctcttcagcttctccatgttcttcaacggcctcgcggacctggcgggctctacggcgggcgactacggcggcctcgtggtcttctgcatcttctttggcatctcctacggcatggtgggggccctgcagttcgaggtgctcatggccatcgtgggcacccacaagttctccagtgccattggcctggtgctgctgatggaggcggtggccgtgctcgtcgggcccccttcgggaggcaaactcctggatgcgacccacgtctacatgtacgtgttcatcctggcgggggccgaggtgctcacctcctccctgattttgctgctgggcaacttcttctgcattaggaagaagcccaaagagccacagcctgaggtggcggccgcggaggaggagaagctccacaagcctcctgcagactcgggggtggacttgcgggaggtggagcatttcctgaaggctgagcctgagaaaaacggggaggtggttcacaccccggaaacaagtgtctgagtggctgggcggggccggcaggcacagggaggaggtacagaagccggcaacgcttgctatttattttacaaactggactggctcaggcagggccacggctgggctccagctgccggcccagcggatcgtcgcccgatcagtgttttgagggggaaggtggcggggtgggaaccgtgtcattccagagtggatctgcggtgaagccaagccgcaaggttacaaggcatcctcaccaggggccccgcctgctgctcccaggtggcctgcggccactgctatgctcaaggacctggaaacccatgcttcgagacaacgtgactttaatgggagggtgggtgggccgcagacaggctggcagggcaggtgctgcgtggggccctctccagcccgtcctaccctgggctcacatggggcctgtgcccacccctcttgagtgtcttggggacagctctttccacccctggaagatggaaataaacctgcgtgtgggtggagtgttaggaccaacggtt

SEQ ID NO: 197118 - DNA, 1666 bp, Homo sapiens
tgggtgggtggcaggggctctgcaccctgggagcctgagcctgtgggaacctgggggcagagatgagggtctcgggctttggggcagccttggggggctctcaccacattccctttcctccagggttgggtttggcactcaacttccagccctcgctcatcatgctgaaccgctacttcagcaagcggcgccccatggccaacgggctggcggcagcaggtagccctgtcttcctgtgtgccctgagcccgctggggcagctgctgcaggaccgctacggctggcggggcggcttcctcatcctgggcggcctgctgctcaactgctgcgtgtgtgccgcactcatgaggcccctggtggtcacggcccagccgggctcggggccgccgcgaccctcccggcgcctgctagacctgagcgtcttccgggaccgcggctttgtgctttacgccgtggccgcctcggtcatggtgctggggctcttcgtcccgcccgtgttcgtggtgagctacgccaaggacctgggcgtgcccgacaccaaggccgccttcctgctcaccatcctgggcttcattgacatcttcgcgcggccggccgcgggcttcgtggcggggcttgggaaggtgcggccctactccgtctacctcttcagcttctccatgttcttcaacggcctcgcggacctggcgggctctacggcgggcgactacggcggcctcgtggtcttctgcatcttctttggcatctcctacggcatggtgggggccctgcagttcgaggtgctcatggccatcgtgggcacccacaagttctccagtgccattggcctggtgctgctgatggaggcggtggccgtgctcgtcgggcccccttcgggaggcaaactcctggatgcgacccacgtctacatgtacgtgttcatcctggcgggggccgaggtgctcacctcctccctgattttgctgctgggcaacttcttctgcattaggaagaagcccaaagagccacagcctgaggtggcggccgcggaggaggagaagctccacaagcctcctgcagactcgggggtggacttgcgggaggtggagcatttcctgaaggctgagcctgagaaaaacggggaggtggttcacaccccggaaacaagtgtctgagtggctgggcggggccggcaggcacagggaggaggtacagaagccggcaacgcttgctatttattttacaaactggactggctcaggcagggccacggctgggctccagctgccggcccagcggatcgtcgcccgatcagtgttttgagggggaaggtggcggggtgggaaccgtgtcattccagagtggatctgcggtgaagccaagccgcaaggttacaaggcatcctcaccaggggccccgcctgctgctcccaggtggcctgcggccactgctatgctcaaggacctggaaacccatgcttcgagacaacgtgactttaatgggagggtgggtgggccgcagacaggctggcagggcaggtgctgcgtggggccctctccagcccgtcctaccctgggctcacatggggcctgtgcccacccctcttgagtgtcttggggacagctctttccacccctggaagatggaaataaacctgcgtgtgggtggagtgttaggaccaacggtt

SEQ ID NO: 197119 - DNA, 1238 bp, Homo sapiens
  misc_feature (13)..(13): n is a, c, g, or t
cggaagttcaggnagggcgaggccgtgccccacatccaggcagcgcaggccgcgggccgctcccctagccaggaagagccgccgtccgcaccgggaccggagaggaagcggaggtgaggcggaaccaaccctcctggccatgggaggggccgtggtggacgagggccccacaggcgtcaaggcccctgacggcgggtgcggccctactccgtctacctcttcagcttctccatgttcttcaacggcctcgcggacctggcgggctctacggcgggcgactacggcggcctcgtggtcttctgcatcttctttggcatctcctacggcatggtgggggccctgcagttcgaggtgctcatggccatcgtgggcacccacaagttctccagtgccattggcctggtgctgctgatggaggcggtggccgtgctcgtcgggcccccttcgggaggcaaactcctggatgcgacccacgtctacatgtacgtgttcatcctggcgggggccgaggtgctcacctcctccctgattttgctgctgggcaacttcttctgcattaggaagaagcccaaagagccacagcctgaggtggcggccgcggaggaggagaagctccacaagcctcctgcagactcgggggtggacttgcgggaggtggagcatttcctgaaggctgagcctgagaaaaacggggaggtggttcacaccccggaaacaagtgtctgagtggctgggcggggccggcaggcacagggaggaggtacagaagccggcaacgcttgctatttattttacaaactggactggctcaggcagggccacggctgggctccagctgccggcccagcggatcgtcgcccgatcagtgttttgagggggaaggtggcggggtgggaaccgtgtcattccagagtggatctgcggtgaagccaagccgcaaggttacaaggcatcctcaccaggggccccgcctgctgctcccaggtggcctgcggccactgctatgctcaaggacctggaaacccatgcttcgagacaacgtgactttaatgggagggtgggtgggccgcagacaggctggcagggcaggtgctgcgtggggccctctccagcccgtcctaccctgggctcacatggggcctgtgcccacccctcttgagtgtcttggggacagctctttccacccctggaagatggaaataaacctgcgtgtgggtggagtgttaggaccaacggtt

SEQ ID NO: 197120 - DNA, 1207 bp, Homo sapiens
tgggtgggtggcaggggctctgcaccctgggagcctgagcctgtgggaacctgggggcagagatgagggtctcgggctttggggcagccttggggggctctcaccacattccctttcctccagggttgggtttggcactcaacttccagccctcgctcatcatgctgaaccgctacttcagcaagcggcgccccatggccaacgggctggcggcagcaggtagccctgtcttcctgtgtgccctgagcccgctggggcagctgctgcaggaccgctacggctggcggggcggcttcctcatcctgggcggcctgctggaggtgctcatggccatcgtgggcacccacaagttctccagtgccattggcctggtgctgctgatggaggcggtggccgtgctcgtcgggcccccttcgggaggcaaactcctggatgcgacccacgtctacatgtacgtgttcatcctggcgggggccgaggtgctcacctcctccctgattttgctgctgggcaacttcttctgcattaggaagaagcccaaagagccacagcctgaggtggcggccgcggaggaggagaagctccacaagcctcctgcagactcgggggtggacttgcgggaggtggagcatttcctgaaggctgagcctgagaaaaacggggaggtggttcacaccccggaaacaagtgtctgagtggctgggcggggccggcaggcacagggaggaggtacagaagccggcaacgcttgctatttattttacaaactggactggctcaggcagggccacggctgggctccagctgccggcccagcggatcgtcgcccgatcagtgttttgagggggaaggtggcggggtgggaaccgtgtcattccagagtggatctgcggtgaagccaagccgcaaggttacaaggcatcctcaccaggggccccgcctgctgctcccaggtggcctgcggccactgctatgctcaaggacctggaaacccatgcttcgagacaacgtgactttaatgggagggtgggtgggccgcagacaggctggcagggcaggtgctgcgtggggccctctccagcccgtcctaccctgggctcacatggggcctgtgcccacccctcttgagtgtcttggggacagctctttccacccctggaagatggaaataaacctgcgtgtgggtggagtgttaggaccaacggtt

SEQ ID NO: 197121 - DNA, 1307 bp, Homo sapiens
  misc_feature (13)..(13): n is a, c, g, or t
cggaagttcaggnagggcgaggccgtgccccacatccaggcagcgcaggccgcgggccgctcccctagccaggaagagccgccgtccgcaccgggaccggagaggaagcggaggtgaggcggaaccaaccctcctggccatgggaggggccgtggtggacgagggccccacaggcgtcaaggcccctgacggcggctggggctgggccgtgctcttcggctgtttcgtcatcactggcttctcctacgccttccccaaggccgtcagtgtcttcttcaaggccaaactccacaaagccattgctatttttagcctcttaagtcttggttcccctgaggaggagggaggatgcccccagctgaaacacatggaggggagagaacacctcccagccccacaagctcagaggcagacagggtgacccttgcgtgctgagacaccgagacacaggcttgggtggagccgtgggccctgggggcagcccgcatgagcggctgggactgacggggtcttcccgcaggcaaactcctggatgcgacccacgtctacatgtacgtgttcatcctggcgggggccgaggtgctcacctcctccctgattttgctgctgggcaacttcttctgcattaggaagaagcccaaagagccacagcctgaggtggcggccgcggaggaggagaagctccacaagcctcctgcagactcgggggtggacttgcgggaggtggagcatttcctgaaggctgagcctgagaaaaacggggaggtggttcacaccccggaaacaagtgtctgagtggctgggcggggccggcaggcacagggaggaggtacagaagccggcaacgcttgctatttattttacaaactggactggctcaggcagggccacggctgggctccagctgccggcccagcggatcgtcgcccgatcagtgttttgagggggaaggtggcggggtgggaaccgtgtcattccagagtggatctgcggtgaagccaagccgcaaggttacaaggcatcctcaccaggggccccgcctgctgctcccaggtggcctgcggccactgctatgctcaaggacctggaaacccatgcttcgagacaacgtgactttaatgggagggtgggtgggccgcagacaggctggcagggcaggtgctgcgtggggccctctccagcccgtcctaccctgggctcacatggggcctgtgcccacccctcttgagtgtcttggggacagctctttccacccctggaagatggaaataaacctgcgtgtgggtggagtgttaggaccaacggtt

SEQ ID NO: 197122 - DNA, 808 bp, Homo sapiens
ttggagccccactatcgctaagcaaactcctggatgcgacccacgtctacatgtacgtgttcatcctggcgggggccgaggtgctcacctcctccctgattttgctgctgggcaacttcttctgcattaggaagaagcccaaagagccacagcctgaggtggcggccgcggaggaggagaagctccacaagcctcctgcagactcgggggtggacttgcgggaggtggagcatttcctgaaggctgagcctgagaaaaacggggaggtggttcacaccccggaaacaagtgtctgagtggctgggcggggccggcaggcacagggaggaggtacagaagccggcaacgcttgctatttattttacaaactggactggctcaggcagggccacggctgggctccagctgccggcccagcggatcgtcgcccgatcagtgttttgagggggaaggtggcggggtgggaaccgtgtcattccagagtggatctgcggtgaagccaagccgcaaggttacaaggcatcctcaccaggggccccgcctgctgctcccaggtggcctgcggccactgctatgctcaaggacctggaaacccatgcttcgagacaacgtgactttaatgggagggtgggtgggccgcagacaggctggcagggcaggtgctgcgtggggccctctccagcccgtcctaccctgggctcacatggggcctgtgcccacccctcttgagtgtcttggggacagctctttccacccctggaagatggaaataaacctgcgtgtgggtggagtgttaggaccaacggtt

SEQ ID NO: 197123 - DNA, 2016 bp, Homo sapiens
tcaggtggtacgctgggcagaggcgggcagaggcggcgagaggcggcgagaggcgggctgaggcggcccagcggcggcaggtgaggcggaaccaaccctcctggccatgggaggggccgtggtggacgagggccccacaggcgtcaaggcccctgacggcggctggggctgggccgtgctcttcggctgtttcgtcatcactggcttctcctacgccttccccaaggccgtcagtgtcttcttcaaggagctcatacaggagtttgggatcggctacagcgacacagcctggatctcctccatcctgctggccatgctctacgggacaggtccgctctgcagtgtgtgcgtgaaccgctttggctgccggcccgtcatgcttgtggggggtctctttgcgtcgctgggcatggtggctgcgtccttttgccggagcatcatccaggtctacctcaccactggggtcatcacggggttgggtttggcactcaacttccagccctcgctcatcatgctgaaccgctacttcagcaagcggcgccccatggccaacgggctggcggcagcaggtagccctgtcttcctgtgtgccctgagcccgctggggcagctgctgcaggaccgctacggctggcggggcggcttcctcatcctgggcggcctgctgctcaactgctgcgtgtgtgccgcactcatgaggcccctggtggtcacggcccagccgggctcggggccgccgcgaccctcccggcgcctgctagacctgagcgtcttccgggaccgcggctttgtgctttacgccgtggccgcctcggtcatggtgctggggctcttcgtcccgcccgtgttcgtggtgagctacgccaaggacctgggcgtgcccgacaccaaggccgccttcctgctcaccatcctgggcttcattgacatcttcgcgcggccggccgcgggcttcgtggcggggcttgggaaggtgcggccctactccgtctacctcttcagcttctccatgttcttcaacggcctcgcggacctggcgggctctacggcgggcgactacggcggcctcgtggtcttctgcatcttctttggcatctcctacggcatggtgggggccctgcagttcgaggtgctcatggccatcgtgggcacccacaagttctccagtgccattggcctggtgctgctgatggaggcggtggccgtgctcgtcgggcccccttcgggaggcaaactcctggatgcgacccacgtctacatgtacgtgttcatcctggcgggggccgaggtgctcacctcctccctgattttgctgctgggcaacttcttctgcattaggaagaagcccaaagagccacagcctgaggtggcggccgcggaggaggagaagctccacaagcctcctgcagactcgggggtggacttgcgggaggtggagcatttcctgaaggctgagcctgagaaaaacggggaggtggttcacaccccggaaacaagtgtctgagtggctgggcggggccggcaggcacagggaggaggtacagaagccggcaacgcttgctatttattttacaaactggactggctcaggcagggccacggctgggctccagctgccggcccagcggatcgtcgcccgatcagtgttttgagggggaaggtggcggggtgggaaccgtgtcattccagagtggatctgcggtgaagccaagccgcaaggttacaaggcatcctcaccaggggccccgcctgctgctcccaggtggcctgcggccactgctatgctcaaggacctggaaacccatgcttcgagacaacgtgactttaatgggagggtgggtgggccgcagacaggctggcagggcaggtgctgcgtggggccctctccagcccgtcctaccctgggctcacatggggcctgtgcccacccctcttgagtgtcttggggacagctctttccacccctggaagatggaaataaacctgcgtgtgggtggagtgttaggaccaacggtt

SEQ ID NO: 197124 - DNA, 2592 bp, Homo sapiens
tcaggtggtacgctgggcagaggcgggcagaggcggcgagaggcggcgagaggcgggctgaggcggcccagcggcggcaggtgaggcggaaccaaccctcctggccatgggaggggccgtggtggacgagggccccacaggcgtcaaggcccctgacggcggctggggctgggccgtgctcttcggctgtttcgtcatcactggcttctcctacgccttccccaaggccgtcagtgtcttcttcaaggagctcatacaggagtttgggatcggctacagcgacacagcctggatctcctccatcctgctggccatgctctacgggacaggtccgctctgcagtgtgtgcgtgaaccgctttggctgccggcccgtcatgcttgtggggggtctctttgcgtcgctgggcatggtggctgcgtccttttgccggagcatcatccaggtctacctcaccactggggtcatcacggggttgggtttggcactcaacttccagccctcgctcatcatgctgaaccgctacttcagcaagcggcgccccatggccaacgggctggcggcagcaggtagccctgtcttcctgtgtgccctgagcccgctggggcagctgctgcaggaccgctacggctggcggggcggcttcctcatcctgggcggcctgctgctcaactgctgcgtgtgtgccgcactcatgaggcccctggtggtcacggcccagccgggctcggggccgccgcgaccctcccggcgcctgctagacctgagcgtcttccgggaccgcggctttgtgctttacgccgtggccgcctcggtcatggtgctggggctcttcgtcccgcccgtgttcgtggtgagctacgccaaggacctgggcgtgcccgacaccaaggccgccttcctgctcaccatcctgggcttcattgacatcttcgcgcggccggccgcgggcttcgtggcggggcttgggaaggtgcggccctactccgtctacctcttcagcttctccatgttcttcaacggcctcgcggacctggcgggctctacggcgggcgactacggcggcctcgtggtcttctgcatcttctttggcatctcctacggcatggtgggggccctgcagttcgaggtgctcatggccatcgtgggcacccacaagttctccagtgccattggcctggtgctgctgatggaggcggtggccgtgctcgtcgggcccccttcgggaggcaaactcctggatgcgacccacgtctacatgtacgtgttcatcctggcgggggccgaggtgctcacctcctccctgattttgctgctgggcaacttcttctgcattaggaagaagcccaaagagccacagcctgaggtggcggccgcggaggaggagaagctccacaagcctcctgcagactcgggggtggacttgcgggaggtggagcatttcctgaaggctgagcctgagaaaaacggggaggtggttcacaccccggaaacaagtgtctgagtggctgggcggggccggcaggcacagggaggaggtacagaagccggcaacgcttgctatttattttacaaactggactggctcaggcagggccacggctgggctccagctgccggcccagcggatcgtcgcccgatcagtgttttgagggggaaggtggcggggtgggaaccgtgtcattccagagtggatctgcggtgaagccaagccgcaaggttacaaggcatcctcaccaggggccccgcctgctgctcccaggtggcctgcggccactgctatgctcaaggacctggaaacccatgcttcgagacaacgtgactttaatgggagggtgggtgggccgcagacaggctggcagggcaggtgctgcgtggggccctctccagcccgtcctaccctgggctcacatggggcctgtgcccacccctcttgagtgtcttggggacagctctttccacccctggaagatggaaataaacctgcgtgtgggtggagtgttaggaccaacggttacggtttcctaggagtatgtggttttgctgtgtggcctgtgtcctgactcgcacgtctgctgatggcctggctgttcctaccgtggctctgtcctcgccagctttccctgcagcggcatagcattcgtagcaggggcaggcgctgcatggagggggctgcggggcaggtgcctggaggccgctgtgccagggtggcctctgaaatgtgccagggagcccctacgtggtggttagatgggagctgaggtggaacaagccactttattcactgctgtgtttaagaaacaggaccctcctgccttccctttttcgcccctctgcctggctggcagtgtgcgtggtgtggtcagtgcccagggctcggtctttgcaccctgtcctccatccagcccggcccagcgcttgggtctgtcctggacacctaacacccacctgccctcgtggccagcagtggctgcgtggctgggagcccggtcagaggccgccgggccctcagtaggtgcgtcgtgggcgctggggacgcagtacggtgcctggcggccgcgtgcaccggagagattccattccagctctctg

SEQ ID NO: 197125 - DNA, 1650 bp, Homo sapiens
tcaggtggtacgctgggcagaggcgggcagaggcggcgagaggcggcgagaggcgggctgaggcggcccagcggcggcaggtgaggcggaaccaaccctcctggccatgggaggggccgtggtggacgagggccccacaggcgtcaaggcccctgacggcggctggggctgggccgtgctcttcggctgtttcgtcatcactggcttctcctacgccttccccaaggccgtcagtgtcttcttcaaggagctcatacaggagtttgggatcggctacagcgacacagcctggatctcctccatcctgctggccatgctctacgggacaggtccgctctgcagtgtgtgcgtgaaccgctttggctgccggcccgtcatgcttgtggggggtctctttgcgtcgctgggcatggtggctgcgtccttttgccggagcatcatccaggtctacctcaccactggggtcatcacggggttgggtttggcactcaacttccagccctcgctcatcatgctgaaccgctacttcagcaagcggcgccccatggccaacgggctggcggcagcaggtagccctgtcttcctgtgtgccctgagcccgctggggcagctgctgcaggaccgctacggctggcggggcggcttcctcatcctgggcggcctgctgctcaactgctgcgtgtgtgccgcactcatgaggcccctggtggtcacggcccagccgggctcggggccgccgcgaccctcccggcgcctgctagacctgagcgtcttccgggaccgcggctttgtgctttacgccgtggccgcctcggtcatggtgctggggctcttcgtcccgcccgtgttcgtggtgagctacgccaaggacctgggcgtgcccgacaccaaggccgccttcctgctcaccatcctgggcttcattgacatcttcgcgcggccggccgcgggcttcgtggcggggcttgggaaggtgcggccctactccgtctacctcttcagcttctccatgttcttcaacggcctcgcggacctggcgggctctacggcgggcgactacggcggcctcgtggtcttctgcatcttctttggcatctcctacggcatggtgggggccctgcagttcgaggtgctcatggccatcgtgggcacccacaagttctccagtgccattggcctggtgctgctgatggaggcggtggccgtgctcgtcgggcccccttcgggaggcaaactcctggatgcgacccacgtctacatgtacgtgttcatcctggcgggggccgaggtgctcacctcctccctgattttgctgctgggcaacttcttctgcattaggaagaagcccaaagagccacagcctgaggtggcggccgcggaggaggagaagctccacaagcctcctgcagactcgggggtggacttgcgggaggtggagcatttcctgaaggctgagcctgagaaaaacggggaggtggttcacaccccggaaacaagtgtctgagtggcctgcggccactgctatgctcaaggacctggaaacccatgcttcgagacaacgtgactttaatgggagggtgggtgcgtgggggcaaaaaggtggcacgccccaaagattgtacacctgtctcaaacatacaataacctgtc

SEQ ID NO: 197126 - DNA, 2825 bp, Homo sapiens
tcaggtggtacgctgggcagaggcgggcagaggcggcgagaggcggcgagaggcgggctgaggcggcccagcggcggcaggtgaggcggaaccaaccctcctggccatgggaggggccgtggtggacgagggccccacaggcgtcaaggcccctgacggcggctggggctgggccgtgctcttcggctgtttcgtcatcactggcttctcctacgccttccccaaggccgtcagtgtcttcttcaaggagctcatacaggagtttgggatcggctacagcgacacagcctggatctcctccatcctgctggccatgctctacgggacaggtccgctctgcagtgtgtgcgtgaaccgctttggctgccggcccgtcatgcttgtggggggtctctttgcgtcgctgggcatggtggctgcgtccttttgccggagcatcatccaggtctacctcaccactggggtcatcacggggttgggtttggcactcaacttccagccctcgctcatcatgctgaaccgctacttcagcaagcggcgccccatggccaacgggctggcggcagcaggtagccctgtcttcctgtgtgccctgagcccgctggggcagctgctgcaggaccgctacggctggcggggcggcttcctcatcctgggcggcctgctgctcaactgctgcgtgtgtgccgcactcatgaggcccctggtggtcacggcccagccgggctcggggccgccgcgaccctcccggcgcctgctagacctgagcgtcttccgggaccgcggctttgtgctttacgccgtggccgcctcggtcatggtgctggggctcttcgtcccgcccgtgttcgtggtgagctacgccaaggacctgggcgtgcccgacaccaaggccgccttcctgctcaccatcctgggcttcattgacatcttcgcgcggccggccgcgggcttcgtggcggggcttgggaaggtgcggccctactccgtctacctcttcagcttctccatgttcttcaacggcctcgcggacctggcgggctctacggcgggcgactacggcggcctcgtggtcttctgcatcttctttggcatctcctacggcatggtgggggccctgcagttcgaggtgctcatggccatcgtgggcacccacaagttctccagtgccattggcctggtgctgctgatggaggcggtggccgtgctcgtcgggcccccttcgggaggtgagcgctgcgcccccaggcagttccccacacctgcccttcccgtcagacgcccgctttgcgaggggggggacgcgcacccctcggcagccacccgcagtgtgggactcagagctggagggggtgcactgtgctggaccaaccctgattctgctggggctagcgggtctccattaggagtggggtgctccgtccggcacagtgtgtccagacaggcagggtggctaggggctgggcccggtgggggggcagctcctccaggctctgcctgggcaccacgcggcagctccaggcaacccaacagccggcttttgcattttggggcctctcctttttgaaggatgactgagctaacacgtgagggaaattaagttctgactggagcagccttgcccaggctccgcctgcctggcgagggggtcctgggcttggggagggctcatgtcttggagtccgcggtggccagggcacagggctggtactgaacacagtagggcttctggggctgccgactggaagcctcagggggactccgtggggaccagcgtgactcctgccaccaaccgaaacccaaactccacaaagccattgctatttttagcctcttaagtcttggttcccctgaggaggagggaggatgcccccagctgaaacacatggaggggagagaacacctcccagccccacaagctcagaggcagacagggtgacccttgcgtgctgagacaccgagacacaggcttgggtggagccgtgggccctgggggcagcccgcatgagcggctgggactgacggggtcttcccgcaggcaaactcctggatgcgacccacgtctacatgtacgtgttcatcctggcgggggccgaggtgctcacctcctccctgattttgctgctgggcaacttcttctgcattaggaagaagcccaaagagccacagcctgaggtggcggccgcggaggaggagaagctccacaagcctcctgcagactcgggggtggacttgcgggaggtggagcatttcctgaaggctgagcctgagaaaaacggggaggtggttcacaccccggaaacaagtgtctgagtggctgggcggggccggcaggcacagggaggaggtacagaagccggcaacgcttgctatttattttacaaactggactggctcaggcagggccacggctgggctccagctgccggcccagcggatcgtcgcccgatcagtgttttgagggggaaggtggcggggtgggaaccgtgtcattccagagtggatctgcggtgaagccaagccgcaaggttacaaggcatcctcaccaggggccccgcctgctgctcccaggtggcctgcggccactgctatgctcaaggacctggaaacccatgcttcgagacaacgtgactttaatgggagggtgggtgggccgcagacaggctggcagggcaggtgctgcgtggggccctctccagcccgtcctaccctgggctcacatggggcctgtgcccacccctcttgagtgtcttggggacagctctttccacccctggaagatggaaataaacctgcgtgtgggtggagtgttaggaccaacggtt

SEQ ID NO: 197127 - DNA, 1972 bp, Homo sapiens
  misc_feature (13)..(13): n is a, c, g, or t
cggaagttcaggnagggcgaggccgtgccccacatccaggcagcgcaggccgcgggccgctcccctagccaggaagagccgccgtccgcaccgggaccggagaggaagcggaggtgaggcggaaccaaccctcctggccatgggaggggccgtggtggacgagggccccacaggcgtcaaggcccctgacggcggctggggctgggccgtgctcttcggctgtttcgtcatcactggcttctcctacgccttccccaaggccgtcagtgtcttcttcaaggagctcatacaggagtttgggatcggctacagcgacacagcctggatctcctccatcctgctggccatgctctacgggacagggcatggtggctgcgtccttttgccggagcatcatccaggtctacctcaccactggggtcatcacggggttgggtttggcactcaacttccagccctcgctcatcatgctgaaccgctacttcagcaagcggcgccccatggccaacgggctggcggcagcaggtagccctgtcttcctgtgtgccctgagcccgctggggcagctgctgcaggaccgctacggctggcggggcggcttcctcatcctgggcggcctgctgctcaactgctgcgtgtgtgccgcactcatgaggcccctggtggtcacggcccagccgggctcggggccgccgcgaccctcccggcgcctgctagacctgagcgtcttccgggaccgcggctttgtgctttacgccgtggccgcctcggtcatggtgctggggctcttcgtcccgcccgtgttcgtggtgagctacgccaaggacctgggcgtgcccgacaccaaggccgccttcctgctcaccatcctgggcttcattgacatcttcgcgcggccggccgcgggcttcgtggcggggcttgggaaggtgcggccctactccgtctacctcttcagcttctccatgttcttcaacggcctcgcggacctggcgggctctacggcgggcgactacggcggcctcgtggtcttctgcatcttctttggcatctcctacggcatggtgggggccctgcagttcgaggtgctcatggccatcgtgggcacccacaagttctccagtgccattggcctggtgctgctgatggaggcggtggccgtgctcgtcgggcccccttcgggaggcaaactcctggatgcgacccacgtctacatgtacgtgttcatcctggcgggggccgaggtgctcacctcctccctgattttgctgctgggcaacttcttctgcattaggaagaagcccaaagagccacagcctgaggtggcggccgcggaggaggagaagctccacaagcctcctgcagactcgggggtggacttgcgggaggtggagcatttcctgaaggctgagcctgagaaaaacggggaggtggttcacaccccggaaacaagtgtctgagtggctgggcggggccggcaggcacagggaggaggtacagaagccggcaacgcttgctatttattttacaaactggactggctcaggcagggccacggctgggctccagctgccggcccagcggatcgtcgcccgatcagtgttttgagggggaaggtggcggggtgggaaccgtgtcattccagagtggatctgcggtgaagccaagccgcaaggttacaaggcatcctcaccaggggccccgcctgctgctcccaggtggcctgcggccactgctatgctcaaggacctggaaacccatgcttcgagacaacgtgactttaatgggagggtgggtgggccgcagacaggctggcagggcaggtgctgcgtggggccctctccagcccgtcctaccctgggctcacatggggcctgtgcccacccctcttgagtgtcttggggacagctctttccacccctggaagatggaaataaacctgcgtgtgggtggagtgttaggaccaacggtt

SEQ ID NO: 197128 - DNA, 1769 bp, Homo sapiens
tcaggtggtacgctgggcagaggcgggcagaggcggcgagaggcggcgagaggcgggctgaggcggcccagcggcggcaggtgaggcggaaccaaccctcctggccatgggaggggccgtggtggacgagggccccacaggcgtcaaggcccctgacggcggctggggctgggccgtgctcttcggctgtttcgtcatcactggcttctcctacgccttccccaaggccgtcagtgtcttcttcaaggagctcatacaggagtttgggatcggctacagcgacacagcctggatctcctccatcctgctggccatgctctacgggacaggtccgctctgcagtgtgtgcgtgaaccgctttggctgccggcccgtcatgcttgtggggggtctctttgcgtcgctgggcatggtggctgcgtccttttgccggagcatcatccaggtctacctcaccactggggtcatcacggggttgggtttggcactcaacttccagccctcgctcatcatgctgaaccgctacttcagcaagcggcgccccatggccaacgggctggcggcagcaggtagccctgtcttcctgtgtgccctgagcccgctggggcagctgctgcaggaccgctacggctggcggggcggcttcctcatcctgggcggcctgctgctcaactgctgcgtgtgtgccgcactcatgaggcccctggtggtcacggcccagccgggctcggggccgccgcgaccctcccggcgcctgctagacctgagcgtcttccgggaccgcggctttgtgctttacgccgtggccgcctcggtcatggtgctggggctcttcgtcccgcccgtgttcgtggtgagctacgccaaggacctgggcgtgcccgacaccaaggccgccttcctgctcaccatcctgggcttcattgacatcttcgcgcggccggccgcgggcttcgtggcggggcttgggaaggtgcggccctactccgtctacctcttcagcttctccatgttcttcaacggcctcgcggacctggcgggctctacggcgggcgactacggcggcctcgtggtcttctgcatcttctttggcatctcctacggcatggtgggggccctgcagttcgaggtgctcatggccatcgtgggcacccacaagttctccagtgccattggcctggtgctgctgatggaggcggtggccgtgctcgtcgggcccccttcgggaggcaaactcctggatgcgacccacgtctacatgtacgtgttcatcctggcgggggccgaggaggtacagaagccggcaacgcttgctatttattttacaaactggactggctcaggcagggccacggctgggctccagctgccggcccagcggatcgtcgcccgatcagtgttttgagggggaaggtggcggggtgggaaccgtgtcattccagagtggatctgcggtgaagccaagccgcaaggttacaaggcatcctcaccaggggccccgcctgctgctcccaggtggcctgcggccactgctatgctcaaggacctggaaacccatgcttcgagacaacgtgactttaatgggagggtgggtgggccgcagacaggctggcagggcaggtgctgcgtggggccctctccagcccgtcctaccctgggctcacatggggcctgtgcccacccctcttgagtgtcttggggacagctctttccacccctggaagatggaaataaacctgcgtgtgggtggagtgttaggaccaacggtt

SEQ ID NO: 197129 - DNA, 1385 bp, Homo sapiens
  misc_feature (13)..(13): n is a, c, g, or t
cggaagttcaggnagggcgaggccgtgccccacatccaggcagcgcaggccgcgggccgctcccctagccaggaagagccgccgtccgcaccgggaccggagaggaagcggaggtgaggcggaaccaaccctcctggccatgggaggggccgtggtggacgagggccccacaggcgtcaaggcccctgacggcggctggggctgggccgtgctcttcggctgtttcgtcatcactggcttctcctacgccttccccaaggccgtcagtgtcttcttcaaggagctcatacaggagtttgggatcggctacagcgacacagcctggatctcctccatcctgctgtgcggccctactccgtctacctcttcagcttctccatgttcttcaacggcctcgcggacctggcgggctctacggcgggcgactacggcggcctcgtggtcttctgcatcttctttggcatctcctacggcatggtgggggccctgcagttcgaggtgctcatggccatcgtgggcacccacaagttctccagtgccattggcctggtgctgctgatggaggcggtggccgtgctcgtcgggcccccttcgggaggcaaactcctggatgcgacccacgtctacatgtacgtgttcatcctggcgggggccgaggtgctcacctcctccctgattttgctgctgggcaacttcttctgcattaggaagaagcccaaagagccacagcctgaggtggcggccgcggaggaggagaagctccacaagcctcctgcagactcgggggtggacttgcgggaggtggagcatttcctgaaggctgagcctgagaaaaacggggaggtggttcacaccccggaaacaagtgtctgagtggctgggcggggccggcaggcacagggaggaggtacagaagccggcaacgcttgctatttattttacaaactggactggctcaggcagggccacggctgggctccagctgccggcccagcggatcgtcgcccgatcagtgttttgagggggaaggtggcggggtgggaaccgtgtcattccagagtggatctgcggtgaagccaagccgcaaggttacaaggcatcctcaccaggggccccgcctgctgctcccaggtggcctgcggccactgctatgctcaaggacctggaaacccatgcttcgagacaacgtgactttaatgggagggtgggtgggccgcagacaggctggcagggcaggtgctgcgtggggccctctccagcccgtcctaccctgggctcacatggggcctgtgcccacccctcttgagtgtcttggggacagctctttccacccctggaagatggaaataaacctgcgtgtgggtggagtgttaggaccaacggtt

SEQ ID NO: 197130 - DNA, 1171 bp, Homo sapiens
  misc_feature (13)..(13): n is a, c, g, or t
cggaagttcaggnagggcgaggccgtgccccacatccaggcagcgcaggccgcgggccgctcccctagccaggaagagccgccgtccgcaccgggaccggagaggaagcggaggtgaggcggaaccaaccctcctggccatgggaggggccgtggtggacgagggccccacaggcgtcaaggcccctgacggcggctggggctgggccgtgctcttcggctgtttcgtcatcactggcttctcctacgccttccccaaggccgtcagtgtcttcttcaagggaggtgctcatggccatcgtgggcacccacaagttctccagtgccattggcctggtgctgctgatggaggcggtggccgtgctcgtcgggcccccttcgggaggcaaactcctggatgcgacccacgtctacatgtacgtgttcatcctggcgggggccgaggtgctcacctcctccctgattttgctgctgggcaacttcttctgcattaggaagaagcccaaagagccacagcctgaggtggcggccgcggaggaggagaagctccacaagcctcctgcagactcgggggtggacttgcgggaggtggagcatttcctgaaggctgagcctgagaaaaacggggaggtggttcacaccccggaaacaagtgtctgagtggctgggcggggccggcaggcacagggaggaggtacagaagccggcaacgcttgctatttattttacaaactggactggctcaggcagggccacggctgggctccagctgccggcccagcggatcgtcgcccgatcagtgttttgagggggaaggtggcggggtgggaaccgtgtcattccagagtggatctgcggtgaagccaagccgcaaggttacaaggcatcctcaccaggggccccgcctgctgctcccaggtggcctgcggccactgctatgctcaaggacctggaaacccatgcttcgagacaacgtgactttaatgggagggtgggtgggccgcagacaggctggcagggcaggtgctgcgtggggccctctccagcccgtcctaccctgggctcacatggggcctgtgcccacccctcttgagtgtcttggggacagctctttccacccctggaagatggaaataaacctgcgtgtgggtggagtgttaggaccaacggtt

SEQ ID NO: 197131 - DNA, 928 bp, Homo sapiens
tcaggtggtacgctgggcagaggcgggcagaggcggcgagaggcggcgagaggcgggctgaggcggcccagcggcggcaggtgaggcggaaccaaccctcctggccatgggaggggccgtggtggacgagggccccacaggcgtcaaggcccctgacggcggctggggctgggccgtgctcttcggctgtttcgtcatcactggcttctcctacgccttccccaagcccgtcctaccctgggctcacatggggcctgtgcccacccctcttgagtgtcttggggacagctctttccacccctggaagatggaaataaacctgcgtgtgggtggagtgttaggaccaacggttacggtttcctaggagtatgtggttttgctgtgtggcctgtgtcctgactcgcacgtctgctgatggcctggctgttcctaccgtggctctgtcctcgccagctttccctgcagcggcatagcattcgtagcaggggcaggcgctgcatggagggggctgcggggcaggtgcctggaggccgctgtgccagggtggcctctgaaatgtgccagggagcccctacgtggtggttagatgggagctgaggtggaacaagccactttattcactgctgtgtttaagaaacaggaccctcctgccttccctttttcgcccctctgcctggctggcagtgtgcgtggtgtggtcagtgcccagggctcggtctttgcaccctgtcctccatccagcccggcccagcgcttgggtctgtcctggacacctaacacccacctgccctcgtggccagcagtggctgcgtggctgggagcccggtcagaggccgccgggccctcagtaggtgcgtcgtgggcgctggggacgcagtacggtgcctggcggccgcgtgcaccggagagattccattccagctctctg

SEQ ID NO: 197132 - DNA, 172 bp, Homo sapiens
gggccagtggagggaaggctcagagatgcagagatgcagcctgggctcacttaatgaaggaactttctcatggggagggctgccccgcaacagaggggtctgtctggggacatggtgagcttcctgtcatgggaggtgtctgatcactgaccaacagttagaaactgcagtg

SEQ ID NO: 197133 - DNA, 423 bp, Homo sapiens
cataagtgttaaatcatttgtaataaaacattttaaaagtgttttttaatagaaggaagtagtcatgtgaaggccatgcttatatttggcataaccatgagttaatataccactcattgtgccccatataaaatcccacttgagaatttattttagaatttaccatttggaaaagtgttgttcaatctcaaatggtgtattttcatctttccagtaataaaagctatataatggattacatttttcttctggccctggaagccaaggaaactcagagttaaaaatttaacactcaagctaaactgttgagccttctactacatagcatatttccattcttctttttgctgtaattgtcttgcattactgtttctagtcactctgtactatattatctgtgtatgtatgtttgtgggagtggta

SEQ ID NO: 197134 - DNA, 562 bp, Homo sapiens
agaccatggaattgttagaacaattctactctatctgtagacttgttttatttgaaagataagtagatttctgtcttattcaattcactgattttggttctttgttatttgcaatcaaatctaattccagtagatacaactcctaagtgcagagcactgttctagggattgtggggcatgctgacatgggtctcatgcctgcatagcactcatagcctgcagaagaacagcagtgctgccatatctgatggtcatttgacacactgaactccagccatatcaattttcttttcagtccccaaatggcagtcaccacaaaagaagaaaagataaagctcttagtgggatctgaatcaagagataccacttacagtggaaggaaaaaagatcattttcatggaggaactgcccttgaatttcgccttgaatattgatgagtattggaatctgcagagactgggataaggttgggatgaggtcgaacactacaggaacagaaaatatggaacatgtttgggagcaggccagggattctgtcatataaagtgcatgaaaaagcata

SEQ ID NO: 197135 - DNA, 607 bp, Homo sapiens
ttaaaagagattcttactttacatctggcatatttcttgtgttacatattataatttcattgaacatggctgtctgtaaaactatgtatatgatccggaagagactcaaattaaattaagttttaacagccatcaattcattttaaaatgacacaggcatgaaaaatgatctatcaagatttgtaaatcttattctgttagctattgctagagatagtctaaaggtattctacttggaatttgagatcaagacaaagattttctgttagtaataatattcagattatttttattttaatgtataaatttaaaattcttagaatattttcaacaatattttccatttctaaatttattttatttctaaacaaatgtaattactttatttattaacttttattttcagttcaggggtatatgtgcaggtttgttatataggtaaacctataggtaaataggtatacagattattttgtcacccaggcattaagcctatgcgcgttagtgaaaaatgttattgctttaaatatccaaattattcagctgcatttgatctcattctttagtccaatgtaagtaagagtaaaacaatgacatttaaggccac

SEQ ID NO: 197136 - DNA, 204 bp, Homo sapiens
taacacacatctcagacttacacagccaacaaatctggtccttcttcaattttattttatatcagttaatggcgtctctattcatccagcagctcaggccaaaaactttatagtcccctttgattcctctcctttcctggcctcaacatccagtccactaacaagtcctcagctctctcccaacaaaatctaatccaagtcttg

SEQ ID NO: 197137 - DNA, 601 bp, Homo sapiens
attaagtgagaagaaatagatgaaacaagattggcaaaatgttggtaatagttgatgggtacatgggggttcattaaactattctcccttttttttatatgtttgaaattttctataataaaaagctatttttaaaaaacacacaagctactctctcacggaaggaggcttggcaagctctttctttccttctgtcacctagaagcctggaggagtatgaggaggcctgggatctgtatgctaggggagaagatccagccagctctttctcctggaacactctctctcatctagctagtataatgggtatccaggtggacacaggacagacacccacctgctcttttcctctggttctggtgggtatagttgggattcacctttcctcagcttacagcagtaacatcataatctgggtctgggcttagggaagagaagcaaagccagccttgtgacctgccttagttttagcctatctggcaaacctagctcaggtaaagaagctatctacatggtctagcctaaatcatgaattctgcttcagggtttgggaccaatgcttcagttagtaataaagtgtcactttgtcttgctttctcct

SEQ ID NO: 197138 - DNA, 331 bp, Homo sapiens
tttaaaatcataatagaatggcctttagaagaattatacttgcccttccctttgtgaatgaccatatcatgtttttctcatttcatcaggaaaaatgttatttttggcaatcaaatttagagattatatccttaaaagaaaaaaacccactaaacatgccatcttttgattatgtgtacaatattcagaatgctgttgctgtaatctaatacattagaattggtattttcaaattgaattatgtcaaggatgtcttttcaaatacttttgtttcttaaaaacatctatctgcccatttaccttcttaaccatccgtgttgaaaaagagaat

SEQ ID NO: 197139 - DNA, 430 bp, Homo sapiens
atctgtacttgaccatgaaagagtatactggtactttctttacggagaaaaccttaaagacggtttcctaaggtggacccaatgggaaattacacaggtttacatgagacaaggtagtaaaagagtagattaattcggccgggcacagtggctcacgcctgtaatcccagcactttgggaggccgaggcggatggatcacctgaggtcaggagttggagaccagcctggccaacatggtgaaaccctgcctctactaaaaatacaaaaattagccaagcatagtggcacgtgcctgtaatcccagctactcggcaggctgaggcaggagatcgcttgaacccaggaggcagaggctgcagtgagccaagatagtgccattgcactgtagcctgggtgacaagatcaagattccgtcttgcaaaaaaaaaa

SEQ ID NO: 197140 - DNA, 630 bp, Homo sapiens
gaataagtataggtagggtatttatttatggcaataagtagccttgatgagagtttatcatgaatcactgtgatgggcatttaagtgtactgaacggttttccaggtttctattgttcagtcttatgcttattgtgcatgttttgggcgttaccaactgtggggtggaaatagcatttttaggatttgaagttattggctttaatgtttcacttatgcttcatgaattttgatttatatatgaattgagtctcctcctcctatgacctgcggagtggctgcttggtttgggaggcttagaagcgtggtgctgttggtgtaggtccatctgtttggcaatattcagagtcagcatcctctgcattctttgtgaagtgaatgtaaagctgctcttttcctttttcagatgccccacaaccttgtggtcttaattttagagtgtcattttgttatcagtgattcatttcttttgttctggtgcttgtgttcttttgcagagtcccagggtagatgtaattatagatcatgtattctataagtgagctttggtggaaaagtcaagtgagggataatgaaatatttgtaattaacgtttaataaaaagggtgtttgaagtggtgctaataaacaa

SEQ ID NO: 197141 - DNA, 631 bp, Homo sapiens
gaataagtataggtagggtatttatttatggcaataagtagccttgatgagagtttatcatgaatcactgtgatgggcatttaagtgtactgaacggttttccaggtttctattgttcagtcttatgcttattgtgcatgttttgggcgttaccaactgtggggtggaaatagcatttttaggatttgaagttattggctttaatgtttcacttatgcttcatgaattttgatttatatatgaattgagtctcctcctcctatgacctgcggagtggctgcttggtttgggaggcttagaagcgtggtgctgttggtgtaggtccatctgtttggcaatattcagagtcagcatcctctgcattctttgtgaagtgaatgtaaagctgctcttttcctttttcagatgccccacaaccttgtggtcttaattttagagtgtcattttgttatcagtgattcatttcttttgttctggtgcttgtgttcttttgcagagtcccagggtagatgtaattatagatcatgtattctataagtgagctttggtggaaaagtcaagtgagggataatgaatgaatcacctgataacaaaatgacactctaaaattaagacggtaccgagctcgatc

SEQ ID NO: 197142 - DNA, 365 bp, Homo sapiens
gtgcacctgaaggcccaacaccacttgtaagctgccaaggcttggggcttgcagcctccaaagcaatggcctgagtggtatgttgaccccttttaaccacagctacagctcaagaagctaggatacagggcaccatgttctgaggttgcactagacagggtgcagcctgtccgagccacaactgccacaccagtctggatccaccttaaggatcccacttcctttcctaaccagagacaatatcccctgaaatcagaagttaggaaaggactagaagccatcattgataacttgaggattcagggcctcctcaaaccctgcagctagtcgacgcggccgcgaatttagtagtagtaggcggccgc

SEQ ID NO: 197143 - DNA, 119 bp, Homo sapiens
ggcaccctttgcatagctgtgatgaaaaacgtgcccagcatagttgttaaacatggcagccacagcacgtctgctggctctgagcaggctcccaggcccagactggccacacacgcact

SEQ ID NO: 197144 - DNA, 534 bp, Homo sapiens
cgagcgggaggtaagaagcgtgaaggttcaactctgagaagcacttatggggcagacagaagaacttatgaaagagatcaatgaggaccatctaacatgaaatgtcacagaataaaaccagatgtcacagaagtcaaggtaagatgatcctgaagaagagagtgtgtaccaataaaagacacagcaaaagacaacgtggagatgaaggggtcttagccaaggaaagatgtgattacttttgcatttaagagatgtctcaagtttataatgtggagaagagactgaagagtcagaaaaatgaagcgaggagttagttataagactattgctcatctgttaagtcttatattaggtttctatgaaggtgtatctgctgggcaaatgaaaagcctaattgcatagagtaagagatcagttgtcttctgctctgctgcagtcacggagaaagcatttccttcaagcaagccagcctgttcacctgtgttgttgatctattcatttcgttctaattcccaagggtattgtctttcctac

SEQ ID NO: 197145 - DNA, 158 bp, Homo sapiens
gcatttagtgggtaaacacagtcccatggagtcatatgagaacactacctagcttcaaggatctcaaccaagtttccagaggatgtaagatgtaacatctaagctgagttctaaaagacaatcagaaatttatcaggcaaatggtgtatgtgtgcatg

SEQ ID NO: 197146 - DNA, 462 bp, Homo sapiens
caggagtttcggcacggagcgtgcaggctctacgatgagggccagtgtcgaggaacaggtccctgggaggttttcagtctgctcagaagtgttctcatctgatctcagcatcagactgatccacagcctggctcaaacccatgaccacttgaaagctgacctatttttatttgtttcctcgagacacacttaaatgcagctaccacgattacccaaatgactgtctgcgtccatctcatggaagcctgtcattctcctgtgcttccctgggcaccagcacctttctgctctgagaagatccttcccaagcatggacttggttcccttttgatgagccgtctagcctgctctagacggtacatttaagaattatgtgatccaagatcaaggcagatttggtaataaacttttaaaataataaaattaattaaataaaaatgggtgtgtgagccctaggaaaac

SEQ ID NO: 197147 - DNA, 498 bp, Homo sapiens
tatagagttgctctgtgctgccagttagaaaagcggtgccactgtgtcttggagaggcgtgtaacaggcaggtggattcctgggtgggtgctgaaccttcaagagcttccaaaggctagggctggtttcacttttaaaaatttgtttttgaatcttaagtctaggaatcagcacgaagcaaaggctggacctttgcttctatgttcctctcaaattccggagcagctcaagtcccctgcatccagccgggacagagaggcttccggcctacacaaccccttcgcttccttgtaattcttaaattgggctgggtctacacaagtagcagggaaaggctttcctataacccaagcttttttccaacaaaacacactcccaacccctttggggaagcattttctgacactgaacggactctgtttgggcctcctaaaattggtcccatttggatctttccttagcaactaaaaatccagaaccctctgacatttgcctatg

SEQ ID NO: 197148 - DNA, 495 bp, Homo sapiens
gtaaaaaaaaaagtcattttctgtttttacctaataaatcaacattagactccgtaaagcattattcctttgggaactacctagatctctaggagataaagtagaggagagaaagagggggaaaaacagggaaaaaaaagtggatagcaaagaaacaatatgccacagaacttttcaggtcgaaaaccctagaagtgactatgttggtaggaagccctgattctgtaggaaacactatttctagtgtcctccataattcaagttgctcatctttttgttttgttttgttttgttttgagacagagtcttgctctgtagcccaggctggagagcaatggctccatctcatctcactgcaaactccgcctcccaggttcaagcgattctcctgcctcagcctcctgagtagctgggattacaggtgcctgccaccacaactagctaatttttgtatttttagtagagacagggtttcgcgatgttggccaggctggt

SEQ ID NO: 197149 - DNA, 510 bp, Homo sapiens
ccatttctcgaattacttccatgcccttctcaatgtgcatcaagaccttcaaggtcatattctaagggagtggggagggaagtccagccgctgtggcagttaacagagaaacaggcttctaagaaaaaagataattattttattactaaaatcctctgagtgagagtcactataaggccatggagacaaggatataggctggttaaaggccactgataaaagtgtgaaaggaaaatatcttgtgccctcaaaatcctagctaaagggaacactcaagctgggcaaatctgcctcccattctattcaaagtcatccctctgctcactctgatagaagcttattctgattgcctcctttggaaaagcttatgagaaactcaaaagaatgcaaccatttgtctctcacctacctgtgacctggaagccccctccctgcttccagttgcccccaccattctggacagaaccaatgtacttcttacatatattaattgatatctcatctctccct

SEQ ID NO: 197150 - DNA, 446 bp, Homo sapiens
agcccatttctcatgatatattttatgttatatatattaccacgattttagggggaggtcatggtattataggtgagaagttccatgtgtagattgtttttcagagtttagaaaattagtctcaaagggaagagagaaccacctgtattcacagtaatattaatattactaatattacatgataagggctttttcatagtcccatataagtgtttggggcaaatccctggcacagctagtatcatttgtaagctacattggtgtctgacaaaatccagttatttaaaaaacagaaaacagtggcttatttataatagcaatattctggacatatggccagtgtccatcagtgggcgtagttgaagcaagctgtggcatgcctgtgccgtggagcaccactcagctgtgaaaaggaaggagttgtgggtaggcacagcaagctggag

SEQ ID NO: 197151 - DNA, 301 bp, Homo sapiens
aactcagtaaaacccagcaaccaacacctatcagctagaatgaccccatcatgcatcatttagcatatatatgttaacctaggcattgtgtcagacactggagatttaatagtaaaaaaaaactacccacataggaatggtgcctgtccttatggagatgaccaactggtggaatatagagttacaaatcagagagctaattatgatacactgtttcaaggattgtagtagaaataatatgacttatcatgggtacagagaaaagagacactgatctcttctgaggggatgtgagagagta

SEQ ID NO: 197152 - DNA, 447 bp, Homo sapiens
gtatacattttcatctattacattttccttttgcataaaaacttcctttagcatttgtttttgtagtgcaggtctgatagccgtaacttttgttagcttttatttgtgtgagaaaatctgcattttgtcttaagatgtttccctttctttaaaacagttttgctgagttaataacaaattataaataatttgtacatatttaaagtgtacaatctgataacttttgacccatgaaatcatcaccacgataaaaataacatccccacaaatgttctcctatacaggagattttaggaggaaaggtgcatttgaactaaatcttcaagaacaggtatgttccccaaataagattagctcattcaatcaaaagtatgtattaaatgcttactgcgttcgctaggatgaataaaacagtcatgatttctagaaggagatgcatattataaa

SEQ ID NO: 197153 - DNA, 462 bp, Homo sapiens
cgacggacggtagctgttactggtagttatgtggtcaaccaattcacttgtattttaacgtagacgaacaaggaaaagtttactatgtgagtaataaggcatttgtaagagtaaatggcaatttagggatgcaaacgtgaaattagacatgttaattattgttgatgtgagagttgtgaaagaattggattatgtatagtttcaggatataaacttggaacatatctaagagaaagttttgggaggtaggtttgtaattttttcttttcttggcttaggtaaatgatggggtggcccagatgtagcagtgaacagttactgcaacttggacataatggcttctcactgtgtgtaagagggagatgctcattggtaattggatgtctttctttttaaaagtcatttaaaagtatttcaagtatgaaaaggtatgaagagtaattacagtacaacaccatgcat

SEQ ID NO: 197154 - DNA, 426 bp, Homo sapiens
agcttgcctcaggatgctgaagtgtggtttacctacacaggagatgcaaaattacttggaaatttgcacttcattggaggcaacccagaaggaatgactgattagtgtgaaggcgtaaatactctagtcccactaccactgacaaggacaactgcggcatcctttgagcaggaacaaagcctaaaaaccctataagagtccagaaaagcaagaagccacctacaaaaatagaaggaggtaagtgaaaagtgagagcaagttcctagcaccctaaagaaaaatctagctcgattgattgattgcaggatccctttccaactcactggctatgttcccctcctttccataaatgatcaagttggatccccagttccttcaccaaaaggaaagggattttgaattaggaataaaccctttggacagtgt

SEQ ID NO: 197155 - DNA, 271 bp, Homo sapiens
aaagagacatgaaatgagcacatgctattggaaacacgttcagctgatagactcgcttgatgtagggttgctaaaaaccttcaatttgttaaggaaaaaaaagtgcattatctatgaagtgcaataaatcaaagtgtaataaaatgaggtacacctgtactttgtcttcatcgagcacttctcatatttgccaagttcccactgattgctgagtaataagaataaagttaaaatattttaaatactgtatcatcacagctcaatgggatgt

SEQ ID NO: 197156 - DNA, 615 bp, Homo sapiens
tgaaactaagaagcaagtgattggaaagcaaagactaagttctatagttctagccttctggaatcagtctgaacagtctgagctcttgggcactgacacagggttatgatatacttcaatgccttactgaacttcactggcaaattggtgatacccaatcaactggtgcattcctgctaaatcttgctgtaatatataactgaaatctattataggcataataactgatctgaaaacaaaatttgtaagggtaaaatgcactgagaggctcaatgtgcaagtaagcacaatgttttaagtgcattttatatcaaatttccaccttctacttggagtcactgtgtcacaaagcaaagaaacacctacgaaatacatgcccaacagattgtgaaaacagtttatttgtccttatggcttcaaatgtagccatttgaagtcaattgtagacaatttggaagccaaatgttcccattctttcctgcttttataccacacatggtaacaggatagttactttaatttttttttttttttttttacctcttcttaaggaacatttattgttttacagattcttaaggaaccaacaagatagttagaagggactgtctatac

SEQ ID NO: 197157 - DNA, 105 bp, Homo sapiens
gataagtgcaatatcagagatatttttatattacagaaacacagaagagggttctgaatccaaattagagattagggaagacagtaagtatagtagtctgggagg

SEQ ID NO: 197158 - DNA, 347 bp, Homo sapiens
gttggatgtggatgtgtagccgtggactcagagttagacactgtggaattggagccctgactggtagtgtgttttcatttctctagggctcaattttttatttaataaaaagaatacttctgtattttaatgaataggatcaagtgagaaactgctttgtaaaatatgaactatgttcaggtcagcaattatactaattctttctatgatctcatctagtctaagatgccgtaagtgggggggtttttcatgaggatgaaatctgtccgttgccagatggttcaaagggcaagccctaagtcagaggttttacctcaactgctttcaagtcacagataaccttgggc

SEQ ID NO: 197159 - DNA, 477 bp, Homo sapiens
tcagtccagaccctgggcaccccccttttgccaggatcgtccccacccagcctggacacattgactgaactgttttctaggacactggattcaggtcaggtattacctccaccaagaagccttccctaatgttctcagcttggatgagatgctcctcttctgatattctacaggtcctgtttattcctcttctacagcagtgctcacgctgtgtcacaaggatgtactcatatcctgctcatcattgcatgtgaactactggagataactatctatatacatatatcacatctcctaatatgcgaagcacaaagtaggaactcaataaacatcaaacatcccacttccttggcagtggatagcatgaaactgtttattggcactaacctacggatagttaatcagactgattggttctctgtttccttcttctgagatttttacatgtgaataaaagtagatggactgagaagcaag

SEQ ID NO: 197160 - DNA, 151 bp, Homo sapiens
cccttggtctctgacacctgctccccctgtttcctgtgaccctgttctctgtggtccccttcggacaggcttgtctggattggcttttattgctttctcttctctaaagggttgggattccagtccatcctgaggtgctgtagatagtcac

SEQ ID NO: 197161 - DNA, 557 bp, Homo sapiens
ttctgttattagaattagtttatttatttggaataattcacttcttggattggatggatgccaagctggattattaccctaggctgctgatggaaagcatccaaaagttttaccagttcttttgttagtttcttgtatagggtaagaataaaaactcatttaaattgccataatttatgcaatgaaacccaataaactagccaaatttcaagttcctgccttccatcaacatttccattagatgaaaactccttctttatctaaaccaattgatggtagttagatcttttaatggatttgattctctacttaacattcatgagtctttaggatgaaaactgcttcagaaaatgaagatttcaatgactagtttagtctgaatcatcatggctgaaattagaaaacacaaagccagtgtgatcaatgggaagatcattgacataagtgtcagtttctgttaatggtgtggcctctaattaattttgtgatcttttgcaagttacttaatccctgtctgttttttactctgagagataataaaattggaccaaatcaat

SEQ ID NO: 197162 - DNA, 840 bp, Homo sapiens
atgcttactgagtaattcccatgtacctgataccgtgccaggagccgaagatacctacatgaattaggcatagcctcttctttgaagagaggctgatgctgttttggaggtaacagacatataagcaacacattctaatacactatggcgagtacaggatagatggtgtttcaagttcatgcgttaccaaagtaaggagtggttaattaattttactaaaagggagagaacagtattggctttaaagaaaaagtggtttgagccagacctgccagaataagtcgatgggaaaagatattctagcacagaggacaggaagagcaaagacagggaggcctaaaatgaagggtggatttgcagttgttaagtgggaagactagatatagactgggtttgaagtctactctgccacttactagctgggtggctgtggacaaagcagtaagccttcctgtgagtggtttcatcatctgtcaaatggggatgcaggatccatgcctcatggggctgttgggaggattccatgttagtttagtgtgcttgggatgttgtgacccctcctgaacattacagccctgaggcatcccctgttctttgatgtgctgtatataagaaaagagactgggcgtggtggctcacgcctgtaatcccaccactttgggaggccgaggcgggcagatcacctgaggtcaggagaccagcctgaccaacatagagaaaccctgtctctactaaaaatacaaaattagccaggcatcgtggcgcatgcctgtaatcccagctactcgggaggctgaggcaggagaatcgcttgaacccaggaggcagaggttgcggtag

SEQ ID NO: 197163 - DNA, 362 bp, Homo sapiens
ccctggctggcccttaagtcctctctgccttttgtgtttacccagaaggcctaagaggtgtggagtgggcagaggctttgtagtatgggggctgtgtctgggctttggatttcattccatccccctgcccaccaactgtgtagccttgggtgagtaaggtcttcatctgtagaatggggagaatgatccgtacccaactgtccactgcagtcgctgaggttgcccagcccttgcagcctggataagcttgcctcagactttcttccatgccccatagaaatccagagccctgtccaggctttctggtggcacttctgtctctttagttctgtttctgtgtcttctgccagcaccaccaatac

SEQ ID NO: 197164 - DNA, 519 bp, Homo sapiens
actctggggacatgcaaagagtcatggggcttcttctgcggagatgctcacagtatgcaatggagcataatgtatacaccaagtagaaattgagataggatgtggtaaatgtcttgaaagtggtgtaaggagagtgctgtgggaattccgaggcgaaaagattacctctgactgtggatttaagagcttcatggttggcccggcatggtggctcatgcctgtaatcccaacactttgggaggccgaggcaggtggatcacctgaggtcaggagtccaagaccagcctggccaacatggtaaaaccccatctctactaaaaatacaaaaaattagccgggcgtggtggcatgtgcctgtaatcccagctactgaggaggctgaggcaggcgagtcatttgaatctgggaggtggagattgcagtgagtcgagatctcaccattgcactccagcctgggcaacaaaagtgaaactccatctcaaaaatgaaataaaataaaataaaaataaaaataaaata

SEQ ID NO: 197165 - DNA, 983 bp, Homo sapiens
tatttttttgcatctcacagatacatttattcatgctatgaagtaaacgacacttatacaggtgccccgtgatgtttcacatttccatctaacatagcttgcattgcatttttaaaatttattattgttttttttagagagacagggtctcactatgttgcccaggctggtcttgaactcctgggcccaagcgatccttcctgcctcagcctaccaaagtggtagaactagacaggagccaccatctccagccacttgcactgcattttaaaagtgcactccagtgtggaagaacagactgtagctggcaagagtcaaacacagactgtctgttattgtagtccaggcgcaagagggaggtggctgggatggggtggtctggatggatctggagcagtacaaggatcgaacatgttttttgagatggtgtggacaggacttgttgctgacccaggtgtgggaggtaaggaaaggaggaatcaaggaccttagacacaggacttgagcaactgcatgactgggatgccctcacttgatgtgtgcaggagtaggattggcagaggaaattaagagtctagtttgggccacatggttagtcatccagggactgactatatccaaggggcagctttaggtgcaagtccggagtcctggacacagctcatggctagagggatagatacaagcatgcctgctgtagaggcaggtgaaacgtggagcagggcactgcggacatggaagagccagaagagaatcctgggccaccccaacattgagagagtgaacagaggggaaagcaagaacaaatggatctcagggaccatgttctgtgccaaagaaagacatgacctttggaaccatagttatgctatgactttcatatttttactgcatgaaagaagtcttttgtctttccatttccattgtgaagggaatgtgtttctcttcttcggccactgttttgtggctgatccctccccagg

SEQ ID NO: 197166 - DNA, 292 bp, Homo sapiens
aatgtttccattatagtatgagaaaattaggataagttaaaagtgcttactgaaaaatatttcacgaggctaattttgttcattacagatccaatcttgcagtcctgatccatagaatggtgtgcttgtgtgattgattttaagtcagtataaattagtaacttttgtatcattcaggtgatcttaacaaaactggcagaatatagaattgagaatgtgaaagaagctatttataaatgaatatttaggttaaaaacgtccatttagtaaacaatttttttaccctgaaatg

SEQ ID NO: 197167 - DNA, 396 bp, Homo sapiens
tgagaaagatgttactatggcttcaagatccaaggtgagaaatgggagacaataaggctcataaaagagaaatctgtttggatctgaatcagaaagatcacacagtatagtaatgagaattaaaactgcacagaaacaatcagggtttagaaggctaaagtggacaatttgaactcatttactagtagcttggcaacagttaaaattttcaaaacaagctgatttgagctaagtctcttagcattcaccacattatactgagttatctatttctgtgttttgctatcccaccaaactgtaaattctgctgtgttttattcatcattttactgcctctgcctagcatggtacctggtacatgcttgccactcagtaatcacttgtggaagtcaactg

SEQ ID NO: 197168 - DNA, 730 bp, Homo sapiens
taagggacttcattctcccatgtagaattaatctcagacatgacattctcatgtgaaagacctaacaccttactagatacgcataatacatctagaaataatttcaagttttattaatgtttaaatctctaattgcaattattatttaattgaggataaatgtgtttttccatgtcaatacatttttaattttataaggaaccttttttaaaaagtcattcacaaaaattacttttagaggctatgttcaagagcatatctattttataagatttatgatgtattttttggaataaaaacactctagaagattctgcaatgtaaatgttactgtctcaaataatatatttgccattatagtattcactattaaaaaataactatagttaattattttatagtatcaatgtcttctttttccaatttagaaatttgagtttaagagtttttataatgtggatgggagcatggcacagtgactgtttcagtccagatcacttccctgtccaaagatatcacccagaggaaaaggaagactccttaccagtaacagcacacaccatggtgactgttcacactgtgatgctcctatacaatcttaattaagctcaacagacacctggtatcctacctaatgtgtcttactcaaagcacaaagaaaaaaaaaatcagcaataattgggagacactgcaaataacctgaaaataaatgcatgttttggccttttta

SEQ ID NO: 197169 - DNA, 180 bp, Homo sapiens
gggatttgggatccctgggaattaaatttgatgtggtaatgaagtgcagatggttttctggaggctcatttttgtgagaaggaattttaactcatggtcactagaaggaattatttctcaggaatcttgcctgtgctgggtaggccagttagacaataaaactatttgaaatttaaaaag

SEQ ID NO: 197170 - DNA, 455 bp, Homo sapiens
tcaggagctggggctcctctctgcaaatactgtagaacatcagcgtcactgaatgaatggagttggttacctgaccagctttcctactcaacatggagctctgtctgtctcatctctctcgattcttcagtgcataacccagttcctagcttgtgatggatccttcctaaggatgtattgggtaaattaatgaatagtgattcgacctaaccaattaaatccctgggagttttaaactcttgtccaacatcagttttatttcacgtcttattataaaacagtacatacctcttccagaaaaagtgaaaaacccttatatcacttagatgtaactaattaaacaaactgatgcatgtgtgtgtgtgtgtgtgtgtgtgtgtgtgtgtatagttgtatggtggtatatatattagtttgtaaatagctcttctactaaatacatgataaatatactt

SEQ ID NO: 197171 - DNA, 774 bp, Homo sapiens
ggatgattgattaagtctaagtgggtgaagttgtggtgaaccatgatagcaccattgcactgcagcctgggtgacagagtgagaccctgtcttaaaatgaataaataaatatttgtaaagaaacaccatacttacatgactcattcacgaagacagactatattctgggtcagaatacaagtcacaattaatttaaaggattgaaataatacagattatataggaatcagtaatatctccaagaaaatctcaaatatttataaattaaataacattcttctaaataattcatgtatcaataaggaaaccataaaggaaatttaaaaatattttaaactaaatgataatgaaaacacagtatctcaaaattgtggggtgcagccaaagcagtgctcagagggaaacatatagctttaactgcttatcttagaaaagaaggaaagtctaaaatcaattaacaaagcttcaaccttgagaagttggagagggtgttggggggaaaagcaaactaaacacaaaataagtagaaagaaggacataataaaggtaagagcaaacatggatataattgagaagagaaaaccaaattagactcttagatgaacaaagtttataaacttgtagctagactgatcaaatcactggtatgacaaatgaaagagagggtataactatggaacccacagacattagaagggtaagaaaactggttgcagtggctcatgcctctaatctcagcattttgggaggctgacgggggaggatcacttgagc

SEQ ID NO: 197172 - DNA, 547 bp, Homo sapiens
catgaaagcctgtttcaaatcatttaaagaaagcttactggcaaatggaaaagagtaagttgtatagcacgatacataaaaggttaatatccttaatgaataaacaacacaggagtaaggaaaacacaagaaattcatggaaaaacagacaaaagacaaggaggggacaattctttggagaatcacagagaaccaataaaggaaaaatgaagtcacactcagtaatataaagatccgcaaataacgtagtcgagtgatagcatatttttaatctcttgggttaaagatctagacaaacaaacatagaaagaaaaaaaaaaactattaaggcttaggggttgctgagattgtcctggaatgcagtctcatggcctgctggtgcaaccacaagtcaatatagagtttctggacaaccatttagctgtaggtattaagaagcttaaagagtttcttatctccctgaacctagtaatattttcctctaggaatctactttggggaagtaataagacaatcagacaatgatcaaaggaatatttataacagc

SEQ ID NO: 197173 - DNA, 423 bp, Homo sapiens
  misc_feature (409)..(409): n is a, c, g, or t
ctcagctagactgagaggccactgcaggtgctgccacagccccctgtccctgcctgattccttgtttctatcctccgccagactggacactaaaagacggcagagatgggggcatgggtccctgtgatggctcagtgtccagcccagcatacccggcaaagatggctgcctccccgcagccccagaagtagccctcccccagcaggacagctaccacaaagtcccagggacaggtgtctccctccatctgattgcactgggggctgcctcgtgccaggcatggggctggaccatgtgtttcctcccagctcagccctgctccaggttgggggttctcctcctctgggctgcccttcctcaggttccatgagcctggagatgcagaggtgctcagagctggagcccaggnctgaaccaccgctc

SEQ ID NO: 197174 - DNA, 550 bp, Homo sapiens
acctgccacaaggtgtaagccttttctaatgtcctgttgcaaaggccttgaagacaagggccataaattttcttcttgtgtgtggctggcatataggcacccaaggaatggttgtaaagctattttagttgttccttctcagggtgctgaaacagccttacttaccaacccagtgcttctgaaacatttttcttaccaagtcatctggagatattgctaaaatgcaggttctcattccaaggttctggggcaggacctgagaatctgcattcccaacgagctctgaggtgatgcagatgctgctggtgctggatcacactttgatagtgaagtgctaaccctagtatctacatttgctttttagaagtattgggtaaatgggttttattttcttatggtattggaataaaatcttgggtttaggagcttttttctattttttgttttaacaatttctctatcttgttaaaaaaaaactatttgaggaattgttccaacatactttgatgtaataagatttttaataacagcaattgaggcacatggagtg

SEQ ID NO: 197175 - DNA, 422 bp, Homo sapiens
gaaggaaaaataagaaaaggaaaatgcaagcctcaggaaaagctcctagagtggaggaaaataaaacccaagaaacaggagcagagtcttcaggaatgctttcctggccaccatatttaaaattgtatctccctgtccccatacacactcaccatctatcaactatttatcttgttcatcatctgctttcattagaatatatgctgtgtgagggcagagatttatgtttcttttctgctcttttgtgtctgtaacttagaaggtctgttgctgtcaagagggtgccattcacgttataatctgaagaaagtggtcttcccttcaatacaaccccaaatgaaaagtgaatcattggcatggaagaaaagactggagatactctcagtgacaggaaaaagatgaaaagatcagagatatgttag

SEQ ID NO: 197176 - DNA, 242 bp, Homo sapiens
tgaaggtctttatcttcattgtcttcacattgagtaggatgtgagtaggctgaggaggtggaagaagaggagggttggtcttgctgtctcaaggtggcagaggtagaagaaaaactgcatataagtgggcccatgcagttcaaacccagttgttaagggtcaactgtattttctcatattttgtgggttgtcttttcattttcttgatgttgttttttaaagcataaaagtttttaaagttt

SEQ ID NO: 197177 - DNA, 438 bp, Homo sapiens
tcaacttcggttctgccctaacggagagccacaaataaccctaaaccatagataactcaaatgcatttttacttggcttttgactgctttttatgataattttcacagcacattgctcttctaattatgttttgtttgggatcatattaaaattaacttgtatttagtgattatgtgctacctgatgagttaaagaggagccctgggagtgtattgaaaaaccaggctgtggatggccttcagtactttacacaaagaaaagccaaatagttaaaaaggcattaaaaatggaaaggatgtaactagtgggcaaatagctccaggacctcagttgcatgaacttagtatatctctttcctcctccttctcccctccctcctccacgccctctttctcctagtctctatttccccttttccttatcctcttcctccatct

SEQ ID NO: 197178 - DNA, 415 bp, Homo sapiens
gggaagaggctggtggctggggaagaggtggctctcagaggtcatggatgggcttttgggagggaagtgatccagtagagaagcagaggcgtcagagctccttgcagagatgaggagagaacccaagtgcgggtggagaggccaccctaagcggtggcttcccccaggaagtaacctggtggtgggagaacgagccaattctctcttggctcttattttctcggtgatacaagtgagacatcacccgagggtgagaagtggggagaaggtataaagcagtctggggtcggggagggaactcctagcaaatgcagtcaaatggctggaagtgcgacagctcttgagatgcgtggatgtgaactgcaggctggtctagggcatgactagcaaggaggccggtgacagctcacctgtg

SEQ ID NO: 197179 - DNA, 573 bp, Homo sapiens
cttagaggatccccgactagtccaaccatacttagcaaggaatcaatctttgtgaggaaataagcccagtctggtggaatggggtatttgaggttgcttcactcaggagaatgacggccccagcattctgcagtgaagagtttctgtaaaacagtcctgtgaggttggttttattccaggtggacaacttgggatgctgaggcttcaagaggatacctacttaggaagtggcatagccagggtttgaaagcagatttgtttgtctcttagatatgttctttttccatcttattacactgtttctcaaacattgagtggatcctccatgacctttggttgcttgtcctgtgaatgcataggactgaggtggactgggagaataagagcttgtgggcagctcatgttgtcatggtgaatatctgtgtgtttgaatacatgtggactaatgtgatgaatgatcgctattgatgagtgacgtatattaatatatccttaatgttctcagcctgtgaagtttgtttattatttttatgtaaaagttatactgtggtcatatgtatgtaagagggattc

SEQ ID NO: 197180 - DNA, 934 bp, Homo sapiens
agagtagcgggactatgggcagcagccagcaggccagggttagtatgtgtgcgttgtattgaggtagagacggggtttcaccatgttagccaggctggtgttgaactcctgacctcaggtgattcacccacctccgcctcccaaagtgctgggattacaggcgtgagccagtgagcctggctgatgcggaccaagtctttaacagttaactaccttgtactgatctgcaaaatgatagaaaaacatgtaagtttaggtggatcagcagagagtctgttacatcttggtggtctcagagctcttttctagctctctgagtttctgggattctaacccacatacttcaggagatgtcttaataatggttgtattagccacttgttacaaaacacttagcaaggaatcaatctttgtgaggaaataagcccagtctggtggaatggggtatttgaggttgcttcactcaggagaatgacggccccagcattctgcagtgaagagtttctgtaaaacagtcctgtgaggttggttttattccaggtggacaacttgggatgctgaggcttcaagaggatacctacttaggaagtggcatagccagggtttgaaagcagatttgtttgtctcttagatatgttctttttccatcttattacactgtttctcaaacattgagtggatcctccatgacctttggttgcttgtcctgtgaatgcataggactgaggtggactgggagaataagagcttgtgggcagctcatgttgtcatggtgaatatctgtgtgtttgaatacatgtggactaatgtgatgaatgatcgctattgatgagtgacgtatattaatatatccttaatgttctcagcctgtgaagtttgtttattatttttatgtaaaagttatactgtggtcatatgtatgtaagagggattc

SEQ ID NO: 197181 - DNA, 333 bp, Homo sapiens
tatatttttaccaaaatgtaattatttattcctgtacatgctgttttttatcaaatgctgtttcatttcttatgagtgacataaagcctttgccggtgatatttttctcttatagttataaaatcaaaaatatgacagagagttgtacctctctagagaatgtataatgcaaatggatcttatatataatcatatcccctcagccttctcattcttgtaagttcatttgcttcataaataaactaaatagtttgtactgaaaccagaagttgaccttaatatttgtgttggctgggcacagtggtgcacgcctgtaatcccagcactttgcga

SEQ ID NO: 197182 - DNA, 586 bp, Homo sapiens
agcctgcacagctagtcagtgaagagtccagcagtgagacttggctgccggactccagacaccatgctgttcacctgtgctgtgctttctcctgttattttaccaaaatctcctgtttacctctgtcaacaaccagcaaagccggacgcttgttaaagtggtaggggcagtttaatgggtaacatactatggcagtagggaggatgtttcagcatgaactggactcagcttcgtttgtacagaggttactggtgctttaaagggagaataggggaatgagcagaggctccgtagagtcagggaagtgaaaaaaattacaaaggcttggtcagtgtagatgctgattagaccaactgtgtctgtttgctggcaatgatccaagaagtcaggattcaaccctcccatcgaggccctgttctttctgatgagtgcatttcagagggatggatagctttcaggtccttgagaaagacactcctgaattgtaggagatgtatatgcatctcacagggacacaggaaggattcaccattgtaagccctttttactaaagagtgtaagaaacaatggtcaggggcctacagtc

SEQ ID NO: 197183 - DNA, 364 bp, Homo sapiens
tcttctggaaattaatatccaaacaagcaagttattgtgaaataaagagaagtgggagatctccttacctgctctgattccaagatagactttaaaatatatttgagcaacccttgggtttcatgtcacacttcaaaaaatacgtctagagcataaatgctagaccactgctaaaataaaattagaaaaaaaaaagtgattactaatggtaagagagtactatcaggagcacagaaaaaggagaacatgctcttaatatttgtaattatgtatatgcacttcttctacggatacaaactttgaggttaattgaagacccagcaacaataatgagctgagagaagccagtgatgtagcaaatggt

SEQ ID NO: 197184 - DNA, 874 bp, Homo sapiens
gcctctgttttctaaactacttgcaagccctcaggcgatcacttgaggcacaagctcgacgaattgcgtaggggtctgtaattattcacaaacgacaccacgacttctagcacactgctcaatttatggaatgagagacagggagaagatgccagagtactggagttgcgcccggcttccctggagttgccaccaccttggttatttctagatgatagaccgtccctagctgtggagtcacaagtagttgaattaattagtcattgaaggtcgcagccaggtggaacccctgtaactctaaggtattattggttaaataaacaaataaacaaggaacaataattatagaaaatttaacgtcactaaccgccgattagcaatacggacattactcaccacccccttaaagtagtattttgtcatctgtccgcttaactatcagcccaactgtcagcccaataggatggatttcactcaagggtttatatgaaaattcgtttttattgttgttggtttttttattgtcttttttggtttagatttaagtgaaaatttatagctgttaggaacaaagaccacaagttgaagttttatgacatttctaaaaatacttagaaatctgtgttaatgttatcgttgagaaaggaaacgatttgcttcaatttactgggctggagaatggaagagagcagtgtttttaatattttgagcaagtatcagtccttaaatttttttattgcttccatgatgcattttgagaattttcaatttaaaacaaccattaggtgtatgtttttacaagtagagttttgaagaatgctagcaaaattggttgaggcatcacaagttattagaaataaagtggtaacctggt

SEQ ID NO: 197185 - DNA, 243 bp, Homo sapiens
tgctctcacattctagtgtggtagacagttgatgcagaattaaagaatatatgggaataagtgtattaaagagaaaaaacaagcagggtaaggggaaacaggtagtgtaatatgtatagggggtaggtgtacatggggggagtcaggaaaggtttcactgaggtgagactagaggacagcttaataatgtaaagaaacacgctatgcaacaattaggggaagagcattccaggaaagagggag

SEQ ID NO: 197186 - DNA, 208 bp, Homo sapiens
tgctagcagtgcaattagactgggggtctaatgagaaatcaaaatgggagcaagtcattataatatgatatgacaatatttgtaattgaatatccttggaagcataatggaaatggtgccagtgggactgaaggtaggaaagaaagcttcactgagaagtccagttgagctgagacttaagcagaagtgacagagataggtaagtgta

SEQ ID NO: 197187 - DNA, 256 bp, Homo sapiens
ggataatgagcccagttctaaactggaacctcccagttcaaaatataaaacctagtcctcatttagcttggtaaaaacatgtgcttcgattcttaaaaccaagtacaaagaggattttttaaatgtggcaattccatttttatgttataaatggcatcagttattctgctttacaaatgtgaatcctactttaagataaatcaaaagtccctatacatgattataaaaataccagcctttacccacacacatacaa

SEQ ID NO: 197188 - DNA, 422 bp, Homo sapiens
ataatccaagcactttgggaggctgaggtgggaggatttcttaagcccaggactttgagaccagtctgggcaacatggctagaccgtgtctctctctctctctttttaaatttctttttcttttttcttttttttttttttttcgagaaaggttcttgctctgtcactcaggctggagcgcagtagcacgatcatcgctcactgcagctttgacctcctggctcgaacagtcctcctacctcagtcctcctgagtagctggggctactggcatgcaccaccaagcctggctacttttgtattttttgtagagtggggtctagctatgttgcccaagctgttctgactcctggactcaaacgatatacccacctcagaatacaggcatgagccactatgcctggctgagaccctatctcttta

SEQ ID NO: 197189 - DNA, 452 bp, Homo sapiens
taggctaaatgataagattggttctaacataaaggttaaataacagtacttacaacaatataaaagttttgcttttctgtcacacagcactcagaatcagcagatcagggctgtccatgtgagggatccaggctctttttgtgtcgatactgtgttacttttgacatggggtgggtgcgtgcggctcttaacagaaagattcaagtttaatagatacagaagaattgatggaatcagaagaatcatcattttgcaacccccatggtaataactggttcagaaagtagtcatcagtggccaaaccataggtgaaaagttgtgctgtgtgcaaagtatccaacagattatttatttaaaatggaggaaaattcctttacaactaagatgtggctaatatctcagttataaaggtactttaatgggtccgactgacatgctttctaatggggtgc

SEQ ID NO: 197190 - DNA, 575 bp, Homo sapiens
cctgggtccagattatttatcatatattcctttaatttagccctacctccacctctccatccatgttccaagagcctataccttgccaaagagttcacttctctcctcatttctcggcctcttagcaacatttgacaagattgattttcctaccttttaaaacactttcttcttgatgcttttgagacaaaccatgaataacaatcacctcactctattttcctgctatctcacaggcctcaacactagtctcctttgctgattcctcctttgtatgatcactaaatactggcttgtttgagtgtccattctcagccatcctttcttctctatctatacattcttccaggtaatcgaatctgtctccatcccataatctctgttgagctccagacgcatgtcaccacctacctaatctctacttagatgtgtaccaggcatctcgatatctacacggctgaaaaagaaccactgactttctcccatgctctaaaatttcctcctccacaattctttcccatctaggcatcaaaactaatatttagtctcattttttccctctttcatcataagcc

SEQ ID NO: 197191 - DNA, 299 bp, Homo sapiens
attttccattcccaccaacagtgcccaaaggttctaatttctccccatcctcaccaacacttaattatttattaataatagccatcctgatgggtgtgactttggtgtcccatttcccccaatgaatggtgatgttgagcctcttaggtgcttatagccatttgtatatctttggagaaatgcctattcaaggcctttgctcatttttgacttcagtttggtttttttgttgttaggttgtaggaattatttgtataattctagtgcatattaggtcttaaagagtgggcaaattaaag

SEQ ID NO: 197192 - DNA, 210 bp, Homo sapiens
ctatttaaacaaaagtatgtatgtgggcaaattcataaagacagaaagaaggatgagatgttatcagatgctgggggaaggggaaatggggagctactgcctaatggttgtacagtttctgtctagtaacgaaaaagttttggaaatggtggttttggaaatggtggtgagggtcacaatgacactgtaaatgcagttaacaccactaaa

SEQ ID NO: 197193 - DNA, 751 bp, Homo sapiens
gtaggagcctccgagccaggtattcagtgacatctttctaaattgtttaaaatgagaagcattgcacactgagagtcaggatccaagtgtctttgactgagccaactcagctctgctattaacttatggtgtgatcgcaggctgtctagaaaaggacaccaacaatcacccatgaagattgcccttcaacctttgggaggaaatgatcgaaatgggagctagagaagattgttgttggaatctcagagattataagcaatttctccatggctggaattcagttgatctgggactgaacctatttctaatggagctgtgacgagagaccacagtaaatccaagcttggaaaatgagctgtgtcagccctcccaaagacaacctccttgcaacaggaagttgtcaaagccccagggaccagaaaccatgaagttatttggatgatagatacagagatacgctgctcagatgcccctttcaagaaagaacttgctgcctcttgctcagtttcttcctggagctttcaagcatctttgcagggaagtcacatccttcccagggcagcccgactgaccatgggagaagaagtttaacagagatgaggcatcctggaatatccaggtggcaacatggagtagagatgatgactacttctaggccatgaaaaaccagcaggatccatgatggctgagaaatgacaatattggtgaattaagtacatctcagggagaagctttattaaattagcctaat

SEQ ID NO: 197194 - DNA, 500 bp, Homo sapiens
aaaacacaagactcctggattagagccaaaggacttcattatgcatgtgttgggtccctaacccacccagtcgcacggggacaatgcagggcccatggtgaatgcctgcacatgcagtggattgcatcataagagaagaacacaaagcttgggggattcaccatttttatagtgagcagtaataggcatgctcattgtgcagagagaggcaaaacctcgcctctccaggctactcactgcaaatgcaactcagaaaaatgggatgggtaaagagcaatcaaaccttgcattcttggcatagccagcaagtagatgtagggaaactcaggacccatggaagactgcctctcccaatgatacatttcataaaggactagtattcagaataaagaactcctataactcaatagtaataagacaaattaataaacagattaaaaacttcataacagaagatatgtgaatggccaataatcacatgaggacatgttcaagatcac

SEQ ID NO: 197195 - DNA, 286 bp, Homo sapiens
tagtttatatttgaggaacatggagaggacaaagcagcttaaactaaaggtcacataaggtggtggtaagtcttaggaattgagaaataacatgtcaccaagcttcgggagacctaggaaccaggctacagtgcgtgcttttagttccagctccgattcctactgttcctcactcactaaagcaatgcttgtggaacttgggattcctcatctgtaaaacaggcataattctacctcctttacgtgtttgtgtgtgaaataacttttaactttaaattggaataca

SEQ ID NO: 197196 - DNA, 278 bp, Homo sapiens
agtgagcaggccaacaagaaactccctgaaggctgatgaagaacaatgatcaaagtatacacagccaagcttcagggcagccttggggatgcagactgggtcatgaatgatagctgtggctgtcacggggaagggggccactccaaggtggagcagctctggcgctaatgaaaacctgatgcagacaaggtaattttgggaagcctaagagttttagcattagtcttttggccccatgactacctgatttccctaaattcacccaggaaagatcgaga

SEQ ID NO: 197197 - DNA, 575 bp, Homo sapiens
gcatgacctctgctaaaaaaagtaggatgaatcctaaggaagttaatagctgaaggctgcagctactagattccagagagtggcctggggcacaagatactcaaccagagcagacagtgtcagcctctgtcatggaaagcacagagcttcctatcctacatgattgtctattgtaatgccaaattacaagcaatggagtctcactgtgttgcccaggctggagtgctgtggcatgatctcagctcactgccatctctgcctcttgagttcaagcgattctcctgcctcagcttcccaagtagctgggattacaggcgcacgccaccacgccccgctagtttttgtattttcagtagagacggggtttcaccatgttggccagactggtctgtaactccagacttcaggtgatctgcccaccttggcctcccaaagtgctgggattacaggcctgagccaccatgcccagccaatttccatatattttttatactgggatttcagagagtaatttcctcttcatgtgtaaccagttatgtgaattaaaacagattcagccttcttttacggttgtg

SEQ ID NO: 197198 - DNA, 330 bp, Homo sapiens
aaagcagagcaggctgttttcattccattttacaaataaggaaatgaagactctgagaggttactgacttaattgagaatcacacaattagaagcggtggggttgagatttctaagctagtgttctttgaactgtatttatactataatgaataggctataatgaagtttacagtcccctaaagtatgtccagtggagcagttctcaagaaggctctggcggggagccaggagaataggcagatcaatgagaatatgaatataggtgaagaaaccgagaattttccactaatctgagtctaagttgattctagaaaggcaatggttaatc

SEQ ID NO: 197199 - DNA, 894 bp, Homo sapiens
aaatccaagtgaaaaatatacggaggtgtccctcacatccaaataacagtaaagcaacttgcctaaggaagaaagtgtactaaaaattggaaccatgtatggactctttctcaggttgttgcctctgaacctatcaaaagtgatgtgcataggggagatgaaggtgtgacagaggctgcaaccaggtgggtgaaggagagaacaggcaattctcagaaaaggagtgctgggtagttaatccagtaggtgtctactacactatcctcaaaccctttagttaagaggaactcttcagagactggcaattgcctctttaaatagctttggatgtttgaaagtacaattgaaatgctttcgagtagtttctaattattgtgcacattatcccatcttaaggtgattcagaaaaatttaaactccctctctatgactgttcttcagataagtaaaaatagattttttgtatgactcttttccttatccaagctaaatatgcttgtttcttttaactgtttctcatatgacctgtctttaagtctctaaacctgtctctttttttacattttccacttaaagttttctagtttgccaaaaactgaaggcactacttcaaacatctctgaaaaagagggggacgggatgggcgtggtggctcacgcctgtaatcccagcactttgggaggccgagatgtgcagatcacctgagcccaggagtttgagaccagggtggccaacatggtgaaacccagtccctactaaaaatacaaaaattagctgggcatggtggtgggcgcctgtaatcccagctacctcgggaggctgtggcaggagaatcgcttggacccggcaggctgaggttacagtgagccaagattgtgccactgctctccagcc

SEQ ID NO: 197200 - DNA, 278 bp, Homo sapiens
tagcaatgtcaggactaaatgtggttttgtacttcctactaaacatgagcttaataaatgtttgtggaataaacagatgaatctgatgaatagttcctggactctcggagtttaaactctgggaacagggcagggactcctgaggaaagcagacaactcctcaaccttctcatgggagggaaggagaccttctttcctgaacaccaattatgcttcccaggtggcatggggtccttaggccacaatgccaaacacttttgcagttaaacttccgatga

SEQ ID NO: 197201 - DNA, 569 bp, Homo sapiens
aggacactgaggcccccaaagaaggagaaacttcatctaggtcaggcttggtagagtgggaggaacacggggctgggggtcgggaggcctgggctcacatccctgctctgccaccaggtctcggacagccttgggcaagtcctttcttccccatgggttgggccagccatggtttcaggctgaggcctgagctccaggggtacctggctggatatgggacagagcagggaaggatgcaaaccttcagaggcctggagcttgtcttggcggtaattctaaaacatgtgaataatgtgtataaagaaaatgtgggtggattatgaagtctatgcaaaatttccttgaagtctaaaaaggaagcttagacttgcaggaaattttgacctgtgcaacatgcccccagacttcccctgctgccagcttctagggatggtttacatggaaagtttgaggagcactggaatactggcttcctaagattctttgggattctcagacctgtttctgtcttccatggcagaatgtgatatcctttagacttagaataagaccaacctgtaatcccagca

SEQ ID NO: 197202 - DNA, 238 bp, Homo sapiens
ccccttggcagagctccccttggcagagctccccttggcagagctccccttggcagagctccccttgcagagctccccttgcagagctccccttgttttcgatgatttcaaggtaatgtttcttccagggaaacttcttctagtagcaacccactcagttaccctgcaagttaggccccaatattccttgtggaagctcaggtgggaaacaggcatcactgacactggctctgccaca

SEQ ID NO: 197203 - DNA, 489 bp, Homo sapiens
cttatcttcactggcaccagatatagctggaaatcagtaacagacagtatccctagaagccatggaaagaaaaaaattccaaaagctaaggtatacatgtgggcattcatttttcatttgtttgataaacctaaagttgatgtataattactaaagattcatatagtctggagtttacctcttcattttgtatgtttatatcctgggaatgtctaagtcagattattatttactcagaatattacttatggtaagcaatgatgatataagtccttcctcactccctctaaaaatctttgacttcagtgctagcttgcactttaaacatgtattccaatattaagaaacaatcacttgttacaaaagagtagaagtacatgcaagattttatccaaaatccaaatgcataagacataccagcactgatcatgttttgtctaatttctccattcttctttcttttgtggtctattcactaattacttgatg

SEQ ID NO: 197204 - DNA, 325 bp, Homo sapiens
tcattacagtcaagtaggggtgagtatgtagctgttgacagttggtatcagcccttgctgggggtggtggtagacaatgtcagggaagcctccttcagagatgttttatcttgagtgagtctggaaggatgagccacaactggccaggcagaaggcaggagaagggaaatggtgttctagttgaaggctcaaagatgtagaacacaacctggcaagttctagaaactcgaagctgctcaggctgcagcaagcacatcagaaggcagggctgagagaagacactggaggccaggccaggactaaagggaacggggagcctctgaag

SEQ ID NO: 197205 - DNA, 465 bp, Homo sapiens
cttcatcacatcctaataaagtattaatatgcatggtctttttgagatcaaaagacatgacagtcataaaaaaagttatcataattccagcttctaccattagtggtaatactgcaatattcaaatgtttcatatgttgtggcttcaaaagaacttaccctatagaggcagctacaccccctgctggaaatctttgatcataacaactttggcttctgtagtctcaatcaggaacatatgaaaagccaaataaagggccttaccactcatgacagaattgaccaatactttagcctgtctgatacaagacaggcttttggagaacaacctatgtcagaatatcaccttgattacagacaaaatacacaaagaggatggagaataatgatgtaaatagctaaatagccaaaacacttgtaagatatttgcttaatttccaactgtatttccactctttaccttatc

SEQ ID NO: 197206 - DNA, 380 bp, Homo sapiens
ttgtttctctcccttcttccccctattttctcttcataggacatgagacttcacaacctggtaaaaatgaactttcctaataactcaggacctacccgcctgggaattgatcatcctagccatgagagatcagacaaaacctgagaccagagactcattttcacctaaaacacttgctccaaaagatttttttaagtggggaaatgtggaaggagaatataactttggggccccaaaattactaagtcaaagggaaaagtcaagccgggaacttcttaggtaaaacctgcctcccattgtattcaaagtcacccctctgctcactgagataaatacatttatctgattccctcatttggagaggctaatcagaaactcaa

SEQ ID NO: 197207 - DNA, 429 bp, Homo sapiens
ataattggtaatgcgaaaacaatgcaataacaaaaaaataaaagcttgcttgagctaaattgatggcaataaacaacctgtattattattttgctaggtaatttctttgcccatttttcttccttatgtagaaatatggccggcatgttggctcacgcctgtaatcccagcactttgggaggctgaggcaggtggatcattaggtcaggagattgagaccatccctggccaacatgttgaaaccccatctctactaaaatacaaaaaatttgccaggtgtggtggcacacacctgtagtcccagctactctggaggctgaggcagatgaatcgcctgaacccaggaggcagaggttgcagtgagccaagatcgcaccactgcactccaacctggtgacagagcaagactccgtctcaaaaatataaaat

SEQ ID NO: 197208 - DNA, 212 bp, Homo sapiens
aagagagaacagctgcgagaggccactggggagctggaaagcgtgtgtcgccaaatacccaaaaagtgacaagggagaagtggtttctaatcggcatagtgagaaataggcctcgattaaaaacaataattccagaactaataaagggatataatgtgaacaaggaaaagaacacaaggcttagggtcagaaaagcccagatgtgaatcctg

SEQ ID NO: 197209 - DNA, 535 bp, Homo sapiens
gctttttgagcaggaagtgtaacttgcctaaggccatcaggtcagtctggtggctgtgtaagcagcagtgagtgtgactctgaagacatatcatgtatcagttcactgattgcttttcctgccagatatttaagagcattctgttgatgtgtaaaagccacccagtaaatagttgaataggtatgtgctgttaatgtaccctctctccttcattttcctcactgaaacaaaatgtacggaccaggtgactctgaggcttctttcagttataagatactatgtaagtttttttttttctcctcacagaatttactgtttggaaattggtagtttatgatttgaataagtgaattttcacttccttacatgaagatctatggtcacatttaaagacagtaatatttgattgattagctttggtccagtttctgcctattaatgtattattctacatccaaagccatgctggagaaggactaattcaagatggagcagaggccttgactctacttcttggtggacatgccacccttgt

SEQ ID NO: 197210 - DNA, 183 bp, Homo sapiens
tgtaaggggagcccgagtaccacgtcttacgtagttgatgacatacaagtagaatttcactgaaaatatgaaggaatttcttttttcttcactcaaaactagttattaagaagaaacacaaatgagcagcaacgtctgtctggctttgtggaggggaccacctggcgcaagcagcaccctccc

SEQ ID NO: 197211 - DNA, 563 bp, Homo sapiens
ccagccccagatctattccttattggttgagtatgacctcagtcaaaagattaaccctctgaacctcagtttcctcatctgtgaaacgggaaaaattacatatacctgacaggttaaccataaaaattaaatgaaatcatgagagaaagagctattacttatattgtgtccccactttgtacccaatgctttatacttattaacaaacttaaggacttcatacacaacatctagcctcatgtagtacctgaaatagcaaaggtgcatcaataaatgttagttatttcttttcttaaaacaaaccagtttgagtggataaacaaactgtggtatatccacacactgaaatactactcagcaacagaaaggaataaactactgatacccccagcatggtacattttgaaatcatgctaaatggagaaagccacacgcaaaaggccacatactgtatgatttcaaatatattaaattctagaaaatgcaaacttatacataatgaccaaaagcagatcagtggttacttgaggacatatatagagggagggagtgattaaaaggag

SEQ ID NO: 197212 - DNA, 225 bp, Homo sapiens
attgggcaagattccacgtttggcagcaggcccgtgagcggcgacagacgcgtatgggcctgtggcaacctcggttcctgcctcctgagaagaaagacatcgagtggcacacggtagagtgagagaccgaggcacgcattagagcaggggcgaaagttcctgaaatggtatcgtggcaggagccaaaggaagtcaaggaggcttggaagaggcccaggtgggcgg

SEQ ID NO: 197213 - DNA, 286 bp, Homo sapiens
atttgccatttgtagttacgctcacatgacagattatcttataaatgtgtatgtttctccttccctttcatgctttcaggactacatcccctctattatattctccctaaatgggacttcacattctaaactgtcaaaaatcctatatgaatcttaaaatagttctgatcacaatatgatgctagtcaataaatatccttttcctcttcgcataggtgaaggtgggagctcccgcacgatagaaaacattgcttacaaagaagattatgtcatatataggaagaaa

SEQ ID NO: 197214 - DNA, 499 bp, Homo sapiens
cttctgttttctgatccaaggtgtctgtggttaggcccgggatctccatcttcacctaaacctcacgtgcttcacacagaagtggtctgggaaccacacctgagaaacatcaaactagaatatcatgaaaacaagtatgttcttgaatattagagctgtgattagatttacagtagccctttttgcttcaaactatgttcccataaatatagaatccctttagttttatatgttgtaaacataaattttaccagttaaactagtctacagaaagttggatatacaaaatgagatcacactacactgtgcttaatttttaaaatttacttttttcaattaacacataatgaattatatgtcaataaatatatttgtaacattttaagttggatatacacatatatatgtaattaagtcttgaacacaggcagcttagttgaacacaacttggttcacaagctccaataaagagtttaacttgtgcccattcaaggtgaca

SEQ ID NO: 197215 - DNA, 501 bp, Homo sapiens
cagcaagtcaacttctgtacgtgcctatagtcagtcctagttcctcaggaggctaagatgggaagatcacttgagcccaggagttcaagactgaagtgagctatgatggcaccactaccctcctgcctgggcaaaagagcaagaccctgtatctaaaaaaagaaagaactgtaagaggtactaggaatgttctctatcttgttctttgtgatggttacatgaacatacacatctgtaaaaattcaacaggcttacacttcatatttatgcactttgctgcattaattatacctcaaacagttttaaaaaaagaaaaatggctaagcatggtagctcacacctgtaatgccagtactttgggaggccgaggtgtgaggatcactttagcccgggagttcaagaccagcctaggcaacatggagaaaccctgtcactacaaaaattagctggccatggtggtgtatgccagtagtctcccagctgcttagttgggggggtggg

SEQ ID NO: 197216 - DNA, 358 bp, Homo sapiens
gaggcatattgatttggggagcacagacaagtcaaggttgatgtgcatccgctgaacatgatcttaagttgttgaagtaggtattattaatgaacgaacgtctattttagctccaagagcccctggtcttccagaagagactcccaatgatcttccagaagcagctgggcttcttttggtcctcccccacccaggtgcagtcccgttctccctgcctgggtgagtttgattcctctgccgtggaataggctaggctgctacctcttgagcctcttccaccaggccatccattaggtggcgacagagagcactaaaaggaactactatggaaataaaacttgttttgcttcttgggggg

SEQ ID NO: 197217 - DNA, 391 bp, Homo sapiens
agaatgaaaaagaggactttttcattcattcatgtaggcaggggaaaatcattggtgaaggctgaggacggtgcctacactcacagaaaatcagagatagtactcattttcataagacagactgaaaaattcataattcatgggtcactggatggaatactcataaatgttgttcctcagtagtgagaaattattagtcttacagggagtactgctgtggatctctctaacaaatggtgatggccagacctaaaaggggcaaactatttccacataatttaatcatatcccaaaacaaagcttaataagatttacaggaatacaaaactatctggcacccagctggatataattcataatgtctggctccaaccatagattaccagacatg

SEQ ID NO: 197218 - DNA, 379 bp, Homo sapiens
tgcatttgcggagtttcttataacaactgtattagcctcttttttggaatatttaatagactgaagaaattgtgtcataaaaatttataaaaatttgaaaagcaggtaaataattgggaggaataaaagttttatttgcttgtagtgatctcaaaatcagtgttgttttccaactatacaaaaccgtacagctctgcatgaaagcttaatcattgatgtccttaaagccagtaacatattaccgtgtgtaagtattaaacctaaaaaggcattggttaatgcagtctcttagtgccagattcataagcatggaaaacaacagatacgttttgtttacagctggtttccttaaacaaaataaacattcgaattgttgaca

SEQ ID NO: 197219 - DNA, 313 bp, Homo sapiens
tattaccccaggacatggccatgagaaactcttgtctcttctgtaaaccagaagaaattatgagaatgttcacattcttggttttaaggactccaggaggacgattaaggaccctgaagccagatcttagtgatttgcaacggaaatgttgttaaagacccaacagaatgaatagcaaaggatctagggaaactcaagaggaatcttcatagatttgctagaaacatgaacatcaagtagcacgtggaacctctaataaaatgtatatttatatgtccatgaatgaggtgcacctctgcttaacaggtggcat

SEQ ID NO: 197220 - DNA, 736 bp, Homo sapiens
cacagtcaagtgctctttcactatataaactaaccctttgtaccccaaaggccaaagatattagggagctcaaatgcaaaagacaacagagctccaacctgagaggaacttacttatgactcctggagctccatgagaaagacagaggaaccccttcacccccgcccctccaaaagggactacagcatttttcctatgtttctcagaaggtctcagggttttcagcagtctccttcagtttcctttgtggtcaccagatttgccaaaggacaaaattacacgtttagtttgaagatctcgactagctttattgcaattctaggattgggcaatgtctcattccataaaatagaataagtgtcccaaagagttgagcagaggggattcattttatagacagagggggttgaagaaaccagaagcaaagaacaaaatgtggactcgtcctttgaaagttacctcccttacaaggtgagaacaaggaaacagaacaatagagaaataacagatttgttagcatcaggttacgtcgggttacttttgttgtaaggattaaaacagagggaacttcgttatcctgctcattaaagacggaaactggtctgcttggaacattggctgttactgctctgtcctgattttggggaagatgaaataacaacttattttcagtttggtgatatggaactttggcatgggtgactccattttgatttttagtctggtctgttggggc

SEQ ID NO: 197221 - DNA, 482 bp, Homo sapiens
ctgtttcatggcatgggggaggggaaggagagcagcaggaagaatagctgcggatgctgggcttagtacctgggtgatgagatgatctgtgcagtaaagcacaatggcacacgtttatctatgtaagagacctgcatatcctgcacatggacccctaaacttaaaataaaagttgaaaaaaaagcttatcacatatggaccactgaacttaaaataaaacttgaaaaaacatgagtatgaggtggattccctaggttagacccaaactgaggatcctgaagctcctgctgggggatttggggctgggggcaccctggggagctgctgccaaggccatccaccgtccatacaggccgcctcccttcccggcctgtgatggaaaggagaaggggtatgtgaacagctgtggaagtcagactctcgggaactgaatcaggccccagcccatgccccccagcccagtccagccaacgtgcccgctg

SEQ ID NO: 197222 - DNA, 797 bp, Homo sapiens
caacacgaacaaagaggaaggcatgctttcaagagaaatgactacagccagagcaacgggatttgattatcgagtagatgaggaggaggaaaggggaggccatgacttgcatgtaatcagacctcactgaagaaagtggagagaacagaaagatgaaaacggaatgcaagttatatgcaatcatacactgatgactttctgaccctggcagtgccaagcgcagacaaccagtcttgtatgattttagcaatcaccatgcccttcatgtctcctatgttgtggtaatggaaaatcttacttggataagatgtaatatgagcaagatgtgtatttagtttgagcccggcaggcgtctccagtggagcacaggcataacacaccagggcctaggagcctgagccccttttccagtaatttgttcactacatgtaggtcggtatcattactccgggccctctgcattctgactgcagccatgaggtctgattaccgtcagcaagaagacgctgacacactcaggtttccagagacacttggaggctgctaattgcaccctgagcctcatgactgcatttatgagcgcagaaaagctgcaggcactacttggcttttttaattattttctattaaatttaggcagactgggtacagtggaaaactacaggatgcttgttccacatcactaccaaccatgtcaactgcacagacacaaaaggcaaacaggtgaatacagatcaacaagttggtcagttctttgctaatagagctgagccactgtcacttgtcatggatgctga

SEQ ID NO: 197223 - DNA, 452 bp, Homo sapiens
ttgctagatgcttactatgtgcttacaagcccctgccctcatagaacttactctcaagtggagtagatggccttaaaaatgcaggtaagcatttggtgacgaggaaggacttgagtggcagcagtgaggctgagccaaagaagcatgctctgtaagacaagctcagcgcgccaccgtcctccagcacagcgccgcatgtgtgtgggagagagacagtgtgacttgagagcacgggcgccccctgcagtgctgccaaggtgagggactggccacctcatcctcctccactgacaaggttgtgggatctccaggcctgtgaaccccaaggagaaccccctacttgggagctgcccattctggactcaagcaccaaccacagtcatgggctctgaatgcctgtgggtcttcagggccaaattggagacgctgccgctgccaagttgagacctgaa

SEQ ID NO: 197224 - DNA, 525 bp, Homo sapiens
gtcaatagggcatttgtttgtatttccacattggcttcatgaacgaaaatacctcctccacctagaaaaacaatcagtaacattcagacacggaacttggagggcaaactttttagtgcatgctggggcacttttatgtagtgtttttaaaaaataatgtaaaaagtatttttaataaagttttctcctatgagtatttccctcaagtttccacgtacgcctggtttggtctttcgatacctttcagaaataccgatttttaaaaaatgttctccgttaaaattggagccagaaagaaccttcttcctacagatctgaacgttttactctgtttagggtggaaaaacacacacacactcattttccttcactcactttaacttttctgctctgcacgcactaggttctggtagagttaaaagttttctgaggttagttcctgtggttaaggaaaaaaaaaatacaccaaacaactacatgcttaaatttagactccgtaaaacaatactgggaaactttcaaagc

SEQ ID NO: 197225 - DNA, 524 bp, Homo sapiens
caggcagataatgtttttattctttgcttgaactattctagtgacaagagcgcattcctaagagaatgtttgtctccacattgtatttctttgtttcagggtctgaagattaccagataaatttttgttctgttctcttttttgttctttttttggatatagggaggaaggcgataggcaggggagaggaaatcgacctggtcccagacacaagtgagatgttatcctaaaagtgcatcagtgtcaatgtcacctgtgccctcttcccttcccttcctctccaccctgaagagaatagaatagatgggatgggaatagggatgggagactttgtttgcactcaagaccctccagcctggctcagttgtgctaaaaagaggaaatggtggacaataattctataaatgtcctcagtaagtaattatctcccctttatattccccttggctgtttggcacccttcttaggcttatcaggttgtattacatattgttgctgactaagatgctagaaccagtacccaa

SEQ ID NO: 197226 - DNA, 478 bp, Homo sapiens
attacctcttgtgaatataatacatattttcctatagtataaatgttgattctaggttttattctggacctgattttcatctaattcagtttcttttatgcagagattaactggttttatccttattcccctgtggcaaagactcctaaatggtcaacaaactaattttctcttcttcttagacacattgttagtctacatttgttaattccccctgtagttaaatgtagcaaataggacgtgagaaaaaagaatgtgcatctcctccagccaggtcaatgaaaattactcatgtttgtcctccatattcttttctgatagctagataactatgcctagtgtggctcaggaagccacacataagatggcaaaccttccatatgctgggataccttaacaaccctgtggagcagaactccctaccacgaagactgaccttgaacttccttggactattaacaccaggaaagaagcttcc

SEQ ID NO: 197227 - DNA, 377 bp, Homo sapiens
cacagtacgccacacgtgatttctgctctccagccctccagctccttagaatgtgggacagagaccatcggctcagggggtgggggatgaagagatgaagactgagcggttgtggccgcgttgccgacctcaagcagtagttggcttctccacgtagaacccgggagtaggagactcagaattgaatctcttctccctgcccgctcctgtgagacttttttgatcttcagctacattttcagctttgtgagaaatcttatcatcaaacacaacggccagcaatgttaccaacaagagagatcctcgctccatgaacgcgtgttcgttgggaatctcaacactcttgtggtcaagaaatctgatgtggaggcaatctt

SEQ ID NO: 197228 - DNA, 736 bp, Homo sapiens
aaaaaaattgaggaattgatagatgccttctgaatgactgagaatatggcacagggtaaatattatgcagttaaaattaaatataaaaaatatacgtttattcatacacacagatatgtatgtgtgtgtgtgcacatacgtgttcagccattgtctgtgaagaaacataaagagggtggcctgcccctcctcttgggagttatgtcccaaggagacctgaagcctctgtcagcctgagaacacaagttgtggtagtcagagaccccagttgggaggctccacatagtgatgaggaatgagattggggtcccgcttaaaaaagcagtctggccacattttgtggggtcattgtgctgttctagggtaccgcttccaccacctggtcggcttcgcctctccaaagccccaaggctggagctgctaagtcactcaaacagcaaatatggtggctcgctccttcctctgggagtttcatctcagggagttttcaaatctctgtaggtcacagaacatccacaggagtggctaaaggccctgactgggaagctaaatgatgaaaacacatggacacatagacagtaacaacacacaatgagaccttttggagggttgagggtggagggtggaaagaaggagaggatcaggaaaaataactaatgggtactaggcttaatacctgggtgatgaaataatctgtacagcaaacccccatgacacaagtatacctatgtaacaa

SEQ ID NO: 197229 - DNA, 425 bp, Homo sapiens
tggggctattgacagaattcaagggatttggttgtgatttttcccagcactctttcctgcccttagactttcagagtgctgtccttctgtccctgggtctgaaatgtttatgtcaggtggctttttcctccttctggactccagtgatagagcagtatgtagagtagcaagccaccgtggctactcactgctagttaacgttgatccagaaaaggagtcatactctaggatgcttttgagactctaacacaaagcagccaaagcaccaagaataaacccaagaacagcatggtaaagaattaccatttaccagctgggcacggtggctcacgcctgtaatcccagcactttgggaggccgaggtgggcggatcatgagatcaggaggtggggactatgctggccaacatggcaaaaccccgtctc

SEQ ID NO: 197230 - DNA, 335 bp, Homo sapiens
aattaaaaaaataataactagctgggcatggtggtgcacatctgtggtctcaggtactcaggaggctgaggtggaaagatcacttgagcttaggcagctgaggctgcagtgagctatgatcatgccactgcactccccgctgggagacagagtgagactctatcttggaaaaatttaatttaatttaatttaatttaatttaaaaaatttaatttaaaaattttaattttaaaaatttaattaaattaaaaaatttaatttaaaaattttaattataaaattttaattaaatttaaaaatttaatttaaaaaattaatttaatttaatttaaaaa

SEQ ID NO: 197231 - DNA, 553 bp, Homo sapiens
agtctgttgccaagtctagtctgctttagctgccaagtatctctggagccctacatctcccacccaccactccagcccaacttgatacggacctctgcagccactgaccagccggcctctgactgccctccccctgctcctggctgttctgaccccagtccagccactcttccctttaaacctccttgagccctggcccatgtcaagtccgtgtgtcagccctgtccagcaagatgcccgcccacccatgaaaccccaggtgaggactcgctgagtgtgcaaatgaatcctcaaaaagagcagcccatccccaggccctctgccctttcccacaggctgtccctagatgtgtggccatggccacgtccacctgtggattccatgctggggccacagattttagggtgtcactgtgtctcctgctctccaacatggaggttccccattactgttagtggaagaacacaactccaggcccttcatttttctgtttgtatgccaatcctgataagatctttgcaggcctgcagaaaacaaatccacacactggtgg

SEQ ID NO: 197232 - DNA, 548 bp, Homo sapiens
taggttcttaggatcatggaaacgtaaatttggaaagagctttggtggtggtgggggctggagtgggggtcatctgaagaaatcttctagccattcttctagcaagaatctttccttaggacataacaatcattccatattccatgcctgacttaccacttccaggtatgaaaggtgggctcattacttctgaaagctgcttcatttctccaattaggaggaactatctttctaatattgagctctaaactgtctccctgcggcttctactcatttgtcctcatttctctctatgaaataactcaaaacaagtcaactttttctttcactcagaaccgttcaaggatcctagcatctagtaggaccctttgctccatcctaggcttcttttttctaggaacatgaggcccagcctgtccacttgttcttcccggaatgtacactctcgtttatgtttttttgaccttcactccctttttcatcatgtgcattgcctcctcaacatcttaatcactctaaaagcatggtgtccactgcattccactttg

SEQ ID NO: 197233 - DNA, 420 bp, Homo sapiens
ggagctactaatctaatagtgaaattcaagatgtaattggcccatgttctggcagccagggtcaccaatggattctgttctgcctcctccacacacatagcttgatggattagttgagccagaaccagctctgcagatctgctcatttcatttatcctgtctccttgattttctccatgtagcctgatagaggttaggatcctgtgattttaatgagcaaggaattggtggctctttgaggccagaaatctaaacctcaacctcattctcagcctatggattaccttccatgtgaaagagagtattgtcataaacactgagtatacagtggtgaccaaagcagactcagtttctgttttcagggaacagtctggtagaaaacagtaagcaactaagcaaatcatgtaggaaaaggcaagg

SEQ ID NO: 197234 - DNA, 564 bp, Homo sapiens
cccagttccttctctaaattcctaattctccactatgctttaaaacaaaccttctactccactcacagtatatcctttctgctcaaatactccaagttgaggctcttgctcttaatttacagtgctaccaccatatttgtcacctttctgcaattatactggacaagatctgccccattctctcaagaccttgagagcttgtctggaggttctagcaggtaagcacagctactcatatacccttgaccgaagactggtcctcctctatcgaggatggtcgttctctttgactgagcacacagcattgggagggacgcacatggagtggtgagggaggaaggggacaaccacctagccagccagatcagcgaaatcaaccctggtgatcaatggggtgacagatatcacagccagatcaccctcacattcgccattctctcaagaaacagctgaagtactatctccttcatgaaactttgtctgcaactgtctatatccttttctctatttgccatggaaatataccacaaaccacatatgaaatttagaatttttaaagcctca

SEQ ID NO: 197235 - DNA, 680 bp, Homo sapiens
ggacctgtcagtgattgcagttgttatttaaatgaaatcacttctttagtcatctgtctagcaccttaaaactttattgtggtctgagtaattcagttggagatttgttacaatgtacctgatgcagattttagaaagaaaagaagaactgcatttcgtctggttccagtacctttccagtgggaactgccaatatatcgtcagtctttttctccctactatccatgagggaaatctcttctaacaaactcctcttcatatttcttaccctctccattcccctctcctccaatgcactgtctcagaagtcaatgggatgatctataaggaacacatgctcagctcccagcagtaacgccgtatataactcttgttcccttcaaactggaagcagtctctctcttctgaggtccagtagtccttggagtctccctgcaccagtggttttaaaaatgtgatccctggaccagcagcgtcagcctcccctagggcctcattgggaatgcagattctcaggacccacgacagacctacagaatcagagactctggggtagggctcagcgacctatgtgtcaacaagccctcccgatgatgctggcgcacttgatagtttgagacactgtcatcatcataccactttgtattggttacttatatgtggttgaagaactctcaaaa

SEQ ID NO: 197236 - DNA, 431 bp, Homo sapiens
taatccgtataatgccaacaagtaatttgttgtgagtaaatatataattttgtatcttccattaattttcctgccccgccaatttttcatacaatagtagaattactttcatgatgccgttgtctttttctcagtgagaaagatttgtaattatttacctgctaacaaactcattctttcactcattcattaatttttcaccatttaagaagggcctattatatgccaataactcaataatacaaatatactgagagatttttatgattttcctatttttgttatgcattgcttttttattggcattgtttatccaataatgatatgataattatgataaaatgtattttgtcatctattaagcttgcttttttttgtggtagaattagtgcaagtcactcaatatttccagttatttcatgcccccttaa

SEQ ID NO: 197237 - DNA, 385 bp, Homo sapiens
cagccaaccaggacacataccctcctcccaggaccaacttcaatctgagggtagggcaatgtgcagacagggaaggatgtcaaacatggtaattttaatgatgtaatttatctcaaaagaatgattatggtggtataattaacacttcatatgcagacatttccatctccaaggagctctgagagccttaaggatgattatttaaatatatatcacatccattgctggagacaaggtctattgttttaaaagataattaaaattccttcccctttggaattaagaagatttcctataggatgaatattttgcccaccagacacatgaatagatctaaatctgggaattcctgacacagggctggaaaagatcttgaagagcaatc

SEQ ID NO: 197238 - DNA, 283 bp, Homo sapiens
ctgcccacttcagcctcccaaagtgctgggattacaggcatgagccaccatgcctggcctgaagacatttttttttttttaccttgtttagtggtcaagcgttaaccaccatgttcttcagaagagaattctgctgtaacatgtttttataagttactctgtactattcttcatgcaattgctttctttatatttgttaatattaaatcactgtatattgacttgtgactggtaattttaaattcagcttgtgactataataatacagtaaagatgaagaatg

SEQ ID NO: 197239 - DNA, 492 bp, Homo sapiens
ttctgctatctttctgcctttttggagggttttaggtatagcttaaattcctagctggtcttctgatatctaggtgtaggtggtttggaaactttttaagagtttaattgacagagatatttcccctattatgagggaaattttttacttataaaagttttctaatgcctagaagctgcttggatacaaagaagcaagatacaagaataacttcaattgtagcatagcataagaactttattaacagatatacggtattgtagaatattaaagaagtttattataaaaatctaccagtagacagtactgtttttggagagaaaacatcaccaaaagtagttacagaactcttctgaatacatataaattttcagaacttctacatgtcagttgccataaacaaaattgagactacttggaaggctgagacagatcacttgagcccaggagttcaagtccaacctgggcaacatagtgagatcctgtctcttt

SEQ ID NO: 197240 - DNA, 256 bp, Homo sapiens
gcaggtggttagaaaggagcgacctcggttggttggtttcttcttcttcccttcctttcttaggggaaggctagagagcaaagaaacgacaaaaaaaaacaggccggaagaaggaaagcgaaaagcatgagggctggacaatcagcccttaaataaacgaaaactgtatccaaatcagattaagttgagagacagcgaactgctaaacacctccccataactctaacgtacctgaaaccgcgagtagagaaacccg

SEQ ID NO: 197241 - DNA, 308 bp, Homo sapiens
gagtgggggagaaaggagacaagtatctgatgggtgggaatggaaggtgtgtatcctgcagcagacctccagagtagctgactgactgatatgcatggtagtcctaagatgtgtttaaagaaaatatttagagctcttgacaaatcttgaaatcaatacaaaaattagccaggcgtggtggcgtgtgcctgcagtcccagctactcagggggctgatgcagagaatccctagaacctgagaggcagaggttgcagcgagatcgcaccactgcactccagtctgggcaacagagtgagactctgtctca

SEQ ID NO: 197242 - DNA, 693 bp, Homo sapiens
acttagaggatcccgactagtccaaccatacggaggattaatagctttttgataggcaggatgttgctgtgctcctccttccatctggaaagacatgactggaagattcaaaggtatatggcatattttggtgatttagagtttggaatgtaggctaccaaagctggtgggaaaagagtctgggaaaaattatataacagatataaagctttcgatgacttattaaggaggtgaagcttttttgtcaacattgaggagcttgaacatttagaacttggtactggatgtgtggctgagacatgggggcgctgaaagattgtgatgtggccttctagcttggagaataaagcactaagtggacagcagcgccactgacacaggtgcggaatatagaagatcaggttttggggtggaactctggtgggcagagatggttcaagtttcggacaatattgcgagtgacttgctattttattttgtgataccgagtattctggaagtctaggttagagttggagttgagctttgcttgtgtagaatcctgtactctttcctctggttttttcttgtattgttcttgttgttactggttgttattttcatctgctgctgaactctatacttgaattgtgtttcacgaatacttaagtcatgtggttgtggaaaaagaatgttgatagcatcttcagttat

SEQ ID NO: 197243 - DNA, 147 bp, Homo sapiens
cagtagctatggcagtggcagatgattttaattaggaaacaaagcttagcaggaaagggaaattaaggactaaaataagaaaacactactctcttcattcaagctattacccgagttcttacttaactggacaaatggtgataatat

SEQ ID NO: 197244 - DNA, 379 bp, Homo sapiens
tgcattcaggtggggttatgtgattagtctggccaatagccaagtgtcatgtgatgtttccaggccaaaacatttagttgctggattttgactcccctccttcttttcctgccacagcctctgagcgtggtacttctttcagatgatgtaactccaagatggcacagcctcagagagtctagacctctgaatgggtctagacctctatgcggacagagactcctatcagcccacaatggaactgcggcatgactgagcaagaaactcagtgtcagacagggggatttcagggttaatttgtaactgcagtaaacttgggctgttctaatataaccattacacttatagactaactgaagacagaattgctgtatttata

SEQ ID NO: 197245 - DNA, 267 bp, Homo sapiens
gactacagatgcacatcatggtgtccttatgccatttcttttgtacgtaggtgaatgcaagtgtatgattacatcatatgctattttggaggtttgactttcttttcactttcatcatctttccaaggtgttattttcctagtacatctttttaaatggacatagaacattcttttgtatgaacaaacaatagttttatttaggcggtcctttcctgttggacatttatattattttcagcatttctccacagttgttgcagcattc

SEQ ID NO: 197246 - DNA, 140 bp, Homo sapiens
cactgaccaacatctacaaggtgggctggtggaggaggctggtgggttgatgccatgctggaacgttgatttgttctctcacagccaagtctcagagcagcagtgccgggtgctgatgggaatagctctgcagggttaaa

SEQ ID NO: 197247 - DNA, 763 bp, Homo sapiens
ggggggtgggaagagcagtggctgggagttggacatagggtaaggaacaaggagagaagacagatacttcttcatggagttcagtttgaattgacagtgggatcggatatcatgacaacttttggctgtgtgtttacacaagcctaactaatgtaagctggaagactgagagcagagtttctcaatgtggctcaaagaccactgggggatccccccaccaccataccccaaagtcagttaggtgatctgcaggtgctttcgcagtttcagaggaaaaatcaatgcagtcattttattcttacgtattttattaattaaaaatcgtgtgaatcattattgttgtaggaatcctgttattaatcatctttaagattatatatatgccaaaaagagtgttaatcactttgtcttggctagtatttggtcagctgagtgcagttcacctcagctgatatatttttccattatctgccattcttattcacaaattttcattgattataggtattctacgccaattccaaaaaatagctcaatggctcagtgttgaagggcaaaagcagagatagaatgaatcgagtaaatattagaattcataaaaatattagaactatagtgactaggaccacagtacaggtatagaaatgtatatgttgtggatgagacaaatgattcctttgagtagaatgatttaacacaaacagccaaaaaaggaaaaaataattattactatatgaaattagattttattgaacaaggctgg

SEQ ID NO: 197248 - DNA, 623 bp, Homo sapiens
tcactcagtgaagtaaaacccacacaaatttacctttgggaaaggtgttgggcgataacatcactatgttatccccaacaccataccccaaagtcagttaggtgatctgcaggtgctttcgcagtttcagaggaaaaatcaatgcagtcattttattcttacgtattttattaattaaaaatcgtgtgaatcattattgttgtaggaatcctgttattaatcatctttaagattatatatatgccaaaaagagtgttaatcactttgtcttggctagtatttggtcagctgagtgcagttcacctcagctgatatatttttccattatctgccattcttattcacaaattttcattgattataggtattctacgccaattccaaaaaatagctcaatggctcagtgttgaagggcaaaagcagagatagaatgaatcgagtaaatattagaattcataaaaatattagaactatagtgactaggaccacagtacaggtatagaaatgtatatgttgtggatgagacaaatgattcctttgagtagaatgatttaacacaaacagccaaaaaaggaaaaaataattattactatatgaaattagattttattgaacaaggctgg

SEQ ID NO: 197249 - DNA, 288 bp, Homo sapiens
acgtcgaaaggtttctgagaagcctggagaaagatcaaacctaaaggtgaccctggaagtctggctgggaatagaagataaaaattcctttctttaatttccaaagttcactgattcacgagaaaagtagatatcttaaaaggacacggaaatgcaccaaaaaaaataaacacaacgatgcataactagctgttttaattcaacaccctctctcctgtgcctgacatggtatctctaccatatcctccaaaaagtaaggacaggcaaggactgaagtgtcctccttat

SEQ ID NO: 197250 - DNA, 1459 bp, Homo sapiens
caagaccagcctggccaacatggtgaaaccctgtctctactaaaaatacaaaaaattacccaggcatggtggcgggcgcctgtaatcccagctacttgggaggctgagacaggagaatggcttgaacccaggaggtggagattgcggtgagctgagatcgtgccattgcactccagcctgggcaacaagagcgaaacttcatctcaaaaaaaaaaaacaaagactaattctatagtacccatgaccctgcaaccagagaaactgcctgtagggaggccagagtccaaagcagccacctgtaacctgaaaatgaaacgcagacccaggcatctgtgggtcttcatcagcaggatgaccattctaaggctaaaagacaggcctttaaatctgatgctataattccatccaaatacacagttaggtttctaccatagggaaagctattctccactttttgaagtatctgtttcaaagataacttgctctctggttctcttttatctaaaagagagaatcaacatgctaatttaaaggttaacatcattttaattcaaaaattttagtctccattccatatttaatgatgaagacaaatctgctgggtgctgggagggaataaaaagtaatgcaccccattgatttcagagtatctgatcacttgggttatgcaagctgctacttacccgccattagcatgggtagttaagtgctgattaaacctaagtggactcagtgaaaaagatattgggaaaaataatatgatattgtggcctatgttgaatgatgttagcttgtgtttcagcctgggtgacagcacaaggaactccatctcaaacaaagacaaaaaaaagagggaaagaaagaaagagagaaacactaaaaggtggggatccacaaccttcagccgagggccagaaggggaacactgtggagaatataacacagggcctgtgccgaacacgagagcaaaccacgaccgaacccaagaggagagacgagagcaactacaaaacacacgaggcaagagtagaaccgtggacagaaccatagagaggaatataagacagcaaaaacttacaaaacgcatactaccccacaaggaacgggaaaactacaaaaaggtgataacaagtggaccaagaaaaacacagcacaaaaaaccacacaaggtacgtagcccccgtgaaaactatgaacgggacagcacacacacgaagaagtagtggaggaaaaaacagggtttggccaaaaagagggctatgtaagttacagcagaggagacgaaaagaaaaggctagacacgaagatagttagtgtaaaacaacccacaaggggatgattggaacgcacacaaggacgtggagggaagagaacgacataggggcaccagcaagtgggcagagaggacgcatcaaccggacgaactgaaaccggagagaacataaacggggaagtaaat

SEQ ID NO: 197251 - DNA, 1129 bp, Homo sapiens
caagaccagcctggccaacatggtgaaaccctgtctctactaaaaatacaaaaaattacccaggcatggtggcgggcgcctgtaatcccagctacttgggaggctgagacaggagaatggcttgaacccaggaggtggagattgcggtgagctgagatcgtgccattgcactccagcctgggcaacaagagcgaaacttcatctcaaaaaaaaaaaacaaagactaattctatagtacccatgaccctgcaaccagagaaactgcctgtagggaggccagagtccaaagcagccacctgtaacctgaaaatgaaacgcagacccaggcatctgtgggtcttcatcagcaggatgaccattctaaggctaaaagacaggcctttaaatctgatgctataattccatccaaatacacagttaggtttctaccatagggaaagctattctccactttttgaagtatctgtttcaaagataacttgctctctggttctcttttatctaaaagagagaatcaacatgctaatttaaaggttaacatcattttaattcaaaaattttagtctccattccatatttaatgatgaagacaaatctgctgggtgctgggagggaataaaaagtaatgcaccccattgatttcagagtatctgatcacttgggttatgcaagctgctacttacccgccattagcatgggtagttaagtgctgattaaacctaagtggactcagtgaaaaagatattgggaaaaataatatgatattgtggcctatgttgaatgatgttagcttgtgtttcagtaacagagttgggtaatactggacgtgtagatgaagctttagcagggctgggcacggtggctcatgcctgtaatcccagcactttgggaggctgaggcgggtggattacctgaggtcaggagttcaagaccagcctggccaacatggggaaaccctgtctctactaagaatacaaaaattagctgggtgtggtggcgtgtgcctgtaatcccagctactcaggaggctgagacaggagaatcgcttgaacccgggaggcgaaggttgcagtgagccaagatcgcgccactgcacttcagcctgggtgacagcacaagactccatctc

SEQ ID NO: 197252 - DNA, 492 bp, Homo sapiens
tgctaaacccttacctgataactctcattagagcaatatatgctggaagcagagggctcttgttatggactaagtgtttatgtcccccacaaagtgttgaaatcctaaccccagtgtaatggtattaggaggtagggcctttggaaagtaattagggcatgagggctctgccctcatggatgggattcatgctgttataaaagggaccccagagagttctcctgcccttttctcaccatgtgaggatagacagggaagtcagctgtctgcaatctggaagaaggccctcaccaaactcggctgtgttggtaccctgatcttagatttccagattccagaactgtgaggaataaatgtttgtcatttaaggcacccagcctgtgtaatctgtaatagcagttcagactaagacagccccatattactcactctccatctgagagtgagccgagcacatagcattcttggcatcagtagcacaagggtatgaag

SEQ ID NO: 197253 - DNA, 502 bp, Homo sapiens
gaaacccataatgcaaatacatgttcctccaaaggtctcaatgttcttatctcaaaatacacattttattgcttttgaaatacatgattatcatatccctttggcatgaatttgtatgaatccttagatttaagtatgtaaaatataataaaaacaaaagtgtgtgaataccccctactgcagagttatgcaagcctaatattcaaagcatgacatattaaatattataccttaaagacagaattagaacatgaacacatgtataatgtctttgcctcaacttcaaaaatgcacagttgttgagagcctggaagagacattcaggaacgggctgcaacaagccttgctctggtgtggtcctgcttatccaattgttgctcaataatgtcccttcccggaggcatagaaggcaggcacccatacattcacacccacaaaaatgtcacctcattccccagagattgccagtctgggcattgaccttcacttaagcagggcatca

SEQ ID NO: 197254 - DNA, 262 bp, Homo sapiens
atttggtgtctggtgagggctgctttctgcttccaagatggtgccttattgttgcatcctctggagaaggaggtaaagccgtgtcctcacatggtagaaggagaatagaaaagaaaaaggctcatttttcagagataatgcagtctaggtgtcctcatatggcaaaaggcatgggagcagggaggcagctctatgatgcattttttaaaagggcatttatcttatccatgaaggcagaattctcatagcctaatgacctgcg

SEQ ID NO: 197255 - DNA, 742 bp, Homo sapiens
ctcagacggccaaggaggcgtccggatttccccaggagaaggtgcctctcctcttggtaatcagtgggtcatgtgtggtgatgctcaggacggggcgaaggtcccgtggctgaggtgtccactgaccgtttctgcctaaatgggtggttcggtggtggttgccacagggctgtgttttcaaggggagcagcaggtgcctggcgtctgcatccacacctgcctggagcctccttccatttgttactctgtctcctcctgtgtccctgcagctgtgtctccagtgatcttgcctgtactctccgcctctgcagagtgaggttttcactgattgcaaagtaaacatgcacgccccttcagggtcctggtccttagggagctggttaacaagttgaccagaaaaacaacccgaatactcctcaactcttgatgggagctcagttcacacggctccgaatcggcgaaacgcaaccaacgctgggcagaaccttggcacaactttgctggtgtctgctgagaagccgaggggaggttctggggcttggcttgagctgcggggtgagtgtgggagagacggcgagctccctcccatcaatcaatcaacagactgtcctattttcatagtagtccccacccaaatgtcattcgagtccaatctcaggatcctggatgcacgcctgttctccaggtctgcttcccgtgaaattcgtggagattattgtacattcgggagtgggagtgcgat

SEQ ID NO: 197256 - DNA, 424 bp, Homo sapiens
cgctcggtccgttttgggctgtcgtgcgcgtgaggccatcactcctataatcaatcctataagcgcggtcgtttggggacatggtcctctagtcaaatggtcctctatgaaagcctgggagagaatacagggagaatcggcgaaacgcaaccaacgctgggcagaaccttggcacaactttgctggtgtctgctgagaagccgaggggaggttctggggcttggcttgagctgcggggtgagtgtgggagagacggcgagctccctcccatcaatcaatcaacagactgtcctattttcatagtagtccccacccaaatgtcattcgagtccaatctcaggatcctggatgcacgcctgttctccaggtctgcttcccgtgaaattcgtggagattattgtacattcgggagtgggagtgcgat

SEQ ID NO: 197257 - DNA, 562 bp, Homo sapiens
ccagtgaacaagagtgaaaaagcaggtcaaagtttttaactaaaaccagcacattcatggcaggaccaaattctccagaaaactctagcatgccactcactcacaaacattacatgcaaaaagccccaactgtgtagcaatgggttatcttcaatgcattatattttctaaagtctgttgtttggcatcatgatacagtattaatgaaaccctaaaaataactataagcagcacagaaagaatggattaagtatcatgcaagtcatacagccagagaaacaaactccagaggaaaaaacagaaatagccaagttaaaaaaaatgttaatattctgaaccttttgctttcagaggcattagacatgtatgtgagagagtccagacaaaatcagcaaagccacctggtcaacttgaagctaaccacagagccacagtgagtcctaccaatcgcagctgtgaatgacacaacagcccagctggtctgtgaacacaatgtctcccggtgtgtgctcttagggtctaactggcctacaatacagcatcttgtgagaagaggtaactg

SEQ ID NO: 197258 - DNA, 781 bp, Homo sapiens
taagatggttaaggtctgagcctcagcgcctcattagaagcttttgaggtcggttgcaatttgatcatccgctttagcagatgaagaaactgtggcccagaataattaataataaacccgcaggcagtgagtagaggagtggggtcggggtccgccgcagctctctggaccacctcagtccaggcctcctgggggaggctccaggctacaggagagcagggcacctgcctctatccccagatctcatggctctctgtgcttcttaacccaactacaaatcagagctcctgggaagactgtgaagaaatatcactgcctagggttcccccaagactgtggagtcccctgactgtggtgtaagtggtaggggtggagtttgtgtgatgtcggtatgtttttaaccagctcctgcaggggatttgaggagcagtgttggctgagaactgctcaggctgcccccaggtgggatcccctagggcttcattacccacagttccagatgtggtccagtggtcattttctgatctaagtcaggcaatgttggggcattttcggtcaggaagaaactggggaggtgtgaaaggacgggggtcgattagagaggtttccgaaaggacagtggtaactgagatggctatctgtgggtgacccgcctcccactgccccagccttcccatgggagccccccaagggaggggagaccaggctgggtcctcttgctgtcagcaccctgtttaaggatctggtgcaggttttgaagctgagcaggttgttaaacttc

SEQ ID NO: 197259 - DNA, 931 bp, Homo sapiens
ttatttggctgacattcaatatcattgcattgcaggaatagggaggccacaggagagggagagagagacaggggagctatcagtggtggagcagtcagaacacacacatttatgaagttcagccttcatatacggacgtgcttcatggtgccccaaaaagaggacaatagcaacatcgaagatcactgatcacagatcaccatcacagacatgataattacaaaaaagtttgaaacattgtgagaattaccaaagtaacacggagacacaaagtgagtgcatgcagctgggaaaacagcactgatagacttgctcagtgcagggtcgctgcataccttcagcgtgtaaaaaatgcagtatctgcaaagcgcataaaacaaggtatgcctgcgtgtgatgggttgtgggaattggtacgaactgtttgcagtttcatgacaacacgtgggcccttgttattctcaacagtctttcaccctcttctttagattccccttcaggtgttaaactatgtgttttttgtttgtttgtttgtttagagatggagtctcactctatcacccaggctggagtgcagtggcgcaatctcagcacactgcaacctccgattcctgggttcaagccattttcctgcctcagcctcccaagtagctgggattataggcatgcgccattacgcacaactaatttttgtattttgggtagagacggggtttccccatgttggccagcctagtctggaactcctgacctcaagtgatctgcctgcctcagcctccagccctagctgggaccacagataagagctaccatgcccagctgatttttaaccatttttagtagatgtgaggtctaactatgctgtccaggctgatcgtgaaatcctgggctcaagcatcctcctgcctaggcctcccgaagtgcttggcca

SEQ ID NO: 197260 - DNA, 393 bp, Homo sapiens
ctcttgtactcacctcttcatatcttcctcagcttatatctaacccatgcagcaaagtaccatcaattttatctccaaaatatatatgcgatctgactactttttctagtgtcaccttagctcccctaacctgcagcagtagccttccttttactgcatccagtcctttctcaacgcactagtaatgagttttttcaaagcaaatcactatgctgcctaaaaccaacacttagtagcttttgcatttaaaatctaaatctctttccatggcccgtatggcccagcacctgcttttcattctaagctgaattagtgtgagtttcctgtcatttgctgttcagttcttgaaactctttcacaacccagcgcctttacatgagctatcattaacac

SEQ ID NO: 197261 - DNA, 382 bp, Homo sapiens
cttctcctaagagacttaatatactgatgcccaggctccaccctcaactcattaaattggtttaaggaggagcccagacatgagtttttttttaaagctcaagttactttaatgtgcagccagggttgagaaccactgccccaacatcttttactgaggcaacaaattttcaaaggtgtgtccttcaacacgaaaggaagatagcccatccagcaagaggggggcatgttgccagcaaaagtgaaggggctcttagccaagagggcgaagctgcaggctgcgcctctcaggcaacccctggtgatactcccaaatcacatcccaatttctagaggagacagtcctccagatatccacacagccttaactaaattactgctta

SEQ ID NO: 197262 - DNA, 225 bp, Homo sapiens
gcctggacgacagagcgaaactccatctcaaaaaaaaaaagaaaaaaaaaaaagtactatcaagatgaaacatctgtcattcttattttgctatcagttttaagaatagtatttttcttacataataaaagtcatcctcatcaggtactcctttaaatgtcttactgtatattgttttcattgcagtataatatgaaaatttgtttccaacagatacattgtagc

SEQ ID NO: 197263 - DNA, 451 bp, Homo sapiens
cccgagaggcggagcttacagtgagccgagatcacacaactgcactccagcctgggcgacagagtgctgtgtctcaaaaaaataaataaataaataaaaaatttcccccataaacaaattttcagaattacctttaaagttctaaactttgcacataagaaatatagttttaacatgttctaagatgaatattgttttaacatgaacaaaaacatgaacattattttaacttctaacactgttttaacacgaataaaataggtaactctggcagttgttgcttttacaaaatacaggatcaaaacctttgaaaatgaatccaagctttaacttattttatccatagattaaatcataccaaaggaattaaaccatgtttttcttattaacagacttaaaatgaatttcaaacacaccactttacctgagataggctggttgttttcatctc

SEQ ID NO: 197264 - DNA, 329 bp, Homo sapiens
ggcttggcacctctggggcttcagcagtgcagctcttgggccctgtgctgccgactcagcacctccagggtgggcccggggctcagaccaccagcgcagtgagacatgatgaccagggcaccactcgaaaagagagcaggcgagattgcttccctgatgaaaagagagcaggcgagattgcttccctgatgaaaagagagcaggcgagattgcttccctggtgaaaagagagcaggtgagattgcttctctggtgagggagcaggttggttaatagatagcgggcgagattgcttctctggtgaggtagcaggttggttaatagagagc

SEQ ID NO: 197265 - DNA, 347 bp, Homo sapiens
gaaatgcaacaatggtctggttaactcaataatctctatgtcaaggttccttataaacatgcaatctgaactgtcttggagtgtctttctaccccaattcccttacctacagtagattgttgtaactggaaaagaaatttaagtacccagagcaactggagagactgagtaacttcagaaccaaggcagttattattaagcctggggtaattctgtgtgcaaggttaaaaaaaaaaatggtctgggggccgaaaactaagacataaattcctaaattcactggctatatcatctagaaatgtcttttctcagtaaggactggttgtgtacacatacttgtaatgagc

SEQ ID NO: 197266 - DNA, 755 bp, Homo sapiens
agtcctcaccacaccccttcgggccagcctgctttaaacggggcctttctgtaagatgtgacacataatccattgcaccaactgctgtggggcttctggtgccaaaagaccattgagaaaaaggctgcttaaaaaagtatggagtgactcagtactgccaagtcctgtgggattacttattccaagcctgtccttcctgtgtcaggcttcttaaatgttcatgctcctcccatgttttgttgacaccctagatctaggctgcccaatgaaactgtctgctgtgatggaaatgttctatatctatactatccaacagggcagccatgagccatgtgtggctactgagcattcgaaatgtggctagtgtgactgaggaaatgaagtttcagtttacttcattttaattcacataaacataagtaacttcctggtgctcatggctccctactggacagcacaggccagagacataattttgaggggaggccagaggatagcatgcatacttggcttatgttacaatcacctgaggacctcttgcaagtcctggtgcccattctgtatcccagacaattcaatcagattctctggaagtgggacccagacatctgcattttttctctaattgtttctaattttttctttttttttttttcctgctgtagagatgaggtcttgctatgttgcccaagctggtcttgaacttctggactcaagtgatcctccctcctcagcctcccaaagcaatggaattt

SEQ ID NO: 197267 - DNA, 453 bp, Homo sapiens
agcctttgctgtggttcctacccccttgagttttgtcttcatcagcgtttgtcacctggattttgtcatctgaggttgctggagaggcccctgtgctggctcaccgtgtaatttatcatcctacctggagcacttgacttctactttttagactttttatctggaaatgatctcaaacttagacaaagtcacaaaagcaaaaagagtgcaaggaatagccatatacccattgctcagatttacctattattctatcccatttgctgtatcatttgtgttgtaagaacaggagtattctcttacataacctcaacacagtcatcaacctcatacatctccattagtattaataagaagtatttttacatgatatgccatctgtattccaatgttgtcagatgttctaataatatcctgtaattaatgaattaaaagatgaggtctagctctgtt

SEQ ID NO: 197268 - DNA, 232 bp, Homo sapiens
cctcatctctactaaaatacaaaaaaaattagctgggcatggtggcgcgcacctgtggtcccacctactcctgaggctgaaacgggaattgcttgaacgctggaggcagaggatgcagtgagccgagatcgtgccactggactccagcctggcgaaagagcgggactcggtcaaataaataaataaatgcagaacgataaactgttaaacacaagaatcataggctgggcgc

SEQ ID NO: 197269 - DNA, 290 bp, Homo sapiens
ccgacccggacttctggtgtgtggcacatgtctgtagtccctacgcgcttggtggctcgacggctagaggatcgcttgaatcttctggaattgtgacgctgccgtgatggcatgatttcaccactgcactccagcctggtaacagagcaagactctgtctcaaaacaaacaaacgaatgaacaaaacacttcatcatatcttgtgagacatattcactgtcatgcaaacagcaggggaaagacccacccccgtgatcccatgattcagttatctcactgattctctctta

SEQ ID NO: 197270 - DNA, 652 bp, Homo sapiens
cacgtggatttcgctactatggaggctgaggtgggaggatcactggcacatagtgaggcggcggttgcagtgagctgagatcatgccacatgcactccagcctcggtgacagagagagaccccgtcttaaaaaaaataaaatgggcccaggcgtggtggctcatgcctgtaatcccagcactttgggaggccaaggcagacggatcgcctgaagttaggagttcaagaccagcctgggcaacatgttgagaccctgtctctacaaaaaatacacaaatgagccaggggtggtggcatgtgctggtgatccaagctactagggaggctgaggcagtatatgattgcttgagcctgggaagttgaggcttcagtgaaccatgttggcgccactgcactccagcctgggcaacagagtgaaacgctgtttcaaaaaaaggacaaaagaaagaaaaaagaaagttctcttcaacagaaggctgtacttgcatatagtatatagtcatctggagcttgggaatttttttgactaggttgcatcaattgcaaataatgctgtgacattcaaactttaattgcaatagtaattatgctgaaataccttccttaaactcagtttcttcttctattaagaagagccagtgatagaaatggt

SEQ ID NO: 197271 - DNA, 673 bp, Homo sapiens
taatttaatatattttatttaacccaactatctgaaatattatttcaagaaataagataaacaatattgacatattttacattttttggtgctaagtgttcaaaattcagtgtgtactttttcttagagcacttctcaattcaaaccagccacagttcaataacacaatagtcgtatgtggtcttaatgaacagtacagctctagactctcattttccaatgaccactggacacttctgcctcaacattccacaagaacaactgaaaattttctaagccaaattaatcctgtctgctcagatctgttcctcttcccgtctttattacatttctattttattttctcctctctctcattttccattgagaaaagggtcagaacaagtgctcttggaagtctcctttctgttcctatcatcacactagttctcaccatgataatttctaccttgacaattgcaataacctcctaactggtctctccatttgtaatctcctctccatgttatgctttgcttcaggagaaatccctcttgatctcaggtttcatgatgtcactttaagtcttgctggaaggacattggtgcagattttagttcccaaagtggatccaccaatatatctatcccacattttctcctcatgcaacatacagttgatacttgtctacgtg

SEQ ID NO: 197272 - DNA, 661 bp, Homo sapiens
agctatttcccgcgactatcacaaccaccatttaatcaaatatgatggacaatgttgacacatgagcagagaactgccgctaagtgttcaaaattcagtgtgtactttttcttagagcacttctcaattcaaaccagccacagttcaataacacaatagtcgtatgtggtcttaatgaacagtacagctctagactctcattttccaatgaccactggacacttctgcctcaacattccacaagaacaactgaaaattttctaagccaaattaatcctgtctgctcagatctgttcctcttcccgtctttattacatttctattttattttctcctctctctcattttccattgagaaaagggtcagaacaagtgctcttggaagtctcctttctgttcctatcatcacactagttctcaccatgataatttctaccttgacaattgcaataacctcctaactggtctctccatttgtaatctcctctccatgttatgctttgcttcaggagaaatccctcttgatctcaggtttcatgatgtcactttaagtcttgctggaaggacattggtgcagattttagttcccaaagtggatccaccaatatatctatcccacattttctcctcatgcaacatacagttgatacttgtctacgtg

SEQ ID NO: 197273 - DNA, 529 bp, Homo sapiens
ctaagaattcctgcccagcaagttggtttgcagatcagaggcagtgtgtgagaagtacttaacccagcacctggcatatagtagatgttcaggacatcgtagcaggaataagggagacatctcacaaaacattttgtgagaaaggatcagtttctatctagtcaatgtcttaaacattcataggttgttcatggtgggagctgctcgaggaatcatcctagttttatggaggaggaatctgaagctggaggaattgtctccttcaagattacttagttaaaggcaaacaggttcatagccagtggctcttcaccaacccacaaaaaggcctcagattataattttgaagattaagtatatgaaagtgctatttgagtgattaagtgtaagcatcagatcattttgaactggtgagatggctcacgcctggaattccagcactttgggaggcccaagagggaggattgtttgggcccgggagttcgagaccaacctgggcaacattttgagagcctgtccctacaaaaaa

SEQ ID NO: 197274 - DNA, 227 bp, Homo sapiens
ctaagaattcctgcccagcaagttggtttgcagatcagaggcagtgtgtgagaagtacttaacccagcacctggcatatagtagatgttcaggacatcgtagcaggaataagggagacatctcacaaaacattttgtgagaaaggatcagtttctatctagtcaatgtcttaaacattcataggttgttcatggatagtcagattcaacagggtcaaggtgctgatg

SEQ ID NO: 197275 - DNA, 576 bp, Homo sapiens
cctctgcatacattttatcggttgaccctaacacctctccaaaccagacatcatctccttttcacagatgcaggaataggttcagaagaaacagattaaaagtggccaaatagggatgttaacacaagcctggctgactccaaaacccacgcacgttctccactccatcaagcttcctgggcttacctcaacaaggaagcatcttctgaacaaaccagggattctctatcttaacttgaagtggacacattataaagcttcaattctatcacaccaaaaaaacaccttaaactccaccaagacccagcaagaagagcctcatggcaggctaggactgagttcttcccagaagacaggtctaaaacacaagcttttccaccttaacaatggatgtctcctgaccccttcctccagaaatcaaatggccaatctgatgcccacttcagcttctgtcatccctctgtagtcagacaaggagggctcgctcagcttgcatttccttcctgaagagtattcactacctctcttgttcaaacactatgtatcactcaatattctattccttctgctctcaaa

SEQ ID NO: 197276 - DNA, 440 bp, Homo sapiens
ctagagtgttaatctggaggcctgacagatgactgggcagcttagctgccagtttagtagcatcaggcctacctctctaacctctctcatgtgaaatgtcccttaagcccatcttgtttatccacgactagcatatgactctgggtcttaacactgctgtgaagctgcctatttatctgtcttccgggtttgaatgcagtccaggaagttgcatctagaggatttactgtgacctttgtacatagaaaagcataattcctttctccgtatttgaaaatctgctaagaggtagttcttaccttctctgactctggtattggtctgcttcctcacctgccaggtaaaggcctgtcccttctgtcccaggccttttaagctgtgtgtaattgtgggcttgactactcaggatcagccagggagctagacttttgggggaaaat

SEQ ID NO: 197277 - DNA, 399 bp, Homo sapiens
tttttcaggaaacaaatactgagccattttcttgccaacagacatgcaacgtaaggcataataagggaaattctacagagcaaaaaatatggtgacaggagtaaatcgagatatacacaaagaaatgtagactagtagaaacagtaaaagtcaaggtaaaggaaaaagttttaaaattttttaatcatttaaaaacataacgttgacataagcaaaaataataactattattgtggattttacaacatatataggaaaaaatcatagttcagattctgagaaagacaaaacaaaattatactattgtaacttccttacaatatataagccacagtgcaatataatttgcagtagacatagtaaattttatatgaaccaaacacaataaatcctataact

SEQ ID NO: 197278 - DNA, 519 bp, Homo sapiens
atttggtatcagttttctgtcttaacactcttcggcatttcttgtgcagctctgctggcaaggacttctctcactttttttcccttcttacaaattttaatctctaaatgtctgtattcagtcttgagtttgaaggttttttcactgaatgtagaattctagattgatactttttgtcttttagcactttaatggtgttccattgtcttctggcttccattgtttgtgatgagaattgcttgaacccgggaggcagatgttatagtgagctgagatcatgccacagcactccagcctgggatacagagtgagactcttgtctccaaaaatgaaaaaaaaaattatatctatgtatatctctatatatctctatatatctatatatgtatatatctctatatacatctctatatatgtatataattatatatatctatttatatatgtaattatatatatatatctttagtagtgacttttactagtgaaaattttaatatcctaattaccgttatttag

SEQ ID NO: 197279 - DNA, 465 bp, Homo sapiens
tagggagagcctcaggcaggtcaaacaatttgttcaaggtcttacagcttgtaggtcatgaagcagaagtaccaacctaagctgcctgattcctcgggcctgtcctcttaaccactaccggactgtcccacctttataagtcctgattgcatcaccaaaaaggacgtccagccttagacaatgccagaaaaacaatgtcctgttggctccttaggctttcgggcaaaagacacctattcccaggagagccaggcaaaggcaataattgtgcactgcctctgaaaacatcctgatgccctgtcagctgatagtgtagggacaaccatggttgagaattctgttcactctagtgttgcgaaattcaacttttaacaagtagagtgaggtttttggtttttttctgagcatatttattaagattttttggttgcaggtaacagaaactaaggtaaaccaacctaacca

SEQ ID NO: 197280 - DNA, 395 bp, Homo sapiens
tgacatctaattttcactttttggcaatatttggtctcatcaagctttacacataaatattttcagcaaagtgctccaaatgcctttttcagaaatctgaatccacatgaaaacaatggcaacaagaaaaaggtgtaaactttccagaacaggcccagaatttgaaaatgtgataaagaggttattgtgcgcccgaacttttcacacaagaattggaggagatttaacacatggaataataaacagaggaaggcgggctaatgcagagcagatgggcctgcagggcagtgctcagcatttcaacatctttcccctggacctttggacccaaggtgattgcatgctggtgtctttagctaaaaataaagttaatgtctttggggcaatcataaata

SEQ ID NO: 197281 - DNA, 535 bp, Homo sapiens
tattagcaggatcatagaattttaaggctgaactgggttttctggtttcatctcccttcagatgcacagacttccccatgacatccatgccactgagtgctgggcctccctcactgtctcaccccctcaccctcaggcttttcatacctggcagtgctgaccgtggccatccagacctgtttagagatgcagctttctccagcatccacccgctgctcctggtttggctgctggaggccatcaagaacaaatctaatcccttctgacagtcgtattgagagacaagacacctacccattccccagtcattctcttcagcccatgctcaacgccttcagattcttcagagtctctgaaaatgtgataatgaggctactggtcattgccggtcacgcctgtcctagtgcttgccattaccaaagttgctttttgcttgctttctcttttttctctcccccttcatctctttttctgatggacacgcctgctagctcgcctgcctgcagtctatctctctgccctcctgcatggtcct

SEQ ID NO: 197282 - DNA, 437 bp, Homo sapiens
gaggcggaagacaataagtgtcagaagattagcagcaggatctcctcccataagattgatttgatacccacccccatcacaatcacatggtccatggaaatcagaaacccatgcaacagtttgaatagtttaaattcccttgttactgtgatcactgggcttcttactctgtcttgttctataccatgctatgttgatcctggggtgaaactcaaccacctacaaacccctcactcaaagctttaaggagttacaaagagggaggaagcatcacttaccacattgcatggcaccttaaaaccatgtattagccctgggctaatacacctgtgtggtggctcatgcctgtaatcccaacactgagagggagtgtaggaggatagcttgagtccagcggttcgggaccagcctgagcaacatagggagaccccatctct

SEQ ID NO: 197283 - DNA, 154 bp, Homo sapiens
ggactcgggaagaaccccagctgccagcttagccgcccctccccagccagaagattctctcccagagcacttctttcaaatctggaagttctgaaattggctgaagccaaatgctgactttactccttcaatctcagatagcctactccatgaa

SEQ ID NO: 197284 - DNA, 204 bp, Homo sapiens
aacacctctcccaaggagatggaatgcaagacagaggcaccctaagagtgttgttccatgtacagtgaggctgtagggctgagccaggctgcttgctggcttcccaaactgagagcaaacaatgttaggggagcttttagccatctattattcccaaatgtaggccttgtttcaaactctatctgttctctttgattgaaggag

SEQ ID NO: 197285 - DNA, 314 bp, Homo sapiens
atcagactaatgagttttggggactaaccaggtttttggaatgcttctgtcccaggtcctgttcacctccattttccattaccttctctctattttcatgaaaaccagttttcagaatagtttataggacaatcgcagcatgccagttttaaatcactttaatcaatgccattctttatcaaccatttcatgagagcggaggtgaacgattttaggaggttttttgccttatcctttcaaattcacgcccccaaggtacagctctgtgattgatatttgagaacactgtttccgtgataaaatctcagtgctca

SEQ ID NO: 197286 - DNA, 393 bp, Homo sapiens
acttgttaaaaggtaaaaaggttcattatctgttccctctattttgtatatggttaaagtttcccataatgtccttgctcactcgttcaaatcacaacaggaaacttgatgtacctccaataagcaagttatattaaccagaaaataaaaaaatatacttacaatggataggactatcctgaggaaaggaccaggtagtcatgctttaactatgtgaataagaatttatttattagaaaaataactggctgtcactgaaatcttttgataactgaatcaaggtgatatctaaaatgcttttactcatgaaaattgctgggagatggctgaagcaaaggaaaccaagtgccttttataacatatcaaacaacaacaaaaaaggggactttatct

SEQ ID NO: 197287 - DNA, 495 bp, Homo sapiens
gacagcatgttactgtactgtaggcaattataatccaatggtaagtatttgtgtatctaaacagctaaacacaaaaaacttacgtaaaaatatggtattataatcttatgggaccattgttgtacatgtggtctttcattcactgaaatcttattatgggtacatgactatgtatgaaaaaatacttttctttttccttttttttagatggagtttcgctcttgttgcccaggctggaatgcaatggtgcaatctcagctcaccacaacctccgcctcccgggttcaagcaattctcctgcctcagcctctagagtagctgggattacaggaatgtgccaccacccctggctaattttgtatttttagtagagagggggtttctccatgttggtcaggctggtttcgaactcccgacctcagatgatccacccgcctcggcctcccaaagtgctgggattacaggcatgagccactgcgcctggtcttttttttt

SEQ ID NO: 197288 - DNA, 468 bp, Homo sapiens
ttattaatttttcaaagtcatggtccctgtcctcaatggagctcatggctccctggggaagacagacatgtcaacaagcagatgcagaccaggctgtgagcaactccactgcaggaggccaggaaagtaaactggaaggctgaggcttcccaagccaaaaaggagggtgaggtcattgccggtggagagaacagcaagcacagtgtgaaaggcagtgttgagtgcagccagcttgaagaagttcagaaccactgggacttgggtacagacagtgtggcagctgtggaggaagaggcagaagacaggatgggaataggcccagggtggcttccaggtggggaccgagaggacagggccaaggcaggacctgggccacagagaggtggaaacacatgccatgcaagtgggaaagccaggagggttaaatgagaccgcctaagaaggtaaatcctgaaagaagaagagggc

SEQ ID NO: 197289 - DNA, 435 bp, Homo sapiens
aattaggattcctgtacaaagcaatgtttttctgttgtgatatctgagataaaaagaacttcaggctgaaacttctttaaagtggtctaagttaagcttactttctttccatagtgtataaactccttataggatacatttattatctactgtgtcttacacactctcccagacgctagggatatacagttacctgtccacaagggtgtgaaacccagtgagggattttaaatattttcagaagtttagtttaatgaaataagttatttattttgaattttaagtcataggtttaaatgaaatttttaattcagcaaaaaattaataaggttttaattcaccaggcatatgctaagctgcatatatatggaatgtggcccatcttaaaggaattctgggacctgtggtagagacagaaaagtaaacaaatagtgc

SEQ ID NO: 197290 - DNA, 579 bp, Homo sapiens
agggcttcttggcagttgcagccctttatggaatgaatggcaccctcccttctcctgcatccatgcagttttcatgttaaactaggttggaaatactggtggggaagagcttgctgtcaggaagacattggaacaggctaatcttgccaagctcaacctctcattaatcacctgtaggagagggttccttttacatgtctttattggaaatggcatatggaacattttttgcttggctgtgttcactcaaattatgattattgcaccctcgccctcacatcccaccatctccatgcctgttgagagaagaagtcaacagggttcttgccattcctgagatatggcaatttagcttgggaacagatgctgtttgccccctaagtcaaggtgacttcgtgggcaaactgtttcttggccaggggatgtgtccatgctggtctttgtcaccatttctcagattggggttggcccagtgcccttactcacaaatagcagacctggctggtagaagctgcacccctggaagcaccacatgaatttgcatggcactaacaccaccactcaagggacccagaccag

SEQ ID NO: 197291 - DNA, 268 bp, Homo sapiens
actggtgtgctggtttcaggggtgtatttgaaattctgttcatttgttaagagggagaattctgttaggactgattaacttactcgcagatactgttcctttatcatctatgtctgttgattaattcattatgtaatcctatcctttaatcacaccacacagaaaatttacctaaagaatacaggaaaaaaatgtactgaatttctctctctgttaagacagggaaataatgtggtgtgaaattccaagataggctttgcaagtgaga

SEQ ID NO: 197292 - DNA, 215 bp, Homo sapiens
agacagcaacaccctcagcctgcctcggaagagacaaaagtaaatacccgtctcaaagagaatgcactgaaatatgatatcagctgcaagagagggccatctcctccggtcaaatgagaaaaatcatattatcctcgctgtggtatacaaatagcttgtaagccacattctccatttgaatgataacaataaagtgctaacctcgctgctgcagg

SEQ ID NO: 197293 - DNA, 563 bp, Homo sapiens
cacaggagtgcagtgactaccatattggacagcacaaattctaattgtcatgacatggaacaatgcttgcttccccagcattttgaaagccccagaatgataacctggcccagaatgacacatggatgaataagaggaattaaaacaaagtccatatacgtcaaatatcaaaatgagtgtgagacagcctccccagatgcagtttccaaaggaaatgaccagtttaactggttccatgatacttgcccctttttccctgccagataaaggctattaaaaaacaatcaaagtgtgaagagggcagaaaatgtgatgaagagattctttggagaaagtagctgccactgttaccttgggatctgcctatagtcctcacagagcttggtaagacaaaagatggctttcctgtagacataggagggagagaaagctgggccagagctggttaaatcctgcccatgaagactgccttggagagcagtgggactccaaaagcacgagccaggatggggtggactcagtgatgtgctggtaaatgtttaagaaccagctctccagaaaga

SEQ ID NO: 197294 - DNA, 237 bp, Homo sapiens
aataaatcaaaaatattttatttttgtgagaaactatagtatgaatttttttccctgagtttaatttttaaataatttattactgtatatcttcctaaagatacgaccagttctgttatttatttgataggggttgattggctttctgtcatgtgttaggtgctgtactaagttttacatgtatagtctcatttagtttgtagttgttctgagggaagtgtctaggattactacaat

SEQ ID NO: 197295 - DNA, 218 bp, Homo sapiens
gtgggatgagttaattaatctcaaacacatttaaattaacaggaagaaagaaatagggcatggtaggaggagagaaaggaggacagttagggatatagtgaatacttttaaagtcagttgaattatttcatacgggataatttttcttgtcacagtaaatcaccctgtgccccacccccgctccaggaaggcagggaggttgtaaaggagaagcgaga

SEQ ID NO: 197296 - DNA, 1034 bp, Homo sapiens
ggacctctcaggctaatcccgagggccgggcctgttgggcttttctgcacaccagccgaggcagcgagccaacatgagccaagtgctgttccaccaactagtcccgttgcaggtgaaatgcaaagactgtgaggagaggagagtaagtataagaatgagcattgaactacaatcagtttctaatccagttcacagaaaggttggtatttagtccttttttgaaatatcatttcggtacattgtagacaattagttttgttctttaagaatgtgacatcttttattgcatttattttgcttttacattttaggctattttgcaactgttggaaatcaagggtggtggaatctagtgaaatcccatctctacaaaaaaatacacaaattagctgaatgtggtggcacactcctgtagttccatctacttgagaggctgaggtggaaggatcacttgagactgggaggttgaggctgcagtgagctgtgagggtgccactgcaacctagactgggcgacagagcgagaccccatgtcaaaaaacactgaaatatagcatctgttttctgtgtgccatagctttccctgaacacattcaaggacctagtagtattaatagtacctttggttttttaagtagcatcctgggtgaatttcaggaagtacttaaatagaagctgcttaagaacaaggcattctgaggcagagcaggtgcctaaattactaattttccagagtagagatgatatattatacttcttacatgttattccttatgcctgctgtacctcttcattttctagcttggtgcataagtggtttagatttttctaggatcttagcatttcctcagtagacatgagtagagattttatttcaaatgaattcttaaccttaatgcccagttctttattagttttacatcatcttgtaactaatgctgtttttctttcaccagtgttctctggtacataattttggtgtactttttgtgagctctagctgttatgatggtctcccacactatgtacacgtag

SEQ ID NO: 197297 - DNA, 578 bp, Homo sapiens
ctgtacaatgtcagatttgctgtttcatgtgtcttcaactttatgggtttaatttatgtcttcatcaaatggctatggtatggatttaccataattgtatacatgcatacatgcctacctatgtatatataaacaaacatttttgtaaacagctcagtgaggactttggactggcataaatcataggaatatgattatgaggatacatccaattttcagattgggcaatgtatacagtttattatcatttctgattttgggtagagttagtactaagaacagcattgaagaaaagcagtataacattaaaattaagaagatttaaaatacaagaggattcataacagtcacttttaaaatattgttttggctttctactttggagctgtaattttaaaaaaagaatgaacaggtttttgtatgaatatgttagaatgactaattatagagcatctttcaactggaatacatgtagatactaacacctggttgtatttgatgtaatttcagtgcatacagtgtgtataatctgtattaagtgaaatacttatgaataaagttgtttctgcattgcaaaa

SEQ ID NO: 197298 - DNA, 406 bp, Homo sapiens
gcggatgattctggatcttgggaggactacatctttttgcaccctcttttcaggacatctctttcatccttggttaagtcataaaagactgactgattttggttctgagtcacttggttggggcctcagtttaaaagcagaaaaaaaaaagccacaagtagttcaagcagttgctgtttgttctggctgaaatctgaaaataaaatatttgaaaagtttttttgttttgtttttttcttcaatgaattctgtggtcagaagtctgattaattgaaagctgatattcaggctttactttttttaaggcctctgtgttctcactattggatattgcttcttccatgggaacttagttgactgaaactcctcttgttgaatccctgctaactatatgctcagcccttct

SEQ ID NO: 197299 - DNA, 705 bp, Homo sapiens
aaagtggtgctgtgagagaaatgtatatccttaattacttatattagcaataaaactgtgatcattggtcagataggtatttatcttaaaatattattaattgaaaaggagagtaaatccaatgaaagaaaaagtaagaaataataaaaatgaaagtgaaaattagtacaatagggaaaaatgataaggtagagatcaacaaatccaaaaattagttctttggaaacaaatcaacaaaatagacagatgtcttgcaaaactgatcaagagaagaacacagaaataaacaattttatgaatgaaaaattgggcatagctataaatagagattacaaggtaaccaaacgtaaattataagatgcaggtagttcaatgggggaaaggtaaatcttttcaacaaatggtgctgaaacaactgaatatctgtattttttaaaaagaaaaccttgattcttacctcacaccgtgcataaaaattaactctagatgaatcagagataagtgatacggctccagtgagtggaggaacaccagggttcttaattctcaggccagtttagacaaaacacggacacatgtggagcggttttaaggagcggagagtttaatagacaagaaggaagcggaaggcagaaggaagaggctcccccatacagagatagagggagaggaggctccaaagccgaaagaggaggtccccaagtg

SEQ ID NO: 197300 - DNA, 635 bp, Homo sapiens
ttttattacttttactgtcattatgaataaggtcagtttttcacaattattcttattggaaaatctattaattttatatatacaaatatgtactgtgcaattagctatctattgatccttcttatttctaattgcttgagttgattcccctgggttttctaagcctgacaatgactttgtcattaagtaatcatcattctctcctttctatttgattctgcttctttaaaaatagagacttccataaaagtgtcaaatagattgcgccaatggtttggtttaccattcctccagctttggggggatgccaacatctctccactgaaaatgccactgacagctggctgctctctagtattagggaaatctgggttcctagttgattcatatttgtgatgttttcaaatcagtagcaggtgatgaatgtcatcaactgccctgttcggcctctgtggaccctgcacgtctcttgcggcatttgctgtggcaaatcatgctgacaggctgcctcgccccacatcaccctcgcccgctgtccatgtgctggtatttcacttgggattcccatgcctgcttcacctgctggaggtgagacacagtgttcctgcataccacgtggccaacaggctcagtaa

SEQ ID NO: 197301 - DNA, 837 bp, Homo sapiens
atcccacactccactctcctgctcaaaaagtcatattaaacttttcccctgttctgggccttcatacatatttgttttctcaataacatacctctgtgccctcttctcccaactaattcctactcttcaagtttcactttccatatcacttcttcctgatctattccacacacctgcagtttcctttgtcatagtatattaattacacttctgtgatttctgccttgtttgtccggtcttccctaaaagacactgtatccatcctacttaataaagcatctccagatgtaagcgactcacatggaatgaatgtgcacttaatattacggcaaaaatgttattataaggctaaatatcaaatacaatgcaagctaagtaagacagtaatatagggcttatgtacaacaaacatttctcccttttttcccccccagagaaggtctcactgctgtggctcactgctggctgatgaattcgaattcatcagccagcagtgggaaagatatagcagggagcagaaatcaatgaatttgaaaacaaaaaaacaatagaagacatcaacaatacaaaaagctggttctttaagatcagtaaaattggcaaacctctagaaaaagataaagagaacatgcaaaattaccaatatcaggactgaaaagagatatcacaacagaccccataggatggatatcccatcctccatgatgagattatttcacagtgtatgcctatatcaaaatatctcatttaccccattaatatatacacctagtaggtaccaacaaaaattacaaattaaagagaccctaagatgttaaagaatatatggatactaca

SEQ ID NO: 197302 - DNA, 568 bp, Homo sapiens
atcccacactccactctcctgctcaaaaagtcatattaaacttttcccctgttctgggccttcatacatatttgttttctcaataacatacctctgtgccctcttctcccaactaattcctactcttcaagtttcactttccatatcacttcttcctgatctattccacacacctgcagtttcctttgtcatagtatattaattacacttctgtgatttctgccttgtttgtccggtcttccctaaaagacactgtatccatcctacttaataaagcatctccagatgtaagcgactcacatggaatgaatgtgcacttaatattacggcaaaaatgttattataaggctaaatatcaaatacaatgcaagctaagtaagacagtaatatagggcttatgtacaacaaacatttctcccttttttcccccccagagaaggtctcactgctgtggctcactgcaacctcaacttcccagactcaggtgatccatcttaaaagtagctgtgactataggcacacaccaccacacccagccaattcttttatttctaatagtgttgggggt

SEQ ID NO: 197303 - DNA, 517 bp, Homo sapiens
aagcagtatttacacagtcatgattaaaaattgaatatggattaaatataatacacatactttttatgcacagttgtattgaagttatagttgtcccttagtatccacagggaattacttccaggacctccatggataccaaaatctttgcatacataggttccagaattgatcctacggaaccccccgatgtgaaaagttggcccttccatattcatggatttcacatcccactaatactgtattttcaatctgcatttggttgctgatgcagaatctgccaatacagagggccaaatctgtttattggaaaaatctgtgtataagtagacctggtcagttaaaacccatgtcttcaagaatcaactctgatacttactgtcaaaaattgatgagtgaagaaatctgtaagtcaagaagtagtaggtaaaatagatgaaaacatttttcttggttttggctatcagcctttggtacatctgattgtttaaatttttcacatacattacttgatatg

SEQ ID NO: 197304 - DNA, 421 bp, Homo sapiens
cctttggcctcttcctgtttctgaacagtagagctgtggcctcagccttatcgccaggctctgttgttgtaccatgtgtcttgtttgttctgttggtaaacatgcctgccttccttgcttccttccatcctcccatctatcattgctaccatttgccatagtgagtgatacgtaaaacctgaactcacaaggcattttgcccagaaattgtcttagcttcttggtctttactaaataatctcaaggtcccgtccagctccaaaaattctaagttgccgtatacacagcaagagaatttacctatgaccaatcactttcctgtccttatgcgtctgggccaaacagtctcatgaattattgatcgcagaagatgtccaaagtattgtggcctctgcagaagcttttccagttttatttgcct

SEQ ID NO: 197305 - DNA, 265 bp, Homo sapiens
accaaatatgtgtagtggctccaggccaatagggaggcagtgagagttctgacttgggtaaactgacaggtttgaaaattgaaggctatttcagtaccaggaatctgtaaggcgggaagcctcttttttgatctgtgtggaaattgatgcctagggcaatacatacccatgatctgttattcacaaaaccctaatccataaagctctggcaaggctttttcataagcctgctctaaattctcttgctagtaaaacctaaaatgga

SEQ ID NO: 197306 - DNA, 890 bp, Homo sapiens
  misc_feature (25)..(25): n is a, c, g, or t
atacggctaggtacgaggctgggtngtgtcacgtataaaataaatctcgcttccatccctctgctgctgggttggctgtccacagaatgggcacagcgaggcaggtgtgagggagaagcatatacttatgttaatatgtatgtcaaaagtaagaggagcagagggaatgaaaatatccatatgaatttttttttccagaatttaaagcaacacctagttgacgattcagatgaaaacgtctcagtcccttatggctgggaggtttagcaaagctttcccagaggaaagaacacatcatttgtgtggggtggctctgcttcactgaaatgaccagaacgtagctgttaagcctgggaggatgggtcaggccacaggatcaggtaagagtgtacccttcaggccgcacatggcagagactgcacatgacttgtgcacggataaggtctgggccttatctctgtctcttctggctctggaatatagtacatttctcaattaagcctcagtttccttatctgaatgctggcatggtaatggcagtcttgcaggatagttagaatgttcaaatgagagagtctatcatagtttgctctgctgtttgctccatagaagctgcggatggttgagattttggtcaagacctttctttcgtctgatctgacttgggtccagatacttggaaaaatatggcaatcatgctgggtccaaaaggctgtgggattcttttacttcagcttaaacctgttttattggtcttccggaaatgcttgcagaaataagagcatgttaacgtgggtggacacaatttggagtgcttgattaactcagcaattaataaaaatggagaggtgacaattggtgttaccaagctacagttgaaagcagtgcac

SEQ ID NO: 197307 - DNA, 276 bp, Homo sapiens
gcttttgcactcttaggcgccatgggctaacttgctggagagccacatggagagactgtatggaaaaaccacagggagagggagaagccttgagatcacatggaagagaactgaggaattgagctgacaatgagaattgaggtcccagcctatggtcccagttgtgtgttccagccagcatccagttgtttgaactgcctctatactagtaaacaagtaattaattaatacaagtaaatgaaaacaagtaataaagtaattaatacaagtattaag

SEQ ID NO: 197308 - DNA, 437 bp, Homo sapiens
ctgtggttagaacttttcatattattatctcatttatacacataatgattttatgaggtagttgttatcatctccatttcgcttgtttaaggtcacacacctggtaattggtggtgctgagatgaaagccaaggtctccctgccttcaccaccgggccaccctgccccttctcctgccagtccactgggctttctcccctgagagtcaaagtttcagcctgtttcccctctgaggtccttggtgttgacaagacctcagtctagatcagattgcattttatccctttactctctgtgccttgtatcccctgagctttttaacatatggggagcccttccttagaatagctgtcacctaggcgtattgtaatttatacctattgacactatgctgcagataattcacctttgcaaactgtcactttccaccgtcacca

SEQ ID NO: 197309 - DNA, 150 bp, Homo sapiens
gaggatggaagtgtgaagtccaagaagttcaaagtcatcaataagcattttgaactcatcaaaattgatgttaagatttcaaaaatgtgatgtgagcttgtgctgagattatatagaatgtagaaatgtgagcactgaagaagataatat

SEQ ID NO: 197310 - DNA, 641 bp, Homo sapiens
gagcaccctggccaacatgatgaaaccccgtctctactaaaaatgcaaaaatgagccaggcgtggtggtgggcgcctgtaatcccagctactcgggaggctgaggcaggagaatcacttgaacccgggaggcagaggttgcagtgagctgaaactgcgccactgcactccaacctggagtgcaaagcaagactccgtctcaaaaataaaattaggttgaactggaaggtggcttgtttttaggatgacaggttttagacaaatatgtataaatttctctttatatccttttgcccatggtatcctgcagtgacataggtaatcatattgatgaaaaggactggaaaacagaattaaaggggatacattattttgctatgtaacaaataactgcagaaaatctgaaatttagattctgtttatattcaatacttctaatatcttatttcagtgatccagtgacctaaagatagagtaaaagaacaaatgcttttgttagaaattgtggcacgtgcctgtagtcccagctactggggaggctgaggcaggagaatcacttgagcccaggaggtggaggttgcaagttagccgagattgcgccactgcattccagcctgggcgacagagcgagactccacctca

SEQ ID NO: 197311 - DNA, 438 bp, Homo sapiens
ctatggccattaaaacaatgttataaagaataaagactatgtaaattgatcactgaaacaaagtaagagtcagattgatacaaccagtttggagggcaatttagcaggatgtttaagttaaaaatgttcacactcttctatccagctactttctgggcacatgtacacaagacgtgccctagagtgagttcaccgctacaccggacatcccaaaaaaacaaaagctgcagacaaccttaatgtccttcaatggggaagtgactaatcatttaacactgcagaagtaaagttaggaagcaactaagaaagaatgagacaggtctacacacaccacacagagtgatctttagaggtatctagggcatcttgttgatggaaaaagttacatcatatcgtttgtgtacattctaaacacacattggcagtactttctatgtt

SEQ ID NO: 197312 - DNA, 240 bp, Homo sapiens
caagaaaacttcagaacatcttacaatttcagctctacatatatatgaaaaggcaaggtgagtggccttctctgtactctccctcccagttaaaaaaaaaaaaaaaaaagttgaagacttcaagttgaatatctgtgaaaaactaagaaactgaaaaacaacgtgtttgaggaatggctccctttgttttaatcaaactgaatttcatgtaaccacattttataaaaaagactttatgta

SEQ ID NO: 197313 - DNA, 322 bp, Homo sapiens
cctcccatgacacatgggaattatgcgaactacaattcaatacgagatttgggcggggacacagacaaaccatatcaagcagcatctaccattactgctaggactggcagattagcacatttacagtttttttaattcaagcttcctctaactttcaaagctaagctttaccctatgcactttgaataacacgctgtagtactcattcataaataaaaccacatattttcttacatttttcccaaatactttgtattaacttttgacttactaaagtaaaatattaatgggcaaaaaccagtccgtttgggccaataaatgg

SEQ ID NO: 197314 - DNA, 297 bp, Homo sapiens
tgacgcaggagagctgtgaacacgtgatgggcctccgtcgccggttccttaccctgccacggccaagcgccatcctgcctccatgcaaccccaaggagaggagggcagtgagcatctctgacaccccttggcactgaggtgagactcttcctgtgagcccgcaccccatcaacgtgctccataagccataggagtcaccacaaacttcgcaagtggataatagtcaggcctcactgaagacacagctacccatgctgatccagccaggagggtcgcttctgtgtctcctcctactcc

SEQ ID NO: 197315 - DNA, 1971 bp, Homo sapiens
  misc_feature (1409)..(1409): n is a, c, g, or t
  misc_feature (1625)..(1625): n is a, c, g, or t
gtagcattaagcttgatgccaatcttaatatccattgttttaaatatgttgttttagaaagcatattttgcttacttttcctcaaaactttctgttcattgttactcttcccaaaagaacaaagatctccacagctaacaccaaacatcatataccatatttgtttttgtgggtattctgtaattattttcaagctcctaggcacatttgcgtacactacttttgtttctgcaatgacaaatttctaaaatgttagcagcaatgactgtaaaaaagggtagttaattggaaaagagttcagatcctaactctgtttagggaccatgtaacccaggcaagccgctgcacctccctgggcctcatcctggaagtagagatgttgggcagacacatggggagggattgcgtgtatgagtgtaacaggctgggtgggatgctcgagtgaggtggggaccctgcagcaatgcagaggacatgctcggtctaaggaaggcagctgcaatctcactgctactcagaaatgtaggcttacagttggccactcttctcatgtctcaaaagaaactgggtttttgtgggaatttccttttcctcaatttggcaataattcaaactaaaatctcttcttctttttttttttttttgagacagagtctcactctgtcgcccaggctggagtgcaatggtgcgatctcggctcactgccacctccgtcttccggattcaagcaattctcctgcctcagcctcccaagtaactgggattacaggctcccaccaccacgcctggctaatttttgtatttttagtagagacaggattttgccatgttggccaggatggtcttgaactcctgacctcaggcgatccacctgcctcggcctcccaaagtgctgggattacaggcatgagccaccacacctggccaacagatctcttcttcaaaacagttcttccagccagactgggtttgtgggacagcagtgtgtaacctctgggcaggacatccccaggatggaggtgctctggcccatgcctgcactataccagcatgtgccctgggacattgcagatggctccccaggcctccacgggcctgcactcacagtctcttcaccagagagctcgaaatctcagaacccaactctctcatgtcatcaagccagagacatgagtctgcttttctgtctccttagatttgtctgttcttagacattttgcataaatgaaattatgtaatatgtggtcctctatgactggcgtctttcacttggcataatgttttcaaggtttcctcatgttgttgcatatatcagagctttattctttttattactgcataatattccattttatgaattatttgtccattcatcagttggtggacgtttgagttgtttccactttctngctactatgaataatgctactgcaaacattcatatacaagtttgtgtgtggacaagttttcatttttcttggatatgtatgtgggagtggaattggtgtatcatattgctttgaggacagaccaaacagttttctgaagtagctgtaccgttttatcaaatacattcccatcagcagtgtatgagggcttcagttgctctacctcctctccaacangtttaatttttctgattttctatgataactatcccagtagttgtgaaagtggtatctcactatagttttgatttgcattttccttatgactaaggacattaagcatctttttatatgcttattgaccattcatgtcttctttggagaactctccagattctttgctcatttttaaatttggttatttgcctttttattgctaagttataagagttctttatataatctggatacatgtctcgatgagcctcatttttgtcacccaaatttaatgatattcaaaatattctacttactaagataggaaactattctgtttgaaaaacagtataaataacaacgtttt

SEQ ID NO: 197316 - DNA, 544 bp, Homo sapiens
aattaatagctcttttgccccccctcaacaactagctacagggcagctgctgagcctgtgagatagaacttatgttattaagcagaagagaaacatttagccctccgaatcatttcagcagggttccagtccagaggtcacagcactgggcatctcctttccctgggtccccgttcccagtattcaagttggtgttcacgggtgtgtttatagccagtctgtgaactacagaatgttcatcgaaattaatgcccctgctcatggtgaacatgcaacatcattcctcctgattcttcttgtgttctctgtcctggagaattgtcctgccgtttgccccgttgtccaactggatagctgaaccatcatcctggataccttctcccttaatagccatatccagtgatggccaattcctatggattctgccttctaaatacctctgctatgccctttcctgcattgcacctgcctgttccttgcgtggtgctgaggtttgaggtatgattgatctgtcacccaggtaatgagcatagtaattgatagt

SEQ ID NO: 197317 - DNA, 263 bp, Homo sapiens
tgggccactcccatctgcggtttcacacttctgggctctgtggcgagggtctgcccctccatggctctgaaccgctttcctctgtgcgatgaaagtaaacgacgtctccctttgagggcttggggtacggggagaacaaggctcgcacagtaggtgtgcaggccacgtccccacagcagggttccaaagcctaagatccatcagtgaccctgaggagggattcgaagaaaagttcagatttcagatttctggcttcatttgaa

SEQ ID NO: 197318 - DNA, 316 bp, Homo sapiens
acattgccagtttctgttcttctgcattttctccaacacttggtattgtcagagtttttaagttttgctgatttgcataaaatggtatctcattgagattttaatttttgtctctgaaaattattgaacgtgagcatcttttacatatgttaaacattttaattttatcttttagtaagtacttgtttatgtcttttgtccattttcctattaggttgaggtgggaggatcacttgggcccaggaggtgaaggttgcagtgagcaaagatcatacccctgcactcgagcctggcaacagagcaagaccccgtttca

SEQ ID NO: 197319 - DNA, 941 bp, Homo sapiens
gaaaaatgttcaatattctaatcacataagtatattccaataggttaaattgattatttcaatttactatgcaaaacttgtagtgtgtggttaatagattacatggcttatatacatacaaaaggttttcatgttaaattttgtttgaataataaaatggactaagagagttcagtttcagccttcatatggcacttagtatgagaaaactcaactactaatgttgtatccctattttaagaaaactcacatacaaatatctgaacttgaaatagcaagaaattaagaaatttggggaagattattttgtttcctttatgaacacattatatcttcaataacttccaatagaattcctttaaatagtgaaattccccagtgtattaaaaatattattttctattctgataaatatttcacagtacatttatttcatacagaatggaacactgatacttggctttgtcttcaagagcccaagcaaagctgctgaagcaggccgcagttatgggtaatcaagtgagattctaagtccccagacgataattgtgcacttttttctggtgtgtcctaactataaattggaaacagttggactaaaacttacagcaacaactccaatagaatcagatttctccttaaacttggagaagctggaactgtttctgctttaaagtccaaactaggaaggtcatgttccaaagcagccttaaattgctaagaaaccaagaatcaccttcagactgtttctaaaagaaatgttaatcagaataaatttccttctgaaaatgaactggtaatagtaacactagtcaaactttaaaatagttgtaaaaggagcagattgtggtttcattggacctaaactgaaaggcctgtttgcagttcccaaggaaatggcatgagtgcagacttaacaatttaactataggcaacaacca

SEQ ID NO: 197320 - DNA, 510 bp, Homo sapiens
catggtagtggctgcctctggaaaggaagcaggcaaatgagatttagggtagtagtaaaagggaattttagctacctctgtaatgtttatttttttaaaaaagaaaaaaagccattaagctaagatgactcacttaggcatagttaggggatgtgaagtgtcattgaaattcttgtctaaaaaacacagcagaagtttgagatctcgtctttgtcctcataaactgttctttcacgtaatgtatagtttttttgtgtgtcagacactagttatgtctcgctttcttgaaacaacagtaaaacctgtttcaaatcgattgaataattcagaatagttgttacctcctctttgcccacaataaccttctttctaaattaatatactgtgatgatgggactttatctttgtgtgtgttctatgaagaaagggacacgctatgagtccttggtaaaatgaataaatagatgaataaataaataagccctgtttgctggccaccctgcatgcaac

SEQ ID NO: 197321 - DNA, 1023 bp, Homo sapiens
aaaggaaggaaggaaaaaagaaagagaaaggaagaaagaggaaggaaggaagggaagatggaactaaggaaggaagaaaggaggaaagaaagaaaaaggaaggaagaaaacaaaaataaaaaaaaaaaaaaaaaaatcttgttcgcggcgccggctttcggggcctttcggaaaaaggttttctctaaaacattccgtgttggggcggcggcgggcccagtaattgttatgtgaaccttgggccattaggctggctccaaaaggagaatcccgggcgctggagaactacttggttggggttctctcacccaatataaaaaaagcgccggcggggaaacccggaggggtttctggaaacaatctcccaaagatggagaggctcgagaggagggccaattaacgggggtgagtttatttccaaaaaggggggagttcccaaggggggagcctccggaatattacaaaattatcccgccccgtcctgtgtggggaaaaaggataataagcacgcatgtagatcaattaaagagcacacaagagaacgaagtaagtataataacagtaagaatcacataataatatcagaaagaacatacatcagagcatgtacaaaaccatcgtaggacagccacaattaggataaatatctatataggacaaaaacattgatagtaaaaagcgagagaatagagagaggagggaaaaaaaagggagaaaaggaaggaatgagtaggaaggtagccacagcaggaaagcgtgaagagaggagtgagagagagggaagaaggtgaaggagaaagaaaaccaacagtaacaggaaaggagagagaaaagaggtcgaggaaagaaaaatgaagagggaaggagtatacaagtgagaaaaaaaaaaaaaaagagaaggaagaataagaagatacaagaaggagacaagaaaatagcagctaactaagcgaagagcaagggagcgcggacagggcagaaaatcaggaaaaatataaaagaagaaaagaaaaagataggaag

SEQ ID NO: 197322 - DNA, 418 bp, Homo sapiens
cggtcattagtggaacagttagtgaaatttaaataaggtctatagatcaggcaatagtgttattgtggatttcatgattgtcctcattgttctataattattgaagatgttcacatttggccaggcacggtgtctcatgcctgtaatctcaacacattgggaagccgaagcaggtaggattgcatgttctcaggagttcaagacaagtctgcgcatagcgagatccctctctactaaaaatttaaataaaaaaaaaaaatcagccagttgtggtggcacacacctatagtcccagctactcaggaggctaaggtggaaggatcacttgagccccagaggtagagcctacagtgagccgtgtttgcgccactgcaccccaacctgagccacaaagtgagaccctgtctcaaaaaaaaaa

SEQ ID NO: 197323 - DNA, 326 bp, Homo sapiens
caatgatagacaagtactggaaagacaaccttaacaccaatctcatataacttgaattgaatgttggggtgaaaatcaccgtaacggtagtcctaggaagggaatatagccagtgtgcataaaatgaaagataaactctagtatggaaaaggaatgcattatccactcttacacgaagcccctggcatgcagattgcagcaaccagctacagctttctagcaatagaaacggaatctcaaaacagggaggaggagggaacagtagatgaaaagacttacagagaagcaaaaaaccaaagggacacaaaaagcaagagcacgctaaa

SEQ ID NO: 197324 - DNA, 433 bp, Homo sapiens
attgacaagatacttaaattttgtctatggccataccaccttgaacgtgccaatctcatctgatctcagaagatatttaaatttaaaacctatacactttgatccaacaatcccagtttttaaaatctatgacaaatacatatataggtacataggaacaaaacatgtatattgcagcactgtttgcagcagggggaaaaaacctagaacccacctgaacgtccatcaatagaagaatagatgaataatttatggaattaaggagaatgagttaaatctatgtgtagaaaccaagatagagctatgtaatatataaaaacaggaaaaaaggaatatgtctaatacactatttttatagcaaccaaataactctgtggatatgtgtttttaaaagaccaaacagaaaggtgtaagatacacaccaaactgttaa

SEQ ID NO: 197325 - DNA, 612 bp, Homo sapiens
gagacagggtctcactctgtcacccaggctggagtgcaaaggtgcaatgtcggctcactgcaacctctaccttccgggttcaagtgattctcctgactcaacctcccaagtagctgggattacaggcacatgccaccatgtccggctactttttgtatttgtagtagagacagggtttcaccctgttggccaggctggtctcaaactcctgaccccaagtgatctgcccaccttcacctcccaaagtgctggcattacagatgtgagccaccgtgcccagcctacaatgtaatcttttaatttacatttctgtgattaacttgagcagcagtactgcattgaggttgggggcacacaggtaagaggccaacctgagtttaaatactggacaatttactcagcttctttaggcctcagttttcttatctacaaaatagggattataggaccttcctcattcatctatactcaggattacataatatgttattaatcaagtagaactttcttttcatttttactggctgtcatagatggctagtgtttcgcaaaccgattctgcccttcttctccagaaggagttttccagccttccttgcagctacatgtggc

SEQ ID NO: 197326 - DNA, 451 bp, Homo sapiens
ctgcagtattataaaaattcctctataaaatttcatcttgtcagatttggatgcctctgtaaaaatcatccttaagtatattctttatctaaaaactgagctatgccttctagcttcacactttgacaaatctgatgttcttatttaaatcatgtgtgaaagtgctgggttatgccaccttctgtttcacttagtcatcatcaattcatttgtgaagcccctttggttatttgtctttagctgggagaatgtcttgtaaataagaacattagggtgcctttgagttttcggcacttttctcattctccacaaagatttaaaaagtgatcatgaaccctgaaatacttaaatgcaataattagttttcatgtccatctctctacaagctctttgaagaacagaactacctaattcaaatatcagtaatttaaaacatttcttgggacatact

SEQ ID NO: 197327 - DNA, 468 bp, Homo sapiens
ctgaacagaattgcaatctaacatgttacattttgaggtaaagaagtatgccaaggatcctcttatttgaagcataaaggagaagcctttaaatcagcctgtggtttttaggcaaagcttcctgggggagaggccattctgtgttgagttttgaaggatgtgtaagaagagttagccatttaaggaaagtagaaaggctttttcaggcaaagaagtataacaaagatgtggtggcaaaatatgaaatatgagtgcggcaggaaatgtagctggtgtatacttggcctcagaggcctttatgtgtcatgctgtaagtacttgaaagcttgtagatactggggagctaatgaaggaatcaaaacagacaatttgattttctaaatgtctttattattgtatattctattttttaaaaactttcttatttgataattttgaaataaatatcatgataaatactttttaaaa

SEQ ID NO: 197328 - DNA, 561 bp, Homo sapiens
gactgaaaatgtatctcaaaatacatacataaaagtcatgagagagaaaataagtagtagtattatataaattaaaagcaaaactagagggaaaagtgggtaaatatatctgatagccacatgaaatgcttcatagaggcagggctggactggcacaaaacagtaggaggcaaacacatacctatacttatataagatgtgacaattatccagtacctctccatcccagtctcaaactacctttccatcagcttcacattgtgcctggaatttcacttttagaaattcattaattggctcaaggcattttgtgtctagaaatcttatattaaaatgtgaaggattctggaagaagtaatatcttctctttattctcaaccattggcctcttcagcatgagttagtttattttaactttaggtattgaccttgtgtgagtattgacctcgaagaatggaccaaagaacacatttaccgtgttttgctttgtgtgtgctcttggtaaccttatgactttactggggtcttcagccttgacataaagtagaaatcaacttattt

SEQ ID NO: 197329 - DNA, 418 bp, Homo sapiens
tttattctactaacatgtgcatttggtctatcaaattgaacatatcccaaactaaacacatctccccaactctgcattttttccttatttccaattcttgttaaatgtctctgttgccattatccaaatcccttttgcctcagtttcttgtaacactcccgttttctcaccatcttctgaataggaagattgatttaaggaaagattccttggcatctctcataacttccctaccttcactgccactacttggtggctcttactgacttctgtgtctgaattgcatacactggcctgtcatggtggttcacgcctgtaatcctagcactttgggacgctgaggtgggtggatcacgtgaggtcaggagtttaagaccagcctagccaacattgtgaaaccccgactttactaaaaata

SEQ ID NO: 197330 - DNA, 125 bp, Homo sapiens
tggcttgggcccaggagtttgagaccaggcaacgtagcgagatcctatctctacaaaaatgataaaaatgtttcaaaaagaaaaaataaacaattataattgtatatgtttatgtggtacaatat

SEQ ID NO: 197331 - DNA, 491 bp, Homo sapiens
tgtttgcaaatgatgtttccccagagacagggctgagagcacagttcttattagcacagtgtaacatgaaacaactctataaacatttttgatgcactcaacactttgagtactctctcttcttaataagcacatccccactgcagtggaaagatgatagcaaaaattaagataataatagcatgatctcttaatgctttgcctcaacaacaatctaagacttgtaagcttcctctaactgcatcaatcccaaccctgtgtcaggcgcactacaaggtgctgaaaacatctagatgatgagtgggcaaagtcttatctttggaaaaggaactaagaagaactcatcattaacaattcctttgttaatgttgaaccatcttacaacacaaatggcgttgaataccaaagaagtccttgtgaggtgggttgctaagtgtgaccatagcttatcctgtagggaacttaggaaaactaaataattctgaatacct

SEQ ID NO: 197332 - DNA, 447 bp, Homo sapiens
gccaccacactcatggttacactgcgtactgtgtcatgactaatcactggcatcgccaacagttccatttcaagcatcccacgctgtggtcatcacttcttctctctctagtcactccccttagcaccatcactccaaattggtaagttttcagcgactatcatcccccatttcattacttccctccttgaccagcttagcttctatggttccttctcataattattctcttgcccccatttccaaatcccattatgtactctcccagcactgtactactcttttgagaattaaaaagaaacaaattgcaactctagtaattttttcttactcttaacctgtgcctaaaaaaactaaacatgactggagaacaaaagaccaccaagttgacctgtgttcctttgtatttatattaatatggctcacatggttttcatcactgtccag

SEQ ID NO: 197333 - DNA, 642 bp, Homo sapiens
  misc_feature (58)..(58): n is a, c, g, or t
  misc_feature (82)..(82): n is a, c, g, or t
  misc_feature (97)..(97): n is a, c, g, or t
aaatcgcggtcttaaccaaaaataaaaaaaaggaagtacctgactcagaattccaacnaacattgtcaaaaactatgaatgnaaataaaaactgagnacaatcctattgaatataatcagaatgccaggatgattcaacattagaaatttgttaatgttacataacaagtcaagcagtcaaaatagcatcacttcaaacttcacagggggaaaggggaaagaaggcagaactaaataaaaagactacaaaacctgaaagatgaaaaagggtgaattagggagaaaacactctaaggtggatcttattgttcatggacaaaaagaaagaacatctttagaatttattaagtagttgtttttaggctgggcacggtggctcacgcctgtaatcccagaactttgggaggccgaggtgggtagattgtttgagctcaggagttccagaccagcctgcgaaataaggcgagaccctgtctcactttgtatgctggtgccagccgggggtgcccctggtaggtgctccctggggtgtctgcttcagggcttctgcgaaggtgcaggtcagggctcctccagctgggaaacttggaatagttggcagctgctttgaatgttggttccttcttctctgatgaccgtgct

SEQ ID NO: 197334 - DNA, 310 bp, Homo sapiens
tgagctgactcttgaggatccccagtcactgtgagacctcgtggctcacgcctgtaatcccagaactttgggaggccgaggtgggtagattgtttgagctcaggagttccagaccagcctgcgaaataaggcgagaccctgtctcactttgtatgctggtgccagccgggggtgcccctggtaggtgctccctggggtgtctgcttcagggcttctgcgaaggtgcaggtcagggctcctccagctgggaaacttggaatagttggcagctgctttgaatgttggttccttcttctctgatgaccgtgct

SEQ ID NO: 197335 - DNA, 252 bp, Homo sapiens
cagaggaagcatttcttttagaagatgaggtgttagcactctgtattctgaggcacgttgtaatagtcattgtcagaggtgccagcagatgaaaataccagtcactataagagatttctgaagaagtcagaaaaaaaagtcaattttgtcttctcaaaaaatagaaagtgggtcaggaaattctgagaaaagacagcatttatgcatagggatttcgcattctgattacggagccctactacatgataataa

SEQ ID NO: 197336 - DNA, 996 bp, Homo sapiens
gatctcggctcactgcaagctctgcctcctgggttcacgccattctcctgcctcagcctcccaagtagctgggactacaggcgcccgccacgacgcccggctaatttttgtatttttagtagagacggggtttcaccgtgttagccaggatggtcttgatcgcctgaccttgtgatctgcccgcctcggcctcccaaagtgctgggattacaggcatgagccaccgtgcccagcctacacttaccagttttttaatgtataaagcagtttcatttggctcatcaatcttatttgtaccatatttttttcttaaaaacaatttttccctttaaaagctggtatagtgaaattctaattatttagtataatattattaataatttatcttgtggcatataaaaagagtatatagttttgagagtatagagtagcttcacttaaagatttagtgttagaaaacaaagtggaaatacagtatccttgatttttgcagtttgaatatcttagaagattattgctttcttttcagaaatgaaggaaggaaatgctctttgacagattgtctcttctaaataatcatcagaaagcagtttgtccaatcattagacaagccaagataaagagcatttagtcagatgacttaaatactagttttgaatctactgctgcatgtctttgtacgattctgttcaatctcatagtttctttggtgtgaatgatatggtcgttatattgagagtgcttttattctttggagaaatatattgaaatattccaagtgaagtatcatgttgggctcaggagtgggttcagaaaaaaaagtgtgtggatgtctggatactcggcgtgtgcatgcacacgccgaatctccatacacccggctaattttgtatttttagtagaaacggggtttctccgtgttggtcaggctggtcttgaactcatgacctcaggtgatctgcctgcctcggcctcccaaagtgctgggattacagg

SEQ ID NO: 197337 - DNA, 213 bp, Homo sapiens
ctgttctttcaccccccatgagcccccacaagcacagccctgaagtgttcacccttgtcctcaactgaccctcccccatgtttttaaatctttaatctcctaaatccagtgttcacccggaaacctttcactctctccaagccctcctcaacaggttcctcccctcaaaatatccttcctcacccacagtaccccttgtaagtgcagctcacc

SEQ ID NO: 197338 - DNA, 231 bp, Homo sapiens
tttggcctacgagattactgagccacactaaggctgtggatgaagctgttttccactatggtctgatcctataccatctgtaaggtacactgctaaatgcaagagagaaaaataaaaatgagataacagaagaggaaaacatattagatgggagcagccaagacagcttggatagtaaatcctacccctgccacttgctaaccttggggtgaaaagtcacctagcctcgct

SEQ ID NO: 197339 - DNA, 757 bp, Homo sapiens
tacatgaagaaagagtatttaaacatgttaatgataggcaacaaactctatcagaatatcaagacactggtaatactggtgattcttctttgaaaggctacatgaataatggtgggatatcagttatcagacagaatacaagggctggatctatttgtcaagaacttgaaagtactgacagatgtaaaacaattggagtaggaatttccaataatggtaagaatgatttaaaggaggtaggatatcaagaaatgaaaggaaatcagaagaatgccaacggaataaacaaattgtatgagcaaaagaaatatgttggtacagataattgtaaaaaggaggaatattctaaatctcgacatgtatatttgggaagagatcaagagaatatggggcatttcaataaatgtaaacatcttcccgatttagggcattcagatcatttaaagaaagctgaaaaatgtgttaaaagtaaagcatccaaagggaatgagtgttcaggaaatgaatgttctttaaaagatattttgacaagcaataggcatatgacacagaaatctattataaaagaagacatacatccagcaccatcaactaattctaaagataagttatctgggaaaattgaagaacaaataaattcaacgaaatactgtaaagtgaacgaagacataaaaccaaagaaaactgaggccatttctgccaagaaaggaacagcaaagagtaaagatgaaaaatattctaagataataccagaaaa

SEQ ID NO: 197340 - DNA, 368 bp, Homo sapiens
aaccactctattgtccatctggagtgcagtggcgtgatcatggatcactacagccttgacctcctgggctcaagcagtcctcccacctcaccctcctgagtagctgggactacagtcgtgtgccaccattcccagataatttttgtagagacagtgttttgctagttttgcccagactggtctcagactcctgagctgagcacaagtgatctgcccacctctaccttcctgtgctgggattacaggcataagccatggagcccagccctccaacaccatttcctttttttttttttttttccagatgcagtcttgctttgttgcctaggctggaatgcaggggcacgatctcggctcactgcaacctc

SEQ ID NO: 197341 - DNA, 313 bp, Homo sapiens
gcatagattgctagtagtagatttactgggtctgatagtatttgtgcattttattttattttattttgtagaggcggggtcttactatgttgcccaggctggacttgaactcctgggcttaagcaaacctcccacttcagcctaccaagtagttggaactgtaggcacgtgcaccacgcccagctagcattttaaattttaataaattctgccaaaataccatccaaaaaaaggctttgtgaaattacactgtaatgaatagtatgggagtgatacccttgccaactttttaaaaatttaaattaatccaatg

SEQ ID NO: 197342 - DNA, 267 bp, Homo sapiens
atgaaagggaggtggggcctgacagagagcagcacttatgtgtttgtcagatgaggggatttccagttgaattggcctgcagtggcctaaagacactagcctggttagcgatgacctgcatttctctcatagagcacctcccttttcatcgtatccactagctctctaatcaccatgaccatcatgatgaattttggcgaatcgatgaaagggtagttgcttttttcaaatacttttttgaaacacacatacatttttgtatgtatg

SEQ ID NO: 197343 - DNA, 466 bp, Homo sapiens
gtgtgctggtattatggccaaagagtaataccgtttcctcttaggatttaagagaactatattcaagaaaggtcaccattgtatgagattttttttaaacagcttattaaagtgttaggttcatgaaaagtagcgtacataatttatccaaaattaataaacttttatgcaattgtaagtcttcagttgaaacaactacatgggtactaacttaagtgtttccacacattcaccatccttgtttgaccaaaagtgaatcagaagtaacggctcaccttgaagatattggaagaatttgtaagtactgttaagatacttgttgaaaataagtgtaaatatactttgtttaaataaacaaacgagcttatatcatttaattgtagcctcgagacaattctaagacagaagtagaaaggatatcatcagtgttgcagggctcatcaggctcaggaatgctgattttcat

SEQ ID NO: 197344 - DNA, 528 bp, Homo sapiens
ctggcttatcatcttcaatctcaaagaacttccaaagttaactaattgttgactttttagatcaagtgcaagaataaagaactgaaacaagtgtgatgtatggagaaatgtattagtatgtctgaaaaagaggaaaatcacaggtttccagtgttttgaggtcacaaaacttaagcatttctacttcaatctgccaaagagataaccaacattgaggcagagaatgtcatcatgtacactacagatggtctgaaaacacacaaagcttgggtcagagaatgaggttgctgcaatacatattctagaactgcttctcaagctgataaaatatatctggagagaccaccagccaaagttgtttctcttatttgatactcaaaatgaatacactggaaacttagtacccaaccttaattgataacaaaaataaatggtagtgaggaaagaaggctgactaaataaagaaaaaagacacccatttgtgggaaatactcagttgccagccttcatttgatttctccacttttc

SEQ ID NO: 197345 - DNA, 130 bp, Homo sapiens
tagatggtttcagtgcagcgtggaaacctgcagcagtagaagtgacaaaaggtatgttggtagcacggaagatgcagtgctagttccgtgtggcaaagggtgaaggtgtcttagaggactccttggtcaa

SEQ ID NO: 197346 - DNA, 396 bp, Homo sapiens
catatccatcttccccctcaggaaccctgcccaagaacaaacagctcagctttttgtccaccgctgtagtcccagctgctggaacaaatactgggaaatgcttcattatatcagtttggtacatcagatttaggtacttcccttttttcacataaaacttccttgacttataaacacctagctgagcatggtggctcatgactgtaattccagcactttgggaggccaaggcgggtggatcacttgaacccgggaggcggaggttgcagtgagctgaaaccatgccattgcacttcacctgggcaacaagagcggaagtccatctcaaaaaaaaataaataaataactgccttttctgtactatcacccttaacaacccatctagatgggtaccga

SEQ ID NO: 197347 - DNA, 476 bp, Homo sapiens
tctgcccttcaaacccagctctgccccaagctggctgcataacttcaggtccatccattatgtaccacatgggctatgagtgatatgttcattaatttgattgtgatcattgttacacaatgtatacgtacatccagtcatcacactggacactttccatattacagtctttgtcaaataagtatttttaaatgaaaaaaaatgaatttaaataaataactctgtgtcttggtgtatgagtttcctagagttactatcaaaaagaatcacaaggcttatgtctcaggaaacaggaatatactctctcaaagttctgaagtctagaagtccaaaatcatgatgttggccatgctccctctgagggttcttggtgaggatactttcctgtctcttctaaattcagggagttgccagtaatccttggcattccctttttgtagctgcatcatgccaaccttccatcatcagatggccgt

SEQ ID NO: 197348 - DNA, 524 bp, Homo sapiens
ctgcaaagactggagcctgaaccactcaccaacttgtctcctttgggttttccagtgtctgtctctgtttaaattgtgttctttttctttctttctttctttgcctagcctagtcccttttgatgtataactttttaaagttttaaaattttagatttggcatctccctagatgctatttcctgaatcaaagctttgtctctttgcaaaatccacaggctcctttctctctctttctctctcgttgttttgttgttgttgttgttgtttaaagatgaggtctcactctgtcacccaggctagagtgcagtggtgtgatcatagctcactatagcctccaacttctgggcttaagtaatcctcccacctcagtctcccaattacctcattcattttgagattcctacatttctgggacaccacggtttggcccaacaactcaagccccactactcaaagatgccaaggaggaggtggaagtaggcaggtgaatcaaacttttaaaagatgatactatcagtgtca

SEQ ID NO: 197349 - DNA, 326 bp, Homo sapiens
ccaaggggtggctcgagtgactgacgggccttgaacgctcccaggacccacatctggagagggaggtgggggtggggtgctgaagtcattcttggggcccctgggggcgggcatggacctgggtaaggccagagaaattgacacctcgtgacatccctggaagagaagtacgttcagtgtcactccagagctgaaaccgccttctggctggtccctcctcacctacatacttttctaatttgtctggagcaggccgggcatctgtattatctggttatttaaatatctggttatttaaaagctctccattaaattcacatacacga

SEQ ID NO: 197350 - DNA, 636 bp, Homo sapiens
tggcaaatcgaaggtctgtggaaaccccatgatgagactatcagcaccatttttctggtttgttttttttttttcctgcttggcctgcactttttgtttctttttattattattattatactttaagttctaggatacatgtgcagaacgtgcaggtttcttacacaggtatacacgtgacatggtggtttgctgtacccatcaacccgttatctacattaggtatttctcctaatgctatccctcccctagcccccactccccgacaggccccagtgtgtgatgttcccctcactgtgtccatgtgttctcattgttcaactcccacttaggagtgagaacatgcggcagcaccatttttctaacagcatgtggtcgcctcatgtctgtgttttggtaattcttataacatttcaaacttttcattattttcattctatctgttatgacgatctgtgacctctgatgttactattgtgattgttttcgggtgccataaactgtgcctatataaggtgacggagctaacggataaatgttgtgtgttctaactgttcactgaccagctattctcttatctctctccctctcaggcctccctatttgccgagacacaatattgaaatttggccaatt

SEQ ID NO: 197351 - DNA, 2668 bp, Homo sapiens
cccgggttcacgccattctcctgcctcagcctcccgagtagctggaactacaggcgcccgccatgatgcccggctgattttctgtgttttcagtagagacggggtttcactgtgttagccaggaaagtcttgatctcctgacctcgtgatcctgacctcggcctcccaaagtgctgggattacaggcgcgagccaccgcgcccgacagcagttatgaagttctaaaagcaagtcttaatcaggaagtgtccttgatcaccaacggctcgcccaggcatgctggctctcttccacttccaccttccaccatgggatgacgcagtaagaaggccatcagtagatgccagtccctcaaccttgaactttccagacgcagaactttatgcctccattttcctctgctgcatggccccaggagagattttaattagctttctaaccttggtccagattgcacatgcaaatggtagaggatgcaacacccccgcttgtggagctgccgcttgtgtctggcatgaaaattcacaagaagagaggaaatactgaggagaaaatggcagattgtgtttgctgaatttgattgacgaagaagtcaccatgaaaatcacagtgaaccatttggaaagcaaactgccaaaaaataatagttagtcatgctctcaggctggttgttttggctgttgtgggtttcttgcatttccagatgattgcaaagagctgtttctcaatttctgcaacaagtgccagctgaaattttggtaccagtttcattaaatatgtagaacaatttgagcctgagtgagttctgtggagcccatactacctgcgattcaagccagcaaccttggaatctccctgaacaatttctatggtgtccaatcacatttgcaatcactccccacactcagtaggttctgcccccacatcatttcttttctctatcctctttcccagctttataatatgacttagttcaagccctaatcactggattattcaaagtcccttaacaggttaattcctactgtgatcaacactttaaaggaaggcaatagggccaggcatggtggctcacggctgtaatcccagcactttgggaggctgaggcgagtggatcacaaggtcgggagtttgagaccagcctgactaacacagtgaaaccccgactctactaaaaatacaaaaaattagccaggtgtggtcgtgggtacctgtagtcccagctactagggaggctgaggcaggagaatggcgtgaacccgagaggcggagcttgcagtgagccaagattacgccactgcactccagcctgggtgacggagcgagactccatctcaaaaaaaataaaaaataaataaaacagaaaggcaatggctatcccaaattgctgaagcctttgctaaaagcacagacagaaaacaacaatatggtgatgtttgtgttaaacaaatgttattgattctaggacacaggtcagatggcaaatagtcaaactcaaatgttgatcccaggggtggctgtatcatcactaaggccaaatcacaactttgactggtctcatgggaacacagatcttgggtttggaaagagcacaggcctggccatgggaatggacacagggtaattttaagatgactagaggttcctcaaaccctaaaagtaccactgaaccttgtttaaagctaaaatggctcctaaatgatagacacgtttctcagttatctctgcaaactgaagatcctatcagcctgttcagggtctcacaggcctctgggtttgtacatgatgtccctacagtggcgatggggactgatgagagccaccgttcccattggaggagggcaagctgccactgagtgtcagctgctggagtaaacatccaatcacatgtgtacctgtatcctatggatattggcttcccctcatacaacttgttgttcctttgttttccattcctgactatatttgaatctttcttggatttccaggaaacatctgactgctttcctatgccacttcatacccaagagaagctcagggagatcctttaaggtcctttatgcccattatgatagtacatgaataggtaaatgtaccactgctccctgtacttcttggataatgcacaaatagtaagacagtctcgcaaccagcagcctagacagcccaaatatgtgaaaccaaaacagcttgatcttccagacctgttctgactccttgagtcttaaatctccaagcctcttgaatgtttcacccacagccttccctttgggatctggcatgggacaggaagggcagagaagggcctggggcttttcctcagggatccaccacagtctaggccagtgggtggcaaactttttctgcaaaggatcagctgggagatagtttcaactttgtagtctcgtcgcagctactctactcgactctgccactggagtgtgaatgcagtcatgaataaaagaatgaaagttttccagtgaaactttagtcacaaaaacagtctgcaggctgtgtctggcccgtgggctttggtttgctggcctgcgggctcctagaaggctctgactttatccctctatgagggaaagcaggttttggggtattctcccaaatctttataccttatgtctgtgtctctttttaaattaaaagtaaaatttaggcc

SEQ ID NO: 197352 - DNA, 668 bp, Homo sapiens
cccgggttcacgccattctcctgcctcagcctcccgagtagctggaactacaggcgcccgccatgatgcccggctgattttctgtgttttcagtagagacggggtttcactgtgttagccaggaaagtcttgatctcctgacctcgtgatcctgacctcggcctcccaaagtgctgggattacaggcgcgagccaccgcgcccgacagcagttatgaagttctaaaagcaagtcttaatcaggaagtgtccttgatcaccaacggctcgcccaggcatgctggctctcttccacttccaccttccaccatgggatgacgcagtaagaaggccatcagtagatgccagtccctcaaccttgaactttccagacgcagaactaaaattcacaagaagagaggaaatactgaggagaaaatggcagattgtgtttgctgaatttgattgacgaagaagtcaccatgaaaatcacagtgaaccatttggaaagcaaactgccaaaaaataatagttagtcatgctctcaggctggtaattgaaagttttgttcaaatcgtacttaatattcaataattgtttaaccataccactgcttatcttgggaatgctgatactatggagacaataagataaggtggctgctgaaaatcagatttagacactactttg

SEQ ID NO: 197353 - DNA, 1119 bp, Homo sapiens
cccgggttcacgccattctcctgcctcagcctcccgagtagctggaactacaggcgcccgccatgatgcccggctgattttctgtgttttcagtagagacggggtttcactgtgttagccaggaaagtcttgatctcctgacctcgtgatcctgacctcggcctcccaaagtgctgggattacaggcgcgagccaccgcgcccgacagcagttatgaagttctaaaagcaagtcttaatcaggaagtgtccttgatcaccaacggctcgcccaggcatgctggctctcttccacttccaccttccaccatgggatgacgcagtaagaaggccatcagtagatgccagtccctcaaccttgaactttccagacgcagaactttatgcctccattttcctctgctgcatggccccaggagagattttaattagctttctaaccttggtccagattgcacatgcaaatggtagaggatgcaacacccccgcttgtggagctgccgcttgtgtctggcatggatgccccttctagatgttcatggctcactccctgccatgttgtcaggtatttgagctctctgttcccactcagagtagatgagcagaagaggaaatgagggccttcccagagcaactcccccagatgaacagagccaggctgcctggattcaatgttatcttcatttcttagctgtatcatcacgagttgtttaattcctcagcacttaattttcttgacctgcaaaaatatggatcataatgatcattaactaataagtttgccatgaggattaactgtatattaagggctgataaaattatatgttacaaaaaaattcacaagaagagaggaaatactgaggagaaaatggcagattgtgtttgctgaatttgattgacgaagaagtcaccatgaaaatcacagtgaaccatttggaaagcaaactgccaaaaaataatagttagtcatgctctcaggctggtaattgaaagttttgttcaaatcgtacttaatattcaataattgtttaaccataccactgcttatcttgggaatgctgatactatggagacaataagataaggtggctgctgaaaatcagatttagacactactttg

SEQ ID NO: 197354 - DNA, 849 bp, Homo sapiens
ctagtagattaaaactgaaccttatccatgaaatgtctgggttcttgataaccaagcttatctaaggctccgtgtgctaacggcattacagttaagtgtgtcatatggcaggggcaggggaccaagatggccaactagaaatagcggcaatcagaggctcccatcgaaaagagccaaaataagtatgtgaatctttcaccagcaaccaaggtatccagcttctctcatcagaactgactaggaagctggcatgctccacagagagaaaggaggtgcagtgtggtgtagcagcccacctgagagccacacgagcaggggagcctccaccacccagccaagggaggtggtgagtgagcatgctacccaggctgggaaaccgtgcttttaccacagaaatgtgcaacacatgaagtggaagatcccactcacaaacccatgccacggagccatgcagattatcaacagcctctcagctggaataggcttaagcctaccaatctcccagggggaggggcgaccagcaccacagctgcagctgcctgctgtctcagccatctgagcttcttggggaaggggcagcattcagcactgggactcacaacttcctaacacactaaggtccctgggcaggagaagggtggcattcatctctatagctccaggctgtgcttttcccctgctggaaccagggaggctggacagcttggtcccaagatgtgtcccccacagccaacacaccagctgtggaagactgcagcagagtgctcttcaggcctgaccccgactcattattcctcactgggcggggcttccatgcaagaactcccgtaactccagccagaggctcag

SEQ ID NO: 197355 - DNA, 321 bp, Homo sapiens
atactgatatgcacagtgaagtccaagctgtcgaggtctcagatggaaagaatgaacttattggcaactggagtaaatgacatgtttgttatcccttagcaaagaagttggctgtattatgtccatgctctagatatctgtgaaagtttgaacttgagagtgatgatctcgtgtgtctgacggaatgaatttctaagcagcaaaatgttcaagacgttgtgtggccacttctaacaacctactctctgatgcaggagcaaagaaataagatggaatatttattattttattttattgtactttaagttctgagatacatgt

SEQ ID NO: 197356 - DNA, 504 bp, Homo sapiens
gctgggtatggtggcacgtgcagtgaaccacagtcatgccactgcactccagcctgggcgacacagtgaggccctgtctcaaaaaaaataaaatgacaaacatttgcatcaattgttttatgcttcatgggttcattaaatattcaacgctccttgttcagtttctacttatgtttattggcacctatcacttcttaatctcaaaggattttgattggcctgtttatgtctcgtgcttagtaatagccaacatgatacagtatttgtactatggtacgctaagctaaagagtgtatcattatcgctgtacaataatctgtagaaaactctattccttgcaaacttgaggcagcacttttagcgttgtataaatgcatgcagaaataataccatattcagaattctttcagaattagagtactcatgctttagaaaatactgggtttcttatctcttaatgtgtgtaaaataaacttggaatgtccaataaaaaaaaaaaacaaa

SEQ ID NO: 197357 - DNA, 99 bp, Homo sapiens
cctaatctgtcctgttatacagtatgtgatataaattaaataaattgtgttcctttggtagttaatgtaagtttggttgaataaaattttcccatgata

SEQ ID NO: 197358 - DNA, 214 bp, Homo sapiens
gtttggctgtctggtgagagctgcatttggaggaatgctgcgtccttacatagacggtgggaggtagaaggtggaagggcaggtgagccccgtgctgggcgaagcctcttttatgagggccttaatcccactcatgaggaaggagaccccctcgcctaatcacctatcacaggccccatctgttaatcctctcacattggcagcacctgaattt

SEQ ID NO: 197359 - DNA, 889 bp, Homo sapiens
gttcaagaccagcctggccaacatggtgaaacccttgtctgttaaaaatacaaaaattagctgggtgtcttggcgcacatctgtaatccgagctaccctggaggctgaggcaggagaattgcttgaatccaggaggcggaggttgcagtgagccaagatcgtgccactgcactccagcctgaacaacagagcaagaatccatctcaaaaaacaaacaaacttgattgctaaaaaatgctaatgattatctaaaccttcagtgagtcataatctttttgctcacgcctcaaggttgatggctgctgactgatgacagccatggttgttgaaggttggggtggctatggcaatttcttaagacaacagtgttcaacttttctgttttcttgcctgtgctttggatgtcctgtataagagtccatggccaaatctgaggtcatgatgattttctcatgttttcttttaagaattttatagaattagccgttaaatttagctctttaactcaaatgttcaatttgagtatgggtaaggattaaagacacatgggtttatttctggattctcaattctattctacttgtctgtatgtctgtctttgatactaccacactgtcttgattaccaacttcctttagagtaagttttaaaattggaacatgtgagtcgtccaactttattgtaccttttcaagatttttttttgactcttttgggtcccttgcaattccatatgaattttaaaatcagcttgataatttctacaaagaagccagctcaacttataatttctacaaagacgccagctcaacttctgatagggattgtgttaaagctgtagataaatttggggagtatttccattaaatcttccaatccatgaacagtgg

SEQ ID NO: 197360 - DNA, 293 bp, Homo sapiens
aagtttcagatgagtcttgacatcgggtaggataagtctctcaccctattctttttcagaaatatcctcactattcttggtgccatactcttttatgtaaaactgataattaatttaccaaattctatgaaaacccctcctgggcttttcatgggatttgcacttaatctataaatgcaacttggagagatcaaaatctctatgttactaaatcttcctgtgcgtggacatagtatatttttatatttctttaggcctctgttaaaatcatttcataaagttttaaatttttc

SEQ ID NO: 197361 - DNA, 247 bp, Homo sapiens
tcctcagactggggacagggagtgaaaggaggattccctggaagacggcatatgaactgaagttttgaagaactggcagaatttactcaaagaaaaatggctgtcaaagggcactctgggctaagaagacagcatgtgtgagggaaaggagatatgaaagaaagtggcactgccaatgttactgggagcagggtaggtagggagcaggaagaaacgtggtggtgaggtagagggggcagtgaggcag

SEQ ID NO: 197362 - DNA, 586 bp, Homo sapiens
aaaataattgattagttgcctatatttaagaattaggttattccaattataaatgtggattcctggctttatttgaaaaaccaaaagatcgaattatgctgatcctgcattctcccatgggaacaactgatcctgtgaacaggtgaatggtgacccctccatggacagggccgaaggtccccagctcagcacagctcctacttgatcctttcatttatgggtgatctcttggtccctcagtcatctgagtccaggacttcaggtttagtgagtctcaggtttagtgaatgtcttagtttgggttaccccagaccctgagacaaaaagattccagtgaaaatgattttttgggaagtgatttcaggaaacagaggcaggggagcaggggaattagagaagggagggcagctaatacagggtgtggagcaaacgagtaaccactgtaaggaactggtaactcccactgggatctgggaaaccgcatagagaacatgcctcagcattttcctatctgagacaatgttaaactttacccaagccctgtgatcctggaaaacagtgaaggttaggagtcccccagcccttc

SEQ ID NO: 197363 - DNA, 703 bp, Homo sapiens
cacagtgttgagtgaaaaaaattacagatacttaaagagtcatgaagattaaaaaaaataattttatgtatgttctagacaccagtctctgtggtcaaagtacaaacatggtctggggctatataccaagttcagatcggtggtttcctatggggagcaagagaagagaatggggtctgggagaggtgtgtcggggccttcagcgtatatttgtaacttgttatttctaaaactatgaagcaaatgtaccaaaatgtcagcactggttaaatctgggtagtgggtcagggattttgtcttcttattctctgtatttatatacatatttaaaatatgtgtaaatttttaaaaatacacgtgggtctggtgtttgtagagagggcaggactaaagctatagcattggctcaccttcacagcaggctcaggtgaatcagtgggctggggagtttcacctgggcctcggcactggccactggcacttcacacagaggcgagcaagggccttgggaagcacttatttttcacaaagcaggtagagaaagagaaggaaaacgatgggaataggaggtttcagaaaggagcagagccaggagagatgtgtcataaggaggtccaggaaagaaaaataatttctaattatggggccggtcatggtggctcatgcctgtaatcctggcactttgggaggccaaggtgagtgg

SEQ ID NO: 197364 - DNA, 501 bp, Homo sapiens
tcagagtaggcattctgcaacaagatgccaaaatcacatttatgatgcagaagtaatgttgaaggtcatggtctgcaaaattatatttggagatggaagaaagatcacaatttcaaaaggatgaggtaaaagagtcaaatttagttacaactgtctctataattcaacaataagtgagtgaaaccagctcaaggtgggagcttcaagtagcaaaacggaagccaattgtgtaattctagttggtatgcacttaatttagaaaaatttctgtggtcagccattccctaatacaaaactttgaaactgtaggccctaaagactgtgctcactcaatttaaaaggcatatcctttggtttctatatctcataggcttctgttccccttgaacaatctgtgtttcatgtatatatacacacacacaaaattgaaaagctgtatcagatattagaaaataccacatcaattgttgctttggccgaatgaaaggcctgaaaaatttg

SEQ ID NO: 197365 - DNA, 112 bp, Homo sapiens
agaaagaacacagatttggagtaaaaagagaactgggttccaattccatctctgtactctaatgagttgagaggttcttgggtgagtcacttaacctctttgaattgcagct

SEQ ID NO: 197366 - DNA, 556 bp, Homo sapiens
gtgggtgttttccgtttgcagtcttccaagccatttctgacataagaattcagctcctgtcaaggcatgtgcagtaaaggtacccttccaggtgcctagacaaatccttagtgctgtctatttgtatttagaatcctacttttttttatatttacttttttttatatatcttactttttttttgtatttagaatcctactttttttcttctttgtccgtcttcttgttattgcccttagctgaccagagactccgtgccatccagcccctttcctctcttgcctctctctaacttcttttgtgctgcagatttcaactaaattaagttctaattaaaataattttcaccttaaggtttgaatgctcaaccagcttgacactttcaaagataatttgcttttaaaattgtttatcaaaataaatctctaaataggttatgagtcattgttattaatgagattgtgtgtatcctcgaactgttttggggcagagaaaaaatgttgagaatctctcttctaaagccatgcttttgaagaaacagtcttaagagtttttc

SEQ ID NO: 197367 - DNA, 400 bp, Homo sapiens
aaatgttgcttattatcattgtggaattttataaggcttctgtgtaaatgtccttaactcatttttggtgatattctgttctagattgttctctcagcttctcctttctctcaccattctccttttgctccaagctcatgagaggttcctcaggtggttcttttttttttttaagctcaacatttaaacttcagtttcccacattatcaagcccgcattcctacataaaacccccaaaagggtaaaggattaataagttgaatatgttggtaccatttggttttggtccagaaattactggagactcatggctattctcctacaggagataaaggagaccaacaaaaatcagtttgcactgcctagaatattgtctgggaaatagtatgcagttaataag

SEQ ID NO: 197368 - DNA, 512 bp, Homo sapiens
tggtgcctggagttaaaaagtgatgggtaacatggtaagaaatggcatcagaggtgggaactttgtctcagaagttgtagtgagctgagtgatgttccccccataatatatgttcactcagaacctgtgaatgtgaccttatttggaaaacggtctttgcagaggatctcaagatgagctcattctggattagaccccaaatccaatcacacgtgtctttataggagaagaaaaacagacaagacacacagaggagaagatgatatgaagacggaggtggagattgaaatgatgcatctacaagacaaggaatgccaagaattgacagcaggcagcagaagccaggagagatgcatgaaacagattcttctttgaatcctccagaaggaatcaaccttggtgacatcttgattttggatttctggtttccaggactattagaaaataaatttccattgttttaggtcattatatttgctgtaatttattacagcagcctcaggaaactaaca

SEQ ID NO: 197369 - DNA, 706 bp, Homo sapiens
ggacagaatgtcacactcagggataacacaaccgtaaccaaggaggtgaaggggagaaagccttgtggtaccagagagccaattgtgaagcataaatatgataaactcagatgccttcaagaacaagttgggagaatctggaatcccaacatttatggctgagggccaaagacagagaaatgctatttcattattatttttatggccttttttctatctttatttttttctggagaaatgctccactgctatatttttaaaaatttagatgtaggccaggcgtggtggctcacacctataattccagtgcattgggaggttgaggcaggaggatgacttgaagtcaagagattgagaccagcctgggcaacatagtgagactctgtctctacaaaaataaaaataaaaaattagactggcatagtgctgtgttcctgtaggcctagctactcaagaggttgaggcgggaggattgcttgagcccgggagttggaggatgcagtgaattatgattgcacaactgcactccagcctggctgacagagtgagaccatttcacacacacacacacacacacaaaatctggatatataattatcttcatagactcaacttaaatagaaaagtggataatgtcacttcccttttagccaaatcaggagagactcataataaacagttaatgtatttcctagaaattttacag

SEQ ID NO: 197370 - DNA, 125 bp, Homo sapiens
gaaaaagttcaactcaggcattcacagccattcaaaatgtggtcataattcaccccactcatcaccaacacacaggagccactattcttatcagaatagtgaagtttaaagccattctctctacc

SEQ ID NO: 197371 - DNA, 346 bp, Homo sapiens
gagatccaggcagcagcggcatcacctttcaatgacctaacgtaactcctccttttcatgaggactggcaaggtcacattgtaagaagagcaagtgggatgggagatgacactgtcgcatttgaaaatgcaatttgtcacatcaggtcatgagcaggtcacctcctggtccatctgcagaaggggcccaggggattcagttctgccttctaggaaggccagtgttgggatcttagagccctgctgggaaaaaggccaggggagagttgggaacttggtcttcacaagcactcccagcttcccctctccggggtcatttaccaagtgctcagaggaattgtcgacgc

SEQ ID NO: 197372 - DNA, 354 bp, Homo sapiens
tgttgttcccagtgagcgtgtgtaccagatgtatttcaggaagttgaaagaaatggtcatgtgtgatggctcatgcccataatcccagcacagtgaggctgaggtgagaggatcatttgaggccaggaatttgagaccagtctgggcagcaaaacaagaccccatctttacaaaccataaaaaaattagctgggcatggtggcgtgtgccagtagttctagctactttgggggctgaggcgggaggatggcttaagtccagagtttgaggcggcattgagttatgatggcaccactgcactccagcctgagcgacagagaccctatctctgaaagaaattgtatttttaaaaaa

SEQ ID NO: 197373 - DNA, 1073 bp, Homo sapiens
gctaaacaatggcagggcagagagcacagcgcggattcaccccactggtttaatactctgtttcaaaccatcgatgaatgcaggctcttgttgacgtgggcattactctgcccctcaccgggatgttactgccattctgttgctaaatcaccaggatgaggttaggaaccttctccaggcctcaggctcctgctctgcaaactgaaggaactagaggtgtggttaaggtgcctgaacccccttttaggagaaatcccagcagaagatgcctaagcaagccttgcaggaagtcatctaggccaccttcaagtcagtgccaaccgcagaatctttagatcccccaaaagagcacctgtccctttgtggtgcttctgacagagaaccccaagcagccctagacctccctcaacctgactcaggggtgcccaccactccccatcctccctgacacacataatcctggctgaggcagcccaaatagcagcttccccggattactcaccgtggctctgtgagaagaatgcctctcccaggcagcgtccgcagttgtgaccacagatgggagactagcctaattggacttaccagcagctcaccttggcttcctcaaggcccagcagcaggacagggcctttctctgagcagaacttgaatgataaaagaagcaggtgaagctgatccagcctcagacagacctccagtgggcccttgagggtgtgagaggcagctctgcgggcccaccctagaactgcgtgtggacagctagaaagcctagcctttctgacattgctggcctaagaggtttcatctttagggtttttttccttctcaggctgctagcttccatctcacttaatacagaaggatggtctcaatttaagcatctgaaacaaattacttagcaaaaaccattttcgttgtatccaaacccagtgtcttcagtttgagctctctgaaattccaaacacatgttcaaaccaccaggaaagagggaaagagagactgagaagagggggactgaagcagggaagtcactatgagattctccccaaaatcccgatgttcagcctctg

SEQ ID NO: 197374 - DNA, 126 bp, Homo sapiens
caaaaaaacactttaactaacaaagggctctatatagaacagggcagatggtaggcattatgcttctcccacattctttaacaagctctaaatttttttcctgaagccctaaattttataattatg

SEQ ID NO: 197375 - DNA, 222 bp, Homo sapiens
gaagaagaaataaaaaggcatataaacacagtgaaaaatattcaattagccctctcctcaaaaaaagataagaacaaagaacagaagaggaaatgagccaggtttcagttacttggtaggctgaggcaggaggatcacctgagcaaaggagtttgaggctgcagtgagctatgattgcacctctgcaccccagcctgggtgacagggtgagaacccatcgct

SEQ ID NO: 197376 - DNA, 193 bp, Homo sapiens
cgctgtgtgccgagacccccaacaatgatgactgcggagagggaggcacctgggggaggatcattagggagaggtagaaagcagggaggcctccaggattctttcccagtgcccctggttcccagagctgatgatgcctccagggtgattggcagctctttgtttcagccccccctcacccgcctgctggccc

SEQ ID NO: 197377 - DNA, 580 bp, Homo sapiens
cttgtattttcattttcatttttttttgagacagagtctcactctgttgtcgaggatagagtgcagtggtgcaatctaggcttactgcaacctctgcctcctgggttcaagcaattcttctgcctaagcctccccagtagctgggattacagatgcccaccactacacccggctaatttttttgtatttttagtagacacaaggcttcaccatgttggccaggctggttttgaactcctgacctcaagtgatccgcctgccgcggcctcccaaagtgctaggatacaggtgtgagccaccacaccgggcctattttcattttcttaatggtacctttcaaagataagtttttaatttttaataaaattcaatttattagtttttattattagagttttctatgtcctaagaaatctttacctatcagtgtcacaagattttcttctacctattttcaaggcgttgtacaatcgttgcccttaggcctgttatccattttgagttaatttttgtatgtcatgtaaaatataagtacgaggttcattgttttgtagtggatgtgcagttattccaacatcat

SEQ ID NO: 197378 - DNA, 324 bp, Homo sapiens
gcctgtactgagggcctactgtgtgccaaccacttttcacatcttcccaattgcttggttttagagttaggcactgtccccattcttcagatgagaaagctgaggttcagagaggttaaggaggaatttgctcatatgtaagagagccagggtttgaagcaagatttatcaactccaaagcccatggctgttctattttgccaagatgcttcggaaaagtcccagggttcatggttgcacactgcttggcatggggatggggagagcccttccggcattccttctctcattcactctaataacatttatatgcctggcatcaag

SEQ ID NO: 197379 - DNA, 318 bp, Homo sapiens
tgggtctccctccttaattattaattagtcttgccattttcatttacctactcagactgggacaatgtgtttgaggaatgaactccaaccttgccactcatctgtctttatgttcctgcttctgtctccaaaggcagccctagtgtcagtgtggtatttcccatcccagcatctaaaagtcacatgggcctgccttgaaaattgctcccaaagtacctacaacatgtcaaatgtcaagtgaaataggcaattattttaaattatatttctttcctttaaaaaatatagatattgcaaactgatgtcggagttccccct

SEQ ID NO: 197380 - DNA, 343 bp, Homo sapiens
ctctggattgtttttagtctagtgaagggaggaaaactatctcaaaggagaaggaaaacctgccccattgaaatggtgcgagaacctgaaagttaaaatgcgcttggggcagagtgagcagggcacaattcactgtcttcagggaggttggtcactgagcactcagtgagccagggtggggctgggagatgtcctaggggatagggtgacctcacctgacattggaatcagataaatgtctgtattccaggtcagcattgcctctccctgggtttgtaaacccttgaaaaggtttatttgcttatttgatcctgtttttcattaaatgtagaatgtattttat

SEQ ID NO: 197381 - DNA, 398 bp, Homo sapiens
caatatctcattcccagtgtcatgtttgcagccaaccagtaacatctcattctcagccctgcctcttgcctctgttaaaagaggtgggaagagggggtcgtttttgaggtctctttaagctctgctgttctctggactggttggttagctgacctttccctggtgggagagtaagaaactccagtgccagccttagagttattctggtgcaatgccttgaacctctttgacacagtggcatctccatatcttagttgtggcttgggagcctgctctttctcttccagaaatgtgaacaagccagtgtgtttttagggacctaaaagtgatctgtttcattggacacatataatgtaatagatgaaaagataataactttttcagctctggctcctccc

SEQ ID NO: 197382 - DNA, 509 bp, Homo sapiens
  misc_feature (12)..(12): n is a, c, g, or t
gtgtgagaggcnacttggagtggcacacactgacactcacatgcccagacgtccctgtcgaagcgagagacgcagatggggctagagcagaggtgttgcgggagcccgggagagttgaaatatgccagggagtgtgggagccaagcatgggggctcgaaggcaggggcggggacagttggccaagagtcaaagaaagggggtttgatatcaccctcccaccgaaagcagctcaaagtccaaatgacagcctgtacagtaggcagagcactggcccagagttaaggaacctgtaccccagtctccgggcaaccagtaattccgcctaactctgggcaagtccttctcaccaagcctctgtttatctgggggaaagtcagtggtttttttcaatcatctccctctgcctttttttaaagagaggatctcactctgtcatccaggctggagtccagaggcgtgaacatggctcactgtagctttgacctcctgggctcaagtgatcctcctg

SEQ ID NO: 197383 - DNA, 659 bp, Homo sapiens
gatctttgacaaagttgccaagaatatacattggggaaagggtaccctcttcaataaatggtgctgggataactggataagcatatgtggaaaaacgaaactgggcctttgtctctctccttatataaaatcaatcaagatggattgaagacttaaatgtaagacccaaaagtataaaactactaggagaaaacataggaaaagctcttcagaacattggtctaggcaaagattttatggctcagacctcaaaagcacaggcaacaaaaacaaaaataacaggactacattaaactaaaatgtctctgcactgcaaaagaaataacaaacagagtaaagagacaacaccctttttttgtttggttttagagacagggttttgctctgtcacccaggctggagtgcatgggcacaatcatagctcactgcagcctcaaattcctgggctcaagtgattctcatgtctcagcctcccaaatagctgagagtacagtgtgtgtcaccacatccaactagtttatttatttacttttgtagagacaggatcttgctatattgcccaggctggtctcaaactctggcttcaagtgaacctctcatctcgggatgaggcgctactgtcctaaaagcatggcctctccttttcgggcagtccacct

SEQ ID NO: 197384 - DNA, 999 bp, Homo sapiens
atcacaattcatcttgaaaagagcttttttccctcctaccacatacaccattcttagggagcaatgaggtaacaggtctgtgttgtctagatctttgctttttatccccctatcagtccagggcatatactaacctgcaaactgattctgaatcaggaaggtggtaatcaataagtattctggctgggaaagaccgtgggcccaatgatcaaagtcttcttggtgctgttcattaattcttgtgccttttggcttgttttctagagtttctgggctttggctgctgatactgcctttcttagactgtaatttttatctgcatgcccagtttctgacctatcaacttgggttttattgtgcactctaactgagcttgtcttcataattttctgtttattgccctgggcttggatatgtctcaagacactcatgtgaatcatgccaccccaaatcctggcttatcaagtcccagactataaattatgaactcccattagcttggtactaacatatacttgatgtaggtatttatggacttgatgatccaagaatattatattcttcaaaatggttaagctccatggagttagatgactacacttaatgctattaagttgaacttttgaatgtcaactaatttgcaatcaattaaagatacatatgcctagaaattttgaaatttcggtatatttatccagttaaagggctaaattatataagcaaacactactttttttaaaacgtctggactcaaaaaatgctttgttccatgttttaaaatttttaagtagcagtctcaaagttgcttagctgtttattttgctatgttcctagctaagagtttggttataggagttcatcaataacttattttttgtacagttcccacattagatactgtttaaaagttcttttttaaactcaattttttttagaaacataagagaaatatttagatacatacaaatgtttttatgattaaataattttatgcttatt

SEQ ID NO: 197385 - DNA, 152 bp, Homo sapiens
atgagactggcaaggtaggcaggaataaaatgatcatcagagttcttggatgttgttccagggattttggactttaccttaaaggaatcaagggataatccaatcagattgtgctttagaagtagagaaggattggaggggtgttaggcgac

SEQ ID NO: 197386 - DNA, 204 bp, Homo sapiens
aggaacgtgatcagagatgtgtagcatttctgggtctggccctaaaacatccccatatgtgatcctccttgcctccttccctacactgagttgatgaaagtgactgtagtaacctagtaagtcatgtgctaaagataacagaaccacagaaaggaaggagcttgagtcattgctttgaggagagctgtctgctgatcaagaaca

SEQ ID NO: 197387 - DNA, 424 bp, Homo sapiens
ctgatgtatccccaacaccccttagtgaacatacattcaaagtggatgaggatattttacctgattagtaaattccatctcccacttccatgcacagtatttaaacagccaccagtgcaagtgtgtataatggaccatcatagtcttataagtgttctgaggctcatagcaacaatttcttatgacgggaaaaaaatcattgcctctcaaagaaaccaacattttatttcagtgacagataccaagtaaaaacagtacttgtattatttttctttttaggagtttgatacttttcttgtattaaccttgacttcaaagaaaaatcataggcttacatcaaaaacacttgggaaatttgtcttggctctgttccaatgaggccagttattctaaaaggggttactggattgtgttgggccttcat

SEQ ID NO: 197388 - DNA, 537 bp, Homo sapiens
acagcagctgtaaacccagcagcacatcaaaagcatgtgaggagcttttcaaagaacaccaatgtctaggcagcacagacattccgattcacatccagggtggggccccattttctgctgtatcccctcagcggctggttctgagaggcagccaagacggatcccatatggttcggcccagaatgcccttccccgactctgccggcttggcaaacttccacttgttttcaaaactcttcttagactgagactggcagaagccacctctgaaccttcctatccactgcccataattactcctccttctgtcctacttcacatcatggtgcatgtccacgactgtgtgtcatacggtacagtgacagctcctcacttcagttcccttcactgacctgagcaccgggtaccttgcttatcaattactgtatgcttatcaaacctatcctaaagcatttcaagatcaggagtgcgctttccacctacactcctccaaaagtcacactgtgaccatgtttcaaagggggaattcaaatgctg

SEQ ID NO: 197389 - DNA, 286 bp, Homo sapiens
aggattcacgtatcttcgtcccatcaggccgcatggtatgcttttaaatcaggagacagatcatgtcgcctctctgctcagaatattcttgctgttacaatctcagtcagagtaaaagccaaagccccagcaatagcctccccatagctaggactactggtgagcaccacaacacccagctttttttttttttttttttttaattgtagagagaagccttgctatgttgcccaagctggcctcaaaatcacaccctcaagagatctgctcacctcgacaacctgat

SEQ ID NO: 197390 - DNA, 335 bp, Homo sapiens
aggttttatatagcaaaagaaccatttaaagacttgggttacaaatgtattttattttacctctggcatgccttgggctgagaaagcattatatggtgacacagtatttgtaacattctcatagccatctggcggtggttcaaggtatgacattttgaaaatctagcaagaattaaaatatgtcaagttagagataaaaattccagattattattaagatataattcattttgccccaagtatatacttcagattaagcatcctggaactaggttctataattaaatagataaattacactgacaacaatgagaaagagccttatcattattatt

SEQ ID NO: 197391 - DNA, 1314 bp, Homo sapiens
gcccggccccctcccccgccatgaagaagctgtgggtgaagaagcgtttccagaaaaccggccattcccgccgggcctttggcgactcacccatgttttccgctcctgcagaaagcaaagttacgactcagagacggctgaggatgacatcagcgatgtgcagggaacccagcgcctggagcttcgggatgacggggccttcagcacccccacggggggttctgacaccctggtgggcacctccctggacacacccccgacctccgtgacaggcacctcagaggagcaagtgagctggtggggcagcgggcagacggtcctggagcaggaagcgggcagtgggggtggcacccgccgcctcccgggcagcccaagcagcgtccctcagagcgggttgcgcagggaggagcccgaccttcagcctcaactggccagcgaagccccacgccgccctgcccagccgcctccttccaaatccgcgctgctccccccaccgtcccctcgggtcgggaagcggtccccgccgggacccccggcccagcccgcggccacccccacgtcgccccaccgtcgcactcaggagcctgtgctgcccgaggacaccaccaccgaagagaagcgagggaagaagtccaagtcgtccgggccctccctggcgggcaccgcggaatcccgaccccagacgccactgagcgaggcctcaggccgcctgtcggcgttgggccgatcgcctaggctggtgcgcgccggctcccgcatcctggacaagctgcagttcttcgaggagcgacggcgcagcctggagcgcagcgactcgccgccggcgcccctgcggccctgggtgcccctgcgcaaggcccgctctctggagcagcccaagtcggagcgcggcgcaccgtggggcacccccggggcctcgcaggaagaactgcgggcgccaggcagcgtggccgagcggcgccgcctgttccagcagaaagcggcctcgctggacgagcgcacgcgtcagcgcagcccggcctcagacctcgagctgcgcttcgcccaggagctgggccgcatccgccgctccacgtcgcgggaggagctggtgcgctcgcacgagtccctgcgcgccacgctgcagcgtgccccatcccctcgagagcccggcgagcccccgctcttctctcggccctccacccccaagacatcgcgggccgtgagccccgccgccgcccagccgccctctccgagcagcgcggagaagccgggggacgagcctgggaggcccaggagccgcgggccggcgggcaggacagagccgggggaagg

SEQ ID NO: 197392 - DNA, 2370 bp, Homo sapiens
gcccggccccctcccccgccatgaagaagctgtgggtgaagaagcgtttccagaaaaccggccattcccgccgggcctttggcgactcacccatggtgcgtggaccgtgggcgtccttgctctagcccatgcctactcctcctcttggtccctgtccctctgtgaggcatcgagttcctgaagacagcccatgagatgtggaaccctcccactcacccccacacttatctaccacccacccgaccaggccccctgtgccctacagctgagagaggacccagcagaagggagggcggctcactagcacacccctgcatggactgggtgccctgttctccatgtgaggcctaatgggaaggagttcattgccatgctttggcaaccagtacgtggctcctgcttgtcatggcagccagagggaaactgaggcacagaacctgctagaatctgggaaagttgaaaatactcccaggaaccttttctcctaacctaaccactgggcatttttgaggacgattcaacagtagaagggagggaccttgaggaaggtgcctgtcacatcatgatgcagacagataaggggttggtttgcaaagaggggtcaaagcacaatgcaaatattgtaatagagggtgggcctgactcctaatgggaggcccaggtctgcggctggactggacacaagcaggtgtgtgtgtgtgtgtgtgcatgtgtgtgtgtggccagtggcagcaccagtaagtgccaaggataccagaaccactggggcagctggaataacaagcccaagtatgggggtccccagtgctgggcacatcccaggtatctccctccccacccattgccacaggacacctctggggactgggtgcctcacgccccttctgtcttgactgccctccatgccctgccccacaaacgctctgataacagtctgtccctgtctctctcctgctgctcctatggaagcgaagttttccgctcctgcagaaagcaaagttacgactcagagacggctgaggatgacatcagcgatgtgcagggaacccagcgcctggagcttcgggatgacggggccttcagcacccccacggggggttctgacaccctggtgggcacctccctggacacacccccgacctccgtgacaggcacctcagaggagcaagtgagctggtggggcagcgggcagacggtcctggagcaggaagcgggcagtgggggtggcacccgccgcctcccgggcagcccaaggcaagcacaggcaaccggggccgggccacggcacctgggggtggagccgctggtgcgggcatctcgagctaatctggtgggcgcaagctgggggtcagaggatagcctttccgtggccagtgacctgtacggcagcgcattcagcctgtacagaggacgggcgctctctatccacgtcagcgtccctcagagcgggttgcgcagggaggagcccgaccttcagcctcaactggccagcgaagccccacgccgccctgcccagccgcctccttccaaatccgcgctgctccccccaccgtcccctcgggtcgggaagcggtccccgccgggacccccggcccagcccgcggccacccccacgtcgccccaccgtcgcactcaggagcctgtgctgcccgaggacaccaccaccgaagagaagcgagggaagaagtccaagtcgtccgggccctccctggcgggcaccgcggaatcccgaccccagacgccactgagcgaggcctcaggccgcctgtcggcgttgggccgatcgcctaggctggtgcgcgccggctcccgcatcctggacaagctgcagttcttcgaggagcgacggcgcagcctggagcgcagcgactcgccgccggcgcccctgcggccctgggtgcccctgcgcaaggcccgctctctggagcagcccaagtcggagcgcggcgcaccgtggggcacccccggggcctcgcaggaagaactgcgggcgccaggcagcgtggccgagcggcgccgcctgttccagcagaaagcggcctcgctggacgagcgcacgcgtcagcgcagcccggcctcagacctcgagctgcgcttcgcccaggagctgggccgcatccgccgctccacgtcgcgggaggagctggtgcgctcgcacgagtccctgcgcgccacgctgcagcgtgccccatcccctcgagagcccggcgagcccccgctcttctctcggccctccacccccaagacatcgcgggccgtgagccccgccgccgcccagccgccctctccgagcagcgcggagaagccgggggacgagcctgggaggcccaggagccgcgggccggcgggcaggacagagccgggggaagg

SEQ ID NO: 197393 - DNA, 192 bp, Homo sapiens
ctggttttttcgatctgcttcttctgtcagttacatttctcttagattatggacttgtccatttctcttttcagttctatcaatttttgatttttaagtgtgcatatatctataaagccatgttattaggcgcaaacaattttaaaatctttttatcgatataaagtgacctctttatcttaagtacttttt

SEQ ID NO: 197394 - DNA, 499 bp, Homo sapiens
atcccatgagacttctggcaaggggatctaccaagggccaaaaactggttttaaatgaataatagttaagatgttattttgcccttttccattctcaattcactttatgagtgtaccagtggagtttttccagaggttacaatggcttgtgagatgtcatggctgtgactgatggaatatatactgtgtgtcccttgttttaaaagttgctcagttttggccagccgtgatgactcacacctataatcccagcactttgggaggccgaggtgggcagatcacttgaggtcagaagttcgagatcagcctggccaacatggcaaaaccccatgtctactaaaaataaaaaattagctgggcatggtggcacgcaccttaatcccagctacgtgggaggctgaggcaagagaatcgcttgaacccaggaggtggaggttgcagtgagctgagattgtgccactgcactctagcctgggagacagagcaagactccatctca

SEQ ID NO: 197395 - DNA, 374 bp, Homo sapiens
atccatgtcaccatgggtgctcagtacctgccctggagcagagatggagcagagaggggctgggagcctggccagagccctcaggcagctccctccagcctccacttcaaggcagtgatgcaaaacaggcccagctgctgtgttcctcttccccaagtactgggttgaggtgggggaagtccaggaaacctttcctggtgtttgtttataccacgagccccacgtttccttagcctctttcctgcccaggcatcagcttcctggcattggcttgcccactcccagggagtgcctcttctttgtgatctcttgtaaagggctggcatgaaatgggctgggatgtgagacaaggcactcccttggccctgggctct

SEQ ID NO: 197396 - DNA, 578 bp, Homo sapiens
gtgtttctaagcagtgatcatcaatagctgctaaaaatcatcagttggatcaagctgacaacatctgaatctaccagttggttttaaaatcacaaaaagacaggcaaacattgctgtgtctccttgtatgatttgacagtggatgtctgtgatggtcaccaaaaattcaaacatggacttcatcacatccctagatataactactagtttacaatgaaatgcaggggaaattgattgaccacggggtgcagtccagaataggggaaattctactacacaaataccaagttttctcaacaaacaaatggctagaaaaaattttaaaagaggggaggggctggttattagaagaaacctaaaaggcttatcagccaaatgaaatatgtaggccttatttagatcctgatttaaactaactgtacaaagacatttttatgctttaatttagtgctatttgaatattaggtgatgctaagaattgattattttaaggtatgatcatggcattgtggttatgtttttaagtcctgtctcttacagtacatattgaagtatttacaaatcaaaacgagataatg

SEQ ID NO: 197397 - DNA, 419 bp, Homo sapiens
ttctgaggtttgaataagagtattgaggtaaagacctatccagatatttagggaaaatggggaaattatttctcatagcaaccatggcagtgagaaagatgctttctccctagaaaaggataaaaatgcatgcagccaccatacctggtcacagattttttaatggggagtaaagcactataatatagcagaacaagagtaggaatacaaagatacttttaattttttacatgttataaactgtctgacactgggagtattgtttcatctgagatactgttttttaacttgtaacaaagctgtaacacttatcttttttacccctcctttgctgcttccagattccaccgctgttaaaaataacatgtcggccgggtgcgttggctcacgcctgtaatcccagcactttgggaggccga

SEQ ID NO: 197398 - DNA, 316 bp, Homo sapiens
gttttaagctgagccaacctaaggtcccacagatcaattatattatggagcccttttctttagagaatatgcctttttccattcttggatatctctgttacagtagactcttgaataatgtgggggttggggtgccaatcccctaagcagttgaaaaatgatgtataacttttgactcccccaaaacttaactactaatagccttctgttgactggacaccttactgataatgtaaatagtctattaaacatattttatatgttatatatattaaatactgtattcttacaataaagtaagcaagagaaaagaaaa

SEQ ID NO: 197399 - DNA, 1037 bp, Homo sapiens
tttaaatgtaccttttaataatatagtctctaattttatgctgacagaggaccctgcagactggtctcatgataggaaaatatcaggtgtggagaggcagacatgttccataggaaattttagagaaagcctggaattgttcaccttttcctcattaatctttgatgacattagacatttaattcacttggcaaaatcagttttttcaaaatctggcatgtaatggtttcataaaagccttgggtggcttctaggaaaatataagtagttgaaagtttcttgtacattttcattttaatatttaatcaggacaaaagagtacagttttagaaatcctgggctcttactcatgagctctacaaaattttaatggagaacatttgaagccagtggttttgccataaagtggtcatccctctccagcgcttcctctcctggtctttgaatgtttcaggactggtcttgagagctgcatatgttgttccctgcatatcgaaaggacacttctcatagaccgtgaagtgagtgagtcctctggagttgtacaacctataacattcctgatgaaaacaccatttcattgctcttgctactgaaaccaaaagcctttgtggtatcctttactctgcttttgtccctcgctgtctttattaaatctatggggagtctcaatagcagtgcatacataattcttccagaatctgcctctgtcacttacaccactgttaccactttggggtggagcatggcaccttctcttacctggaaaactgtgataccctcctaactagtttgtctggctcccgttgtccttctacagtcttgatttcccagcagccagcgtgatatttttccaaaataaaggaatgtcctttcctctgctcaaaacctcccaaatctttctgtatcttttggactaaaatccagtgtcactgtcatggcttgcaaggaatacacgctccctatgatctgcccctaccacctcccatcacctttgacacacttgtttactacttctgctccagctgtagagacaa

SEQ ID NO: 197400 - DNA, 230 bp, Homo sapiens
gttggaggtaggcagcagcttcctctacacctgctctctctggccagctcagctcccagtcccaccctggccttggagcaagcagtcagggtaggtactgtaagccttgagctctgccaaaggccatgaggcttgcctaatgggatggagcttttccctggctgggatgggtgggcaggcaccaggcttcctcttagggagggagggctgtaaatgggggtgggtgggag

SEQ ID NO: 197401 - DNA, 246 bp, Homo sapiens
aggtctataaagggaattttggaatactcttaatagatctgttcttgaaataagtcagctaaactgagtgaggtgctttgccaacacattaactgaaagtcctgaccaaccctgatcccagaccttcatggacaattctcttgttttatttccatttccagtagttgtatgtaattcttctaagagacttgttccaagccaaccttcctagtggtcttgttgaaatgagatagtggttgtaggtat

SEQ ID NO: 197402 - DNA, 264 bp, Homo sapiens
tgagccacagagcctggccatctccactttttcttatcccccaaaaggattaacatccctggctttatgtagaatagtgtacgctgccacatcagtgtttgagtcattccccagaggagaggggaatcccccctccattttttttttggcaacatcttgtcttcccttggctgttgcttcccccaacacacttggtttggttctatcctgtacttcagatttgtttttggtttggtttttttcatattgaaaagatgaccatga

SEQ ID NO: 197403 - DNA, 233 bp, Homo sapiens
atacaaggtaaggagactcgtttgtgaatggccttgaatgacagcctaatagcatgaattttagtatgtaatacaaactttattaatttaaaaccttctacaattttaggtataagttcactcatggcaatctttgtagatcatagttttgggcctttaagtcattaagtcatttgggcctttaagtcatttaatatttaagtcattaaatcttatgaaataacatagtttag

SEQ ID NO: 197404 - DNA, 334 bp, Homo sapiens
tggtgtgtgttaccttgtctgggcttccatgtctggctgtgttgtgatttgactctagtttttggcctggtggtcaggaagagatggggggatacacgtgcctggggtgggcacgtatgatagcatctttggatcatctttaagcaaggtgacaccctagcctgtgttagggaggagtgggtcagtactgcaggcctgggggttcaggagaatctggagagcagggtcttcaggtaaattgacctggtgtctccattccaagtctcaggccctgttctccaattagagccctgatgtcgacgcggccgcgaatttagtagtagtaggcggccgc

SEQ ID NO: 197405 - DNA, 284 bp, Homo sapiens
tgtcatttaagaccacatctccattcacctgcctcccattcccagaatctgcggtcacggtcttaggtggctgtcggggtattttggtggaaatttttagaaagcccttggaggggaatcaaacaggtgactgaaactgctggtgtgcttttaagagaagttggaagaagagacattctctgtgcacagggtagtaaatgcacatgcctgcaggctcagggcacagcctgcccagccacatctactagggagtgatgggaagtgtggtaaaatggaaaagatct

SEQ ID NO: 197406 - DNA, 508 bp, Homo sapiens
agatttgacagaaaaagaatcagcaaacttgaagacagatctgttgaaattaacctctctgagaaaaagaaagaaacaagaatgaagaacaatgagcaaaacttctaaaacctttgggataccaccaaatgtacccatatacacataaaaaaagagaaaggggcagaatattggaagaaagaatggttgaaaatgtctcacatttgatggaaaatattaatctacctatccaagaagctcagtgaactccaagtaggttaaactcaaagagctccatacctagacatatcataatcaaaccctcaaaagacagaattttgaaagaggcaagataaaagcaactcatcacacaagggagtctcaataagatttacaactgacttctcatcagaaaccatggaaacaagaaggcaatgggtacatttaaaaataactaagtataattggattgtttgtcacaaaggataaatgcttgaggcactagataccccattttccatgatgtgat

SEQ ID NO: 197407 - DNA, 691 bp, Homo sapiens
tgtcctcacctgcactgactcttcacccacaaaattctattctagctagcttgggagaattctagtccagccccgcatcctgaaaaatggaggcccagggaacctgagtgacttggacccaaccaagataatggcaggcccagtcgcccttgctcacaggacaaaccagtcctttcgtggtggacctggggtggggtgggggcagtcacttgcagacattgggtgtcctcctttcccatgctgattaggatcctccccaactgtagcccatcctaccccagcatctgtgagacgcttgagacccccaagtctccccacagcccagcctccacctcagagagcccagtgggttttgaaagccactgttaggctgtgtgctgaggaactgattatttaatgttatagcaacaaccctacaatgaagatcttatctctacccagctgcctaggcagggtattttgaacctttatcatcttgacaccaaagactttttttcccttttagaataataactaagggacattgtcccaaatttctcatagatgagtaatctatgtcaagaaataattgagggtgggcacggtggctcacacctgtaatcgcagcactttgtgaggccaaggcaggtggatcacctgaggtcaggagttcaagaccagcctgggcaacatggtgaaaccttgtctacta

SEQ ID NO: 197408 - DNA, 6278 bp, Homo sapiens
aagggagccccgctcagcgcggggagcgcccggccccctccccgccccatgcgcccgcggctctgaagcctgagcggggccgggggctgggcggggccggggcccgccgtaggcatggcgtccgggagccggtggcggccgacaccgccgccgctgctgttgctgctgctgctggcgctggcggcgcgcgcggacggcctggagttcggcggcggccccgggcagtgggctcgctacgcgcgctgggcgggcgcggcgagcagcggcgagctcagcttcagcctgcgcaccaacgccacgcgcgcgctgctgctctacctggacgacggcggcgactgcgacttcctggagctgctgctggtggacggccgcctgcggctgcgcttcacgctttcgtgcgccgagccggccacgctgcagctggacacgccggtggccgacgaccgctggcacatggtgctgctgacccgcgacgcgcgccgcacggcgctggcggtggacggcgaggcccgcgccgccgaggtgcgctccaagcggcgcgagatgcaggtggccagcgacctgttcgtgggcggcatcccgcccgacgtgcgcctctcggcgcttacgctgagcaccgtcaagtacgagccgcccttccgcggtctcttggccaacctgaagctgggcgagcggccccccgcgctgctgggcagccagggcctgcgcggcgccaccgccgacccgctgtgcgcgcccgcgcgcaacccctgcgccaacggcggcctctgcaccgtgctggcccccggcgaggtgggctgcgactgcagccacacgggcttcggcggcaagttctgcagcgaagaggagcaccccatggaaggtccggctcacctgacgttaaacagcgaagtagggtccttactgttctccgaggggggggccgggagaggaggagccggcgatgtgcaccagccaacaaaaggcaaggaggagtttgtggcgaccttcaaaggcaatgagttcttctgctacgacctgtcacacaaccccatccagagcagcactgatgagatcacactggccttccgcaccctgcaacgcaacggcctgatgctgcatacaggcaagtcggccgactacgtcaacctgtccctcaagtctggggctgtctggctggtcatcaacctaggctcaggtgccttcgaggcccttgtggaacccgtcaatggcaagttcaacgacaacgcctggcacgacgtccgggtcacccgaaacctgcgccagcacgcagggattggacacgctatggtaaacaaactgcattatctggtgaccatctcggtggacgggatcctgaccaccacaggctacacgcaggaggattacaccatgctgggctctgatgacttcttctacattgggggcagccccaacacagctgacctgccgggctcgcccgtcagcaacaacttcatgggctgcctcaaggacgtggtctataagaacaatgacttcaaattggaactatcccgcctggcaaaggaaggggaccccaagatgaagctgcagggggacttgtcattccgctgtgaggatgtggctgccctggaccctgtgacctttgagagtcccgaggcctttgtggcgctgccccgctggagcgctaagcgcactggctccatctccctagacttccgcaccaccgagcccaatgggctgctgctcttcagccagggccggcgggctgggggtggagctggcagccacagctctgctcagcgggccgactactttgccatggagctattggacggccacctctatcttctgctggacatgggatctgggggcatcaagctgcgggcatccagccgcaaggtcaatgatggcgagtggtgtcacgtggacttccagagggatgggcgaaaaggctccatctcagtgaatagtcgcagcacgccgttcttggccactggagacagcgagattctggacctggagagtgagctgtacctgggcggtctccctgaggggggccgggtggacctgcccctgcccccagaggtgtggacagcagcactccgggcaggctacgtgggctgtgtgcgggacctcttcatagatgggcgtagccgagacctccggggcctggctgaggctcagggggctgtgggcgttgcccccttttgctcccgggagacgctgaagcagtgtgcatctgccccctgtcgcaatgggggcgtctgtcgagaaggctggaaccgcttcatctgtgactgcatcgggaccggctttcttgggcgggtctgtgagagagaggccacggtcctgagctacgatggctccatgtacatgaagatcatgctgcctaacgccatgcacacggaggcagaggatgtgtccctgcgtttcatgtcccagcgggcctacggactcatgatggccaccacttccagggagtctgccgacaccctacgcctggagctggatggggggcagatgaagctcactgtcaacctcgactgcctgcgcgtcggctgcgcacccagtaaaggccccgaaacgctgtttgcggggcacaagctcaatgacaatgagtggcacacggtgagggtggtccggcgtggcaagagcctgcagctgtctgtggacaacgtgactgtggagggacagatggcaggagcccatatgcggctggagttccacaacattgagacgggcatcatgacggagcggcggtttatctccgtggtgccctccaacttcatcgggcatctgagtgggctcgtgttcaatggccagccctacatggaccagtgcaaggatggtgacatcacctactgtgagctcaatgctcgctttggcctgcgtgccattgtggccgatcccgtcaccttcaagagtcgcagcagctacctggcactcgccacgctccaagcctatgcttccatgcacctcttcttccagttcaagaccacggcccctgatgggcttcttctgttcaactcgggcaacggcaatgacttcattgtcatcgagctggtcaaggggtacatccactacgtgtttgacctggggaatggcccgtccttgatgaaggggaactcagacaaaccagtcaatgacaaccagtggcacaacgtggtggtgtccagggacccaggcaacgtgcacacgctcaagattgactcccgcactgtcacgcagcactccaatggcgcccgaaacctcgatctcaaaggggagttgtacattggcggtctgagcaagaatatgttcagcaacctgcccaagctggtggcctcccgggatggctttcagggctgcctggcctcagtggacctcaacggacgtctcccagacctcatcgccgacgccctgcaccgcattgggcaggtggagaggggctgtgatggccccagcaccacctgcactgaagagtcctgtgccaaccagggcgtctgcttgcagcagtgggatggcttcacctgcgactgcaccatgacttcctatggaggccctgtctgcaatgatcccgggaccacatacatctttgggaaggggggagcgctcatcacctacacgtggccccccaatgacaggcccagcacgaggatggatcgcctggccgtgggcttcagcacccaccagcggagcgctgtgctggtgcgggtggacagcgcctccggccttggagactacctgcagctgcacatcgaccagggcaccgtgggggtgatctttaacgtgggcacggacgacattaccatcgacgagcccaacgccatagtaagcgacggcaaataccacgtggtgcgcttcactcgaagcggcggcaacgccaccctgcaggtggacagctggccggtcaacgagcggtacccggcaggaaactttgataacgagcgcctggcgattgctagacagagaatcccctaccggcttggtcgagtagtagatgagtggctgctcgacaaaggccgccagctgaccatcttcaacagccaggctgccatcaagatcgggggccgggatcagggccgccccttccagggccaggtgtccggcctctactacaatgggctcaaggtgctggcgctggccgccgagagcgaccccaatgtgcggactgagggtcacctgcgcctggtgggggaggggccgtccgtgctgctcagtgcggagaccacggccaccaccctgctggctgacatggccaccaccatcatggagactaccaccaccatggccactaccaccacgcgccggggccgctcccccacactgagggacagcaccacccagaacacagatgacctgctggtggcctctgctgagtgtccaagcgatgatgaggacctggaggagtgtgagcccagtactggaggagagttaatattgcccattatcacggaggactccttagacccccctcccgtggccacccgatcccccttcgtgcccccgccccctaccttctaccccttcctcacgggagtgggcgccacccaagacacgctgcccccgcccgccgcgcgccgcccgccctctgggggcccgtgccaggccgagcgggacgacagcgactgcgaggagcccatcgaggcctcgggcttcgcctccggggaggtctttgactccagcctcccccccacggacgacgaggacttttacaccacctttcccctggtcacggaccgcaccaccctcctgtcaccccgcaaacccgctccccggcccaacctcaggacagatggggccacgggcgcccctggggtgctgtttgccccctccgccccggcccccaacctgccggcgggaaaaatgaaccaccgagacccgcttcagcccttgctggagaacccgcccttggggcccggggcccccacgtcctttgagccgcggaggccccctcccctgcgccccggcgtgacctcagcccccggcttcccccatctgcccacagccaaccccacagggcctggggagcggggcccgccgggcgcagtggaggtgatccgggagtccagcagcaccacgggcatggtggtgggcattgtggcggcggcggcgctctgcatcctcatcctcctctacgccatgtataagtaccgcaatcgtgatgagggctcctaccaggtggaccagagccgaaactacatcagtaactcggcccagagcaatggggcggtggtgaaagagaaggccccggctgcccccaagacgcccagcaaggccaagaagaacaaagacaaggagtattatgtctgagcccccggcactgcgccccactgccagctgcccctcctgggagggcccgggaggagggtgccaccctctccctgccaggggcctggggaccctctccctggctgcctcaggcttctcttacgaagaggaaacgcaaaaaaagaaaaggaaaaaccccgtgctcgcccccttcctcctgccgtccactgcgcggcctcgtcagtcccggggctgactgtccctctcagctctgcgcctgccaggcagggcacgtgctcacagccctgggttgatttatttttttaagggggtagttttattttggtggggttgggtgggaaggaaggctgggggttttgtaaagtgtccactgctcgtcctgttaattttcctcaatttttcttcttcttccttctgtccctcctgccttccttctcttcccaagccctccaatccccatcccaggcttgctgtgtctcactgtccccaccctccttccctacttctttttttgtgtgtctggtttctcccttcctttcctccctttgggtttccagagtcggtgggagaagggcgggagggtgggcccgagtggcccagtgggtgggtggggtggggtggggcaagtgccccaactcccctcaccaggagaggcacctgcttggtgccgcccagggaaggggctcaggcctgacggaaggcctgttctgtgtgtgccgccgggcgacgtgcattgatggggaagctgctggaggagcaggggtggggggtgggagggaggggaaaggcaaatgcagatatatattacagacaaatactctagattccacgagcagcagcctgtggcacccgctgggcgcgggcagcagggaagagggagcaaggcattgtccacagactgctggggtcacttctttgcccacgggctccctgctcccccagttttttttctctctttgttaacaaatgtgtctgagtcttggaaaacaccccaaccccggaaatgtgtgggaaaaagaaaacaaaaactttccaaattccaacgg

SEQ ID NO: 197409 - DNA, 6257 bp, Homo sapiens
aagggagccccgctcagcgcggggagcgcccggccccctccccgccccatgcgcccgcggctctgaagcctgagcggggccgggggctgggcggggccggggcccgccgtaggcatggcgtccgggagccggtggcggccgacaccgccgccgctgctgttgctgctgctgctggcgctggcggcgcgcgcggacggcctggagttcggcggcggccccgggcagtgggctcgctacgcgcgctgggcgggcgcggcgagcagcggcgagctcagcttcagcctgcgcaccaacgccacgcgcgcgctgctgctctacctggacgacggcggcgactgcgacttcctggagctgctgctggtggacggccgcctgcggctgcgcttcacgctttcgtgcgccgagccggccacgctgcagctggacacgccggtggccgacgaccgctggcacatggtgctgctgacccgcgacgcgcgccgcacggcgctggcggtggacggcgaggcccgcgccgccgaggtgcgctccaagcggcgcgagatgcaggtggccagcgacctgttcgtgggcggcatcccgcccgacgtgcgcctctcggcgcttacgctgagcaccgtcaagtacgagccgcccttccgcggtctcttggccaacctgaagctgggcgagcggccccccgcgctgctgggcagccagggcctgcgcggcgccaccgccgacccgctgtgcgcgcccgcgcgcaacccctgcgccaacggcggcctctgcaccgtgctggcccccggcgaggtgggctgcgactgcagccacacgggcttcggcggcaagttctgcagcgaagaggagcaccccatggaaggtccggctcacctgacgttaaacagcgaagtagggtccttactgttctccgaggggggggccgggagaggaggagccggcgatgtgcaccagccaacaaaaggcaaggaggagtttgtggcgaccttcaaaggcaatgagttcttctgctacgacctgtcacacaaccccatccagagcagcactgatgagatcacactggccttccgcaccctgcaacgcaacggcctgatgctgcatacaggcaagtcggccgactacgtcaacctgtccctcaagtctggggctgtctggctggtcatcaacctaggctcaggtgccttcgaggcccttgtggaacccgtcaatggcaagttcaacgacaacgcctggcacgacgtccgggtcacccgaaacctgcgccagcacgcagggattggacacgctatggtgaccatctcggtggacgggatcctgaccaccacaggctacacgcaggaggattacaccatgctgggctctgatgacttcttctacattgggggcagccccaacacagctgacctgccgggctcgcccgtcagcaacaacttcatgggctgcctcaaggacgtggtctataagaacaatgacttcaaattggaactatcccgcctggcaaaggaaggggaccccaagatgaagctgcagggggacttgtcattccgctgtgaggatgtggctgccctggaccctgtgacctttgagagtcccgaggcctttgtggcgctgccccgctggagcgctaagcgcactggctccatctccctagacttccgcaccaccgagcccaatgggctgctgctcttcagccagggccggcgggctgggggtggagctggcagccacagctctgctcagcgggccgactactttgccatggagctattggacggccacctctatcttctgctggacatgggatctgggggcatcaagctgcgggcatccagccgcaaggtcaatgatggcgagtggtgtcacgtggacttccagagggatgggcgaaaaggctccatctcagtgaatagtcgcagcacgccgttcttggccactggagacagcgagattctggacctggagagtgagctgtacctgggcggtctccctgaggggggccgggtggacctgcccctgcccccagaggtgtggacagcagcactccgggcaggctacgtgggctgtgtgcgggacctcttcatagatgggcgtagccgagacctccggggcctggctgaggctcagggggctgtgggcgttgcccccttttgctcccgggagacgctgaagcagtgtgcatctgccccctgtcgcaatgggggcgtctgtcgagaaggctggaaccgcttcatctgtgactgcatcgggaccggctttcttgggcgggtctgtgagagagaggccacggtcctgagctacgatggctccatgtacatgaagatcatgctgcctaacgccatgcacacggaggcagaggatgtgtccctgcgtttcatgtcccagcgggcctacggactcatgatggccaccacttccagggagtctgccgacaccctacgcctggagctggatggggggcagatgaagctcactgtcaacctcgactgcctgcgcgtcggctgcgcacccagtaaaggccccgaaacgctgtttgcggggcacaagctcaatgacaatgagtggcacacggtgagggtggtccggcgtggcaagagcctgcagctgtctgtggacaacgtgactgtggagggacagatggcaggagcccatatgcggctggagttccacaacattgagacgggcatcatgacggagcggcggtttatctccgtggtgccctccaacttcatcgggcatctgagtgggctcgtgttcaatggccagccctacatggaccagtgcaaggatggtgacatcacctactgtgagctcaatgctcgctttggcctgcgtgccattgtggccgatcccgtcaccttcaagagtcgcagcagctacctggcactcgccacgctccaagcctatgcttccatgcacctcttcttccagttcaagaccacggcccctgatgggcttcttctgttcaactcgggcaacggcaatgacttcattgtcatcgagctggtcaaggggtacatccactacgtgtttgacctggggaatggcccgtccttgatgaaggggaactcagacaaaccagtcaatgacaaccagtggcacaacgtggtggtgtccagggacccaggcaacgtgcacacgctcaagattgactcccgcactgtcacgcagcactccaatggcgcccgaaacctcgatctcaaaggggagttgtacattggcggtctgagcaagaatatgttcagcaacctgcccaagctggtggcctcccgggatggctttcagggctgcctggcctcagtggacctcaacggacgtctcccagacctcatcgccgacgccctgcaccgcattgggcaggtggagaggggctgtgatggccccagcaccacctgcactgaagagtcctgtgccaaccagggcgtctgcttgcagcagtgggatggcttcacctgcgactgcaccatgacttcctatggaggccctgtctgcaatgatcccgggaccacatacatctttgggaaggggggagcgctcatcacctacacgtggccccccaatgacaggcccagcacgaggatggatcgcctggccgtgggcttcagcacccaccagcggagcgctgtgctggtgcgggtggacagcgcctccggccttggagactacctgcagctgcacatcgaccagggcaccgtgggggtgatctttaacgtgggcacggacgacattaccatcgacgagcccaacgccatagtaagcgacggcaaataccacgtggtgcgcttcactcgaagcggcggcaacgccaccctgcaggtggacagctggccggtcaacgagcggtacccggcaggaaactttgataacgagcgcctggcgattgctagacagagaatcccctaccggcttggtcgagtagtagatgagtggctgctcgacaaaggccgccagctgaccatcttcaacagccaggctgccatcaagatcgggggccgggatcagggccgccccttccagggccaggtgtccggcctctactacaatgggctcaaggtgctggcgctggccgccgagagcgaccccaatgtgcggactgagggtcacctgcgcctggtgggggaggggccgtccgtgctgctcagtgcggagaccacggccaccaccctgctggctgacatggccaccaccatcatggagactaccaccaccatggccactaccaccacgcgccggggccgctcccccacactgagggacagcaccacccagaacacagatgacctgctggtggcctctgctgagtgtccaagcgatgatgaggacctggaggagtgtgagcccagtactggaggagagttaatattgcccattatcacggaggactccttagacccccctcccgtggccacccgatcccccttcgtgcccccgccccctaccttctaccccttcctcacgggagtgggcgccacccaagacacgctgcccccgcccgccgcgcgccgcccgccctctgggggcccgtgccaggccgagcgggacgacagcgactgcgaggagcccatcgaggcctcgggcttcgcctccggggaggtctttgactccagcctcccccccacggacgacgaggacttttacaccacctttcccctggtcacggaccgcaccaccctcctgtcaccccgcaaacccgctccccggcccaacctcaggacagatggggccacgggcgcccctggggtgctgtttgccccctccgccccggcccccaacctgccggcgggaaaaatgaaccaccgagacccgcttcagcccttgctggagaacccgcccttggggcccggggcccccacgtcctttgagccgcggaggccccctcccctgcgccccggcgtgacctcagcccccggcttcccccatctgcccacagccaaccccacagggcctggggagcggggcccgccgggcgcagtggaggtgatccgggagtccagcagcaccacgggcatggtggtgggcattgtggcggcggcggcgctctgcatcctcatcctcctctacgccatgtataagtaccgcaatcgtgatgagggctcctaccaggtggaccagagccgaaactacatcagtaactcggcccagagcaatggggcggtggtgaaagagaaggccccggctgcccccaagacgcccagcaaggccaagaagaacaaagacaaggagtattatgtctgagcccccggcactgcgccccactgccagctgcccctcctgggagggcccgggaggagggtgccaccctctccctgccaggggcctggggaccctctccctggctgcctcaggcttctcttacgaagaggaaacgcaaaaaaagaaaaggaaaaaccccgtgctcgcccccttcctcctgccgtccactgcgcggcctcgtcagtcccggggctgactgtccctctcagctctgcgcctgccaggcagggcacgtgctcacagccctgggttgatttatttttttaagggggtagttttattttggtggggttgggtgggaaggaaggctgggggttttgtaaagtgtccactgctcgtcctgttaattttcctcaatttttcttcttcttccttctgtccctcctgccttccttctcttcccaagccctccaatccccatcccaggcttgctgtgtctcactgtccccaccctccttccctacttctttttttgtgtgtctggtttctcccttcctttcctccctttgggtttccagagtcggtgggagaagggcgggagggtgggcccgagtggcccagtgggtgggtggggtggggtggggcaagtgccccaactcccctcaccaggagaggcacctgcttggtgccgcccagggaaggggctcaggcctgacggaaggcctgttctgtgtgtgccgccgggcgacgtgcattgatggggaagctgctggaggagcaggggtggggggtgggagggaggggaaaggcaaatgcagatatatattacagacaaatactctagattccacgagcagcagcctgtggcacccgctgggcgcgggcagcagggaagagggagcaaggcattgtccacagactgctggggtcacttctttgcccacgggctccctgctcccccagttttttttctctctttgttaacaaatgtgtctgagtcttggaaaacaccccaaccccggaaatgtgtgggaaaaagaaaacaaaaactttccaaattccaacgg

SEQ ID NO: 197410 - DNA, 4112 bp, Homo sapiens
  misc_feature (2)..(4): n is a, c, g, or t
tnnntttttttgtatcccaaagccctttaatccctggggccatgggagggtacattgcctttccacctgaggctgatcagtaattatcaggggggctgctgggagccagctctgaaggagggctatgacagagtgcatgctgccactctgtgatgtcacttctgagacagatgcctgggagccttgggcccactgtctccaacccacagggcctgggcggggaaggaacccaggtgaggcagggctgggaagccagtgttctttcccctgagttcctttccatgcagactgctttgtcttacctccccaacacgtgttcatactacgaccctgctctctctgtccagccagggccttcgtgggtctgtgccacgaagaccactcacttctgcctattccctgcacttgaggcacaggtcactagttaacaggttactagttagtgcctagccgaggacatctctgcagatgtcactcatgggtggccctcctgtggaggggaggctcctgggaacccaagccccagccctgccccaaagccatccccctcatcttggtctcctgtcctgagcaggacagatggcaggagcccatatgcggctggagttccacaacattgagacgggcatcatgacggagcggcggtttatctccgtggtgccctccaacttcatcgggcatctgagtgggctcgtgttcaatggccagccctacatggaccagtgcaaggatggtgacatcacctactgtgagctcaatgctcgctttggcctgcgtgccattgtggccgatcccgtcaccttcaagagtcgcagcagctacctggcactcgccacgctccaagcctatgcttccatgcacctcttcttccagttcaagaccacggcccctgatgggcttcttctgttcaactcgggcaacggcaatgacttcattgtcatcgagctggtcaaggggtacatccactacgtgtttgacctggggaatggcccgtccttgatgaaggggaactcagacaaaccagtcaatgacaaccagtggcacaacgtggtggtgtccagggacccaggcaacgtgcacacgctcaagattgactcccgcactgtcacgcagcactccaatggcgcccgaaacctcgatctcaaaggggagttgtacattggcggtctgagcaagaatatgttcagcaacctgcccaagctggtggcctcccgggatggctttcagggctgcctggcctcagtggacctcaacggacgtctcccagacctcatcgccgacgccctgcaccgcattgggcaggtggagaggggctgtgatggccccagcaccacctgcactgaagagtcctgtgccaaccagggcgtctgcttgcagcagtgggatggcttcacctgcgactgcaccatgacttcctatggaggccctgtctgcaatgatcccgggaccacatacatctttgggaaggggggagcgctcatcacctacacgtggccccccaatgacaggcccagcacgaggatggatcgcctggccgtgggcttcagcacccaccagcggagcgctgtgctggtgcgggtggacagcgcctccggccttggagactacctgcagctgcacatcgaccagggcaccgtgggggtgatctttaacgtgggcacggacgacattaccatcgacgagcccaacgccatagtaagcgacggcaaataccacgtggtgcgcttcactcgaagcggcggcaacgccaccctgcaggtggacagctggccggtcaacgagcggtacccggcaggccgccagctgaccatcttcaacagccaggctgccatcaagatcgggggccgggatcagggccgccccttccagggccaggtgtccggcctctactacaatgggctcaaggtgctggcgctggccgccgagagcgaccccaatgtgcggactgagggtcacctgcgcctggtgggggaggggccgtccgtgctgctcagtgcggagaccacggccaccaccctgctggctgacatggccaccaccatcatggagactaccaccaccatggccactaccaccacgcgccggggccgctcccccacactgagggacagcaccacccagaacacagatgacctgctggtggcctctgctgagtgtccaagcgatgatgaggacctggaggagtgtgagcccagtactggaggagagttaatattgcccattatcacggaggactccttagacccccctcccgtggccacccgatcccccttcgtgcccccgccccctaccttctaccccttcctcacgggagtgggcgccacccaagacacgctgcccccgcccgccgcgcgccgcccgccctctgggggcccgtgccaggccgagcgggacgacagcgactgcgaggagcccatcgaggcctcgggcttcgcctccggggaggtctttgactccagcctcccccccacggacgacgaggacttttacaccacctttcccctggtcacggaccgcaccaccctcctgtcaccccgcaaacccgctccccggcccaacctcaggacagatggggccacgggcgcccctggggtgctgtttgccccctccgccccggcccccaacctgccggcgggaaaaatgaaccaccgagacccgcttcagcccttgctggagaacccgcccttggggcccggggcccccacgtcctttgagccgcggaggccccctcccctgcgccccggcgtgacctcagcccccggcttcccccatctgcccacagccaaccccacagggcctggggagcggggcccgccgggcgcagtggaggtgatccgggagtccagcagcaccacgggcatggtggtgggcattgtggcggcggcggcgctctgcatcctcatcctcctctacgccatgtataagtaccgcaatcgtgatgagggctcctaccaggtggaccagagccgaaactacatcagtaactcggcccagagcaatggggcggtggtgaaagagaaggccccggctgcccccaagacgcccagcaaggccaagaagaacaaagacaaggagtattatgtctgagcccccggcactgcgccccactgccagctgcccctcctgggagggcccgggaggagggtgccaccctctccctgccaggggcctggggaccctctccctggctgcctcaggcttctcttacgaagaggaaacgcaaaaaaagaaaaggaaaaaccccgtgctcgcccccttcctcctgccgtccactgcgcggcctcgtcagtcccggggctgactgtccctctcagctctgcgcctgccaggcagggcacgtgctcacagccctgggttgatttatttttttaagggggtagttttattttggtggggttgggtgggaaggaaggctgggggttttgtaaagtgtccactgctcgtcctgttaattttcctcaatttttcttcttcttccttctgtccctcctgccttccttctcttcccaagccctccaatccccatcccaggcttgctgtgtctcactgtccccaccctccttccctacttctttttttgtgtgtctggtttctcccttcctttcctccctttgggtttccagagtcggtgggagaagggcgggagggtgggcccgagtggcccagtgggtgggtggggtggggtggggcaagtgccccaactcccctcaccaggagaggcacctgcttggtgccgcccagggaaggggctcaggcctgacggaaggcctgttctgtgtgtgccgccgggcgacgtgcattgatggggaagctgctggaggagcaggggtggggggtgggagggaggggaaaggcaaatgcagatatatattacagacaaatactctagattccacgagcagcagcctgtggcacccgctgggcgcgggcagcagggaagagggagcaaggcattgtccacagactgctggggtcacttctttgcccacgggctccctgctcccccagttttttttctctctttgttaacaaatgtgtctgagtcttggaaaacaccccaaccccggaaatgtgtgggaaaaagaaaacaaaaactttccaaattccaacgg

SEQ ID NO: 197411 - DNA, 2835 bp, Homo sapiens
aagggagccccgctcagcgcggggagcgcccggccccctccccgccccatgcgcccgcggctctgaagcctgagcggggccgggggctgggcggggccggggcccgccgtaggcatggcgtccgggagccggtggcggccgacaccgccgccgctgctgttgctgctgctgctggcgctggcggcgcgcgcggacggcctggagttcggcggcggccccgggcagtgggctcgctacgcgcgctgggcgggcgcggcgagcagcggcgagctcagcttcagcctgcgcaccaacgccacgcgcgcgctgctgctctacctggacgacggcggcgactgcgacttcctggagctgctgctggtggacggccgcctgcggctgcgcttcacgctttcgtgcgccgagccggccacgctgcagctggacacgccggtggccgacgaccgctggcacatggtgctgctgacccgcgacgcgcgccgcacggcgctggcggtggacggcgaggcccgcgccgccgaggtgcgctccaagcggcgcgagatgcaggtggccagcgacctgttcgtgggcggcatcccgcccgacgtgcgcctctcggcgcttacgctgagcaccgtcaagtacgagccgcccttccgcggtctcttggccaacctgaagctgggcgagcggccccccgcgctgctgggcagccagggcctgcgcggcgccaccgccgacccgctgtgcgcgcccgcgcgcaacccctgcgccaacggcggcctctgcaccgtgctggcccccggcgaggtgggctgcgactgcagccacacgggcttcggcggcaagttctgcagcgaagaggagcaccccatggaaggtccggctcacctgacgttaaacagcgaagtagggtccttactgttctccgaggggggggccgggagaggaggagccggcgatgtgcaccagccaacaaaaggcaaggaggagtttgtggcgaccttcaaaggcaatgagttcttctgctacgacctgtcacacaaccccatccagagcagcactgatgagatcacactggccttccgcaccctgcaacgcaacggcctgatgctgcatacaggcaagtcggccgactacgtcaacctgtccctcaagtctggggctgtctggctggtcatcaacctaggctcaggtgccttcgaggcccttgtggaacccgtcaatggcaagttcaacgacaacgcctggcacgacgtccgggtcacccgaaacctgcgccagcacgcagggattggacacgctatggtgaccatctcggtggacgggatcctgaccaccacaggctacacgcaggaggattacaccatgctgggctctgatgacttcttctacattgggggcagccccaacacagctgacctgccgggctcgcccgtcagcaacaacttcatgggctgcctcaaggacgtggtctataagaacaatgacttcaaattggaactatcccgcctggcaaaggaaggggaccccaagatgaagctgcagggggacttgtcattccgctgtgaggatgtggctgccctggaccctgtgacctttgagagtcccgaggcctttgtggcgctgccccgctggagcgctaagcgcactggctccatctccctagacttccgcaccaccgagcccaatgggctgctgctcttcagccagggccggcgggctgggggtggagctggcagccacagctctgctcagcgggccgactactttgccatggagctattggacggccacctctatcttctgctggacatgggatctgggggcatcaagctgcgggcatccagccgcaaggtcaatgatggcgagtggtgtcacgtggacttccagagggatgggcgaaaaggctccatctcagtgaatagtcgcagcacgccgttcttggccactggagacagcgagattctggacctggagagtgagctgtacctgggcggtctccctgaggggggccgggtggacctgcccctgcccccagaggtgtggacagcagcactccgggcaggctacgtgggctgtgtgcgggacctcttcatagatgggcgtagccgagacctccggggcctggctgaggctcagggggctgtgggcgttgcccccttttgctcccgggagacgctgaagcagtgtgcatctgccccctgtcgcaatgggggcgtctgtcgagaaggctggaaccgcttcatctgtgactgcatcgggaccggctttcttgggcgggtctgtgagagagaggccacggtcctgagctacgatggctccatgtacatgaagatcatgctgcctaacgccatgcacacggaggcagaggatgtgtccctgcgtttcatgtcccagcgggcctacggactcatgatggccaccacttccagggagtctgccgacaccctacgcctggagctggatggggggcagatgaagctcactgtcaacctcggtaaccaccctgccctgtgcttcctgacccctcacctggccttgtctctgacccacacctgcctctgtctggagaagctggtggtggcaccagcaagaggtgccctcagcagagtttggaggtggggaggtgccagcctgggtcagagaccctgagagctctgtccctggtgaggacgcacagtgtagggcgacattccatgctcgacgacactgtgaggggcaagacccagagtatctggggtatgctaactgtcctccctggtgactcatgtggatcttggtagcatctgtcctgcacacacacagatgacacagctcattttctggtcaacgctcatccacttgctcatt

SEQ ID NO: 197412 - DNA, 6167 bp, Homo sapiens
aagggagccccgctcagcgcggggagcgcccggccccctccccgccccatgcgcccgcggctctgaagcctgagcggggccgggggctgggcggggccggggcccgccgtaggcatggcgtccgggagccggtggcggccgacaccgccgccgctgctgttgctgctgctgctggcgctggcggcgcgcgcggacggcctggagttcggcggcggccccgggcagtgggctcgctacgcgcgctgggcgggcgcggcgagcagcggcgagctcagcttcagcctgcgcaccaacgccacgcgcgcgctgctgctctacctggacgacggcggcgactgcgacttcctggagctgctgctggtggacggccgcctgcggctgcgcttcacgctttcgtgcgccgagccggccacgctgcagctggacacgccggtggccgacgaccgctggcacatggtgctgctgacccgcgacgcgcgccgcacggcgctggcggtggacggcgaggcccgcgccgccgaggtgcgctccaagcggcgcgagatgcaggtggccagcgacctgttcgtgggcggcatcccgcccgacgtgcgcctctcggcgcttacgctgagcaccgtcaagtacgagccgcccttccgcggtctcttggccaacctgaagctgggcgagcggccccccgcgctgctgggcagccagggcctgcgcggcgccaccgccgacccgctgtgcgcgcccgcgcgcaacccctgcgccaacggcggcctctgcaccgtgctggcccccggcgaggtgggctgcgactgcagccacacgggcttcggcggcaagttctgcagcgaagaggagcaccccatggaaggtccggctcacctgacgttaaacagcgaagtagggtccttactgttctccgaggggggggccgggagaggaggagccggcgatgtgcaccagccaacaaaaggcaaggaggagtttgtggcgaccttcaaaggcaatgagttcttctgctacgacctgtcacacaaccccatccagagcagcactgatgagatcacactggccttccgcaccctgcaacgcaacggcctgatgctgcatacaggcaagtcggccgactacgtcaacctgtccctcaagtctggggctgtctggctggtcatcaacctaggctcaggtgccttcgaggcccttgtggaacccgtcaatggcaagttcaacgacaacgcctggcacgacgtccgggtcacccgaaacctgcgccagcacgcagggattggacacgctatggtgaccatctcggtggacgggatcctgaccaccacaggctacacgcaggaggattacaccatgctgggctctgatgacttcttctacattgggggcagccccaacacagctgacctgccgggctcgcccgtcagcaacaacttcatgggctgcctcaaggacgtggtctataagaacaatgacttcaaattggaactatcccgcctggcaaaggaaggggaccccaagatgaagctgcagggggacttgtcattccgctgtgaggatgtggctgccctggaccctgtgacctttgagagtcccgaggcctttgtggcgctgccccgctggagcgctaagcgcactggctccatctccctagacttccgcaccaccgagcccaatgggctgctgctcttcagccagggccggcgggctgggggtggagctggcagccacagctctgctcagcgggccgactactttgccatggagctattggacggccacctctatcttctgctggacatgggatctgggggcatcaagctgcgggcatccagccgcaaggtcaatgatggcgagtggtgtcacgtggacttccagagggatgggcgaaaaggctccatctcagtgaatagtcgcagcacgccgttcttggccactggagacagcgagattctggacctggagagtgagctgtacctgggcggtctccctgaggggggccgggtggacctgcccctgcccccagaggtgtggacagcagcactccgggcaggctacgtgggctgtgtgcgggacctcttcatagatgggcgtagccgagacctccggggcctggctgaggctcagggggctgtgggcgttgcccccttttgctcccgggagacgctgaagcagtgtgcatctgccccctgtcgcaatgggggcgtctgtcgagaaggctggaaccgcttcatctgtgactgcatcgggaccggctttcttgggcgggtctgtgagagagaggccacggtcctgagctacgatggctccatgtacatgaagatcatgctgcctaacgccatgcacacggaggcagaggatgtgtccctgcgtttcatgtcccagcgggcctacggactcatgatggccaccacttccagggagtctgccgacaccctacgcctggagctggatggggggcagatgaagctcactgtcaacctcgactgcctgcgcgtcggctgcgcacccagtaaaggccccgaaacgctgtttgcggggcacaagctcaatgacaatgagtggcacacggtgagggtggtccggcgtggcaagagcctgcagctgtctgtggacaacgtgactgtggagggacagatggcaggagcccatatgcggctggagttccacaacattgagacgggcatcatgacggagcggcggtttatctccgtggtgccctccaacttcatcgggcatctgagtgggctcgtgttcaatggccagccctacatggaccagtgcaaggatggtgacatcacctactgtgagctcaatgctcgctttggcctgcgtgccattgtggccgatcccgtcaccttcaagagtcgcagcagctacctggcactcgccacgctccaagcctatgcttccatgcacctcttcttccagttcaagaccacggcccctgatgggcttcttctgttcaactcgggcaacggcaatgacttcattgtcatcgagctggtcaaggggtacatccactacgtgtttgacctggggaatggcccgtccttgatgaaggggaactcagacaaaccagtcaatgacaaccagtggcacaacgtggtggtgtccagggacccaggcaacgtgcacacgctcaagattgactcccgcactgtcacgcagcactccaatggcgcccgaaacctcgatctcaaaggggagttgtacattggcggtctgagcaagaatatgttcagcaacctgcccaagctggtggcctcccgggatggctttcagggctgcctggcctcagtggacctcaacggacgtctcccagacctcatcgccgacgccctgcaccgcattgggcaggtggagaggggctgtgatggccccagcaccacctgcactgaagagtcctgtgccaaccagggcgtctgcttgcagcagtgggatggcttcacctgcgactgcaccatgacttcctatggaggccctgtctgcaatgatcccgggaccacatacatctttgggaaggggggagcgctcatcacctacacgtggccccccaatgacaggcccagcacgaggatggatcgcctggccgtgggcttcagcacccaccagcggagcgctgtgctggtgcgggtggacagcgcctccggccttggagactacctgcagctgcacatcgaccagggcaccgtgggggtgatctttaacgtgggcacggacgacattaccatcgacgagcccaacgccatagtaagcgacggcaaataccacgtggtgcgcttcactcgaagcggcggcaacgccaccctgcaggtggacagctggccggtcaacgagcggtacccggcaggccgccagctgaccatcttcaacagccaggctgccatcaagatcgggggccgggatcagggccgccccttccagggccaggtgtccggcctctactacaatgggctcaaggtgctggcgctggccgccgagagcgaccccaatgtgcggactgagggtcacctgcgcctggtgggggaggggccgtccgtgctgctcagtgcggagaccacggccaccaccctgctggctgacatggccaccaccatcatggagactaccaccaccatggccactaccaccacgcgccggggccgctcccccacactgagggacagcaccacccagaacacagatgacctgctggtggcctctgctgagtgtccaagcgatgatgaggacctggaggagtgtgagcccagtactggaggagagttaatattgcccattatcacggaggactccttagacccccctcccgtggccacccgatcccccttcgtgcccccgccccctaccttctaccccttcctcacgggagtgggcgccacccaagacacgctgcccccgcccgccgcgcgccgcccgccctctgggggcccgtgccaggccgagcgggacgacagcgactgcgaggagcccatcgaggcctcgggcttcgcctccggggaggtctttgactccagcctcccccccacggacgacgaggacttttacaccacctttcccctggtcacggaccgcaccaccctcctgtcaccccgcaaacccgctccccggcccaacctcaggacagatggggccacgggcgcccctggggtgctgtttgccccctccgccccggcccccaacctgccggcgggaaaaatgaaccaccgagacccgcttcagcccttgctggagaacccgcccttggggcccggggcccccacgtcctttgagccgcggaggccccctcccctgcgccccggcgtgacctcagcccccggcttcccccatctgcccacagccaaccccacagggcctggggagcggggcccgccgggcgcagtggaggtgatccgggagtccagcagcaccacgggcatggtggtgggcattgtggcggcggcggcgctctgcatcctcatcctcctctacgccatgtataagtaccgcaatcgtgatgagggctcctaccaggtggaccagagccgaaactacatcagtaactcggcccagagcaatggggcggtggtgaaagagaaggccccggctgcccccaagacgcccagcaaggccaagaagaacaaagacaaggagtattatgtctgagcccccggcactgcgccccactgccagctgcccctcctgggagggcccgggaggagggtgccaccctctccctgccaggggcctggggaccctctccctggctgcctcaggcttctcttacgaagaggaaacgcaaaaaaagaaaaggaaaaaccccgtgctcgcccccttcctcctgccgtccactgcgcggcctcgtcagtcccggggctgactgtccctctcagctctgcgcctgccaggcagggcacgtgctcacagccctgggttgatttatttttttaagggggtagttttattttggtggggttgggtgggaaggaaggctgggggttttgtaaagtgtccactgctcgtcctgttaattttcctcaatttttcttcttcttccttctgtccctcctgccttccttctcttcccaagccctccaatccccatcccaggcttgctgtgtctcactgtccccaccctccttccctacttctttttttgtgtgtctggtttctcccttcctttcctccctttgggtttccagagtcggtgggagaagggcgggagggtgggcccgagtggcccagtgggtgggtggggtggggtggggcaagtgccccaactcccctcaccaggagaggcacctgcttggtgccgcccagggaaggggctcaggcctgacggaaggcctgttctgtgtgtgccgccgggcgacgtgcattgatggggaagctgctggaggagcaggggtggggggtgggagggaggggaaaggcaaatgcagatatatattacagacaaatactctagattccacgagcagcagcctgtggcacccgctgggcgcgggcagcagggaagagggagcaaggcattgtccacagactgctggggtcacttctttgcccacgggctccctgctcccccagttttttttctctctttgttaacaaatgtgtctgagtcttggaaaacaccccaaccccggaaatgtgtgggaaaaagaaaacaaaaactttccaaattccaacgg

SEQ ID NO: 197413 - DNA, 3805 bp, Homo sapiens
tggaaacctgcgacttcttacaggaaagactcatgactgttcaccacgtccaagccacgtctgcgacaccctacgccatggagctggtatgggtggcagatgaagctcactgtcaagctcgactgcctgcgcgtcggcgcgcaccgagtaaaggccccgaaacgctgtttgcggggcacaagctcaatgacaatgagtggcacacggtgagggtggtccggcgtggcaagagcctgcagctgtctgtggacaacgtgactgtggagggacagatggcaggagcccatatgcggctggagttccacaacattgagacgggcatcatgacggagcggcggtttatctccgtggtgccctccaacttcatcgggcatctgagtgggctcgtgttcaatggccagccctacatggaccagtgcaaggatggtgacatcacctactgtgagctcaatgctcgctttggcctgcgtgccattgtggccgatcccgtcaccttcaagagtcgcagcagctacctggcactcgccacgctccaagcctatgcttccatgcacctcttcttccagttcaagaccacggcccctgatgggcttcttctgttcaactcgggcaacggcaatgacttcattgtcatcgagctggtcaaggggtacatccactacgtgtttgacctggggaatggcccgtccttgatgaaggggaactcagacaaaccagtcaatgacaaccagtggcacaacgtggtggtgtccagggacccaggcaacgtgcacacgctcaagattgactcccgcactgtcacgcagcactccaatggcgcccgaaacctcgatctcaaaggggagttgtacattggcggtctgagcaagaatatgttcagcaacctgcccaagctggtggcctcccgggatggctttcagggctgcctggcctcagtggacctcaacggacgtctcccagacctcatcgccgacgccctgcaccgcattgggcaggtggagaggggctgtgatggccccagcaccacctgcactgaagagtcctgtgccaaccagggcgtctgcttgcagcagtgggatggcttcacctgcgactgcaccatgacttcctatggaggccctgtctgcaatgatcccgggaccacatacatctttgggaaggggggagcgctcatcacctacacgtggccccccaatgacaggcccagcacgaggatggatcgcctggccgtgggcttcagcacccaccagcggagcgctgtgctggtgcgggtggacagcgcctccggccttggagactacctgcagctgcacatcgaccagggcaccgtgggggtgatctttaacgtgggcacggacgacattaccatcgacgagcccaacgccatagtaagcgacggcaaataccacgtggtgcgcttcactcgaagcggcggcaacgccaccctgcaggtggacagctggccggtcaacgagcggtacccggcaggccgccagctgaccatcttcaacagccaggctgccatcaagatcgggggccgggatcagggccgccccttccagggccaggtgtccggcctctactacaatgggctcaaggtgctggcgctggccgccgagagcgaccccaatgtgcggactgagggtcacctgcgcctggtgggggaggggccgtccgtgctgctcagtgcggagaccacggccaccaccctgctggctgacatggccaccaccatcatggagactaccaccaccatggccactaccaccacgcgccggggccgctcccccacactgagggacagcaccacccagaacacagatgacctgctggtggcctctgctgagtgtccaagcgatgatgaggacctggaggagtgtgagcccagtactggaggagagttaatattgcccattatcacggaggactccttagacccccctcccgtggccacccgatcccccttcgtgcccccgccccctaccttctaccccttcctcacgggagtgggcgccacccaagacacgctgcccccgcccgccgcgcgccgcccgccctctgggggcccgtgccaggccgagcgggacgacagcgactgcgaggagcccatcgaggcctcgggcttcgcctccggggaggtctttgactccagcctcccccccacggacgacgaggacttttacaccacctttcccctggtcacggaccgcaccaccctcctgtcaccccgcaaacccgctccccggcccaacctcaggacagatggggccacgggcgcccctggggtgctgtttgccccctccgccccggcccccaacctgccggcgggaaaaatgaaccaccgagacccgcttcagcccttgctggagaacccgcccttggggcccggggcccccacgtcctttgagccgcggaggccccctcccctgcgccccggcgtgacctcagcccccggcttcccccatctgcccacagccaaccccacagggcctggggagcggggcccgccgggcgcagtggaggtgatccgggagtccagcagcaccacgggcatggtggtgggcattgtggcggcggcggcgctctgcatcctcatcctcctctacgccatgtataagtaccgcaatcgtgatgagggctcctaccaggtggaccagagccgaaactacatcagtaactcggcccagagcaatggggcggtggtgaaagagaaggccccggctgcccccaagacgcccagcaaggccaagaagaacaaagacaaggagtattatgtctgagcccccggcactgcgccccactgccagctgcccctcctgggagggcccgggaggagggtgccaccctctccctgccaggggcctggggaccctctccctggctgcctcaggcttctcttacgaagaggaaacgcaaaaaaagaaaaggaaaaaccccgtgctcgcccccttcctcctgccgtccactgcgcggcctcgtcagtcccggggctgactgtccctctcagctctgcgcctgccaggcagggcacgtgctcacagccctgggttgatttatttttttaagggggtagttttattttggtggggttgggtgggaaggaaggctgggggttttgtaaagtgtccactgctcgtcctgttaattttcctcaatttttcttcttcttccttctgtccctcctgccttccttctcttcccaagccctccaatccccatcccaggcttgctgtgtctcactgtccccaccctccttccctacttctttttttgtgtgtctggtttctcccttcctttcctccctttgggtttccagagtcggtgggagaagggcgggagggtgggcccgagtggcccagtgggtgggtggggtggggtggggcaagtgccccaactcccctcaccaggagaggcacctgcttggtgccgcccagggaaggggctcaggcctgacggaaggcctgttctgtgtgtgccgccgggcgacgtgcattgatggggaagctgctggaggagcaggggtggggggtgggagggaggggaaaggcaaatgcagatatatattacagacaaatactctagattccacgagcagcagcctgtggcacccgctgggcgcgggcagcagggaagagggagcaaggcattgtccacagactgctggggtcacttctttgcccacgggctccctgctcccccagttttttttctctctttgttaacaaatgtgtctgagtcttggaaaacaccccaaccccggaaatgtgtgggaaaaagaaaacaaaaactttccaaattccaacgg

SEQ ID NO: 197414 - DNA, 909 bp, Homo sapiens
tgtctatgtttgcttcctccgatgacagcaccaccattcggtccctcaaggtagaaatttttgaattatccttaacttccctcttttcttcctcatgtcccacattataccagttaacaaatcccacaaaagctacatcagagaggtaccctaagattgctcatcctttttataaccatagtgtaagttcagactctcatttattacctgaaacacctcaatagtcttctaatgctttctctgccaatagtttctcctcactgcagtctatactcaatacaacacacaaagtcctcttcctaatatgcaaagctgattatgttaccctccacctaaaagctagggatgcctcattgtacacagcagcacctatacttctaaccatatatctagcctcaggcacactccccacatatacaagatacactgaacttttcacttttttatgaacatgtcatgccatttcataactgtgcctttaaacatgctgttccctttgcctggcatgcctttctcatactttgcacatggcaaactgatattacagttcaatgttcagcttccttcgtaggtatctcccttataactcagtcactcaacaaaaaatgtatcgagtacccatcaatacgacaagaaccttcacctcaaggaactcgtactctatattatgttaggactcattcacactgttattattatgttcatcacattataccatagtcatccttctacttgtctctcctcccagctggatcatgagatctttgaaggcatggctcctgtctcattactctttacacatcttgaaaaacaaatcattttttctctagtttatgacaaaagctaaagaataatgagaatttaagtttttagcattagtgtccaaaataaatatctattcacttacct

SEQ ID NO: 197415 - DNA, 528 bp, Homo sapiens
aggcacatttacatggtggcagatgagtgaaagcgagcaaagggggaagtactacactttaaaaccatcagatctcctgagaactctatcatgagactgtactagggcaatgttgctaaactgtcagaaaccactcccatgatccaaccacctctcaccaggtcccacctccaacactggggattacatttaaacatgagatttgggtggggacacaaagccaaaccatttcatcaaccagtaagtgtatactagacacttacatgtccgtggcacaagttgtacttctgagattttctcatattgatcaggacagatactcatattggctcaaagtcatgttttccatttagcttcttttgacttaagatattctaattcaggtatgctagcaacggaaataccttataaaacggagctttcaaatgacaccctcattgattatcagaaatgtccatgagcaaaaataattctcctgtagattccaaatcacttcctgaccttaacaaaattcagtggagtggacgg

SEQ ID NO: 197416 - DNA, 709 bp, Homo sapiens
cccacgccgtatgggtagttgggttcttaagccactgcagtcacaggatgaggagaggaggagatgctctctggtaatgtggagaaaaaagaagttgaggtcatggcaggtgaagacagtgaggaagagacagagctggcttcttccacagagggaaggctcggccatggcacatctccaggagttctactcataagagtggtcatctctgagtgtgaaaatcctggagatgcagttgagtgggtccctgaccaaaaggttgttgttgaggtgtccaaggtgagggtaccctctgatgtagccccaggagaacctgtctcaatagtgatggcactttctgctgattctgtcataatgggggaagtagaaagcctggtgatcgcttcagtagagatgtctggtgatatggtgaactgatcaggccctgacatggatgttcccctagaggatatcacttctgtcctggagacctcagtggtagcaccactgggcacttcagaaaggacagtgcttccctctgtggctgagctgatcctctcagagctgctggtctccctcaatccagaagtcagggaggatgttggttctatctgaattctgctggtctcaaagaagtcagaagtggatatggaaacactcgtttcccccatggtgtaggtggtacccattggagatgtggctttgggtgtctctgagtcagataggacag

SEQ ID NO: 197417 - DNA, 412 bp, Homo sapiens
aaaacagaggaaggggatagatgtttataaatcacagtccctacattgactacaggtgtgtttgaggagggatgaattttctctctatctttggtgacttcagacgtggctaatatttcagctgaggtgctgctcaaatttggaggtgaactggtttcaggttctgagcttgtgcgcaacatgtctgtggtcttcactgggccaagggtgagaagtgcagtcacaggatgaggagaggaggagatgctctctggtaatgtggagaaaaaagaagttgaggtcatggcaggtgaagacagtgaggaagagacagagctggcttcttccacagagggaaggctcggccatggcacatctccaggagttctactcataagagtggtcatctctgagtgtgaaaatcctggagatg

SEQ ID NO: 197418 - DNA, 502 bp, Homo sapiens
ccgtcgttaaatggatcttgaatatgttatgtaaatgcaaactcccaagtcacaattaaaatggcgactgcaggtgcagtgggtcacacctgtcatcccagcacgtggggacaccaagtgcagtgaggattgcttgagactgcaggtgcggtagctcacacctgttatcccgtagcacgttgggaggccgaggcaggaggattgcttgagcctgggtgacagagcaagactctgtctcaaaaacaaaaaactaatagtaccgtgcacggggttttgtgatgattaaatacaataatatataaaaaatggttagaacctgactcattgtaagctctcagatgttaatagtaactttatatgatgacttctaattctcagagcttttgcctaagtagtcattttgctggggaggctgaagttcagggagatacaaagtgactttctacaacgtgatgtgctgttatctcactacctaaatatgttttttctgttgatacagtat

SEQ ID NO: 197419 - DNA, 475 bp, Homo sapiens
atgcttgaaagtataaggtttcgtttttgcactgacacctcgtcctttatcctctgcttagttacccaccttttccggatgtttttctgaccctcatttcttctccattggccaccttcatttgtttgtacagtcaacaaacatttatcgaccattatataaagctctgagcgtaaaaacatgtaagacactgtctctgctcaatagaagtttcgtctagttagcctcttgcttttaccatgtaatctattgttaattattgtttcttcctagcattcatcatagcactggcatcatttatgtctgtgtttctgattttgttttttgagatcctgccttgttcatagctgtatccccacttccaaatgcaggcattcaataaataattgttggccaatatttgtgaagctcagactgcctgttgaccttcttcccctcatctttccaataaagattttgtgtgtgtgtgtttgtt

SEQ ID NO: 197420 - DNA, 459 bp, Homo sapiens
agagtatcaggtgacccctgagccacctgggaaagcagtgaccaccccagatattaacagtaacctcattacccaggagcaggtgctggtgctggccacatctgagcaaacatcaggccagtcaaagcaaatctggccgggcgcagtagcttacgcctgtaatcccagcactttgggaggccgagatggacagatcacctgaggtcaagatgttcgagaccagcctgaccaacatggtgaaaccccgtctctactaaaaatacaaaaattagccagggatggtggcgcacaactgtagtcccagctactcaggtggctgtgatggtgcacaccggctactcgagaggttgaggcaggagaatcacttgaacctgggaggcagaggttgcagtgagccaagatggcaccactgcactccagcctgggcgacagagcgagactccgtctcaaaaaaaaaaa

SEQ ID NO: 197421 - DNA, 487 bp, Homo sapiens
agagaaatccttcacattttctgtgctctcattcaggatggccctaggcatgttacatgggaaatgagaatatgtgaataaatactctcatactttcttgggcctcaatgaaaagaacatttgttaccatttttagtcataaattaaaattatttcagagtaggaaatataacattaatttagaacatggctgtcatagatgaaacgttttacacatgtattgctgtggtagacattccttgcatttattgaaagcctctcctttataaagttagtgaagtgtgactactctgacctccaaatactgggtgtatttgaactatgaaagtaggtttaaaagttacacttttctttaatgcccattgatgatttctttctttttttttttttaagacgaaatctagccctgtcacccaggctggagttgcagtgagccgaaatagcgccactgcacttcagcccgtgcgacagagagagactccatata

SEQ ID NO: 197422 - DNA, 402 bp, Homo sapiens
cccccaaaacccccaaattgacaagttgactcttaaatgtatatagaaccgcaaaagatctaaaatagacaagaccatcttgaagagaaagaacaaagttggtggattatactatcagattttaaaatttaatatgaaattacagtaattaagacagtgtgatattagtacgagaacagacaaatcaatagaagagagtatagagttcagaaatagactcacatatatatagtggggaaaagatggtcttttcaataaatgattctggagtaattggatagtcttataaaaaaataatgagctttggccttttttcataccatatgtgaaaaattaacttgagatggatcatagacctaaatggcaaaacaataaagcttctgaagaatacatggaagaata

SEQ ID NO: 197423 - DNA, 257 bp, Homo sapiens
agatgaggagtttcctgtattttagctgaaaagctggtggtggactagaaagttggtgttaactaatgggtactagtttaatacctgagtgacaaaataatctgtacagcaagcccccataagtttaactatataacaaacctacacatgtaccccgaacttaaaataaaagttaaattaaaaagagaaagttggtgttaactggaatggcagaaagccctccatgaaccacccttcagtcatgcagagaaaatgac

SEQ ID NO: 197424 - DNA, 356 bp, Homo sapiens
ttttttcttcttttaggtattttaatccatttacatttttggaattactaatagatttacttagacttgtttctgtggttttattattatcaagattttagttccaatttttaaaaaacaaccatcattagctgtcatttgatattatagtcagtagttggtacaatttgttagcttattgttaaaaaattgttttctgtatttagtgttgttttattccagccccttatttaaaaggcttttccctctgagctcatcattgatctggatgaggtgcatactcttttaacagtgtttattacatgtgtatgcgaaggtctgtagataatacgctccattaaactcttttgcatatg

SEQ ID NO: 197425 - DNA, 399 bp, Homo sapiens
  misc_feature (27)..(27): n is a, c, g, or t
agtgttgctgaggtgctctagattatnccccggagccagtactgggaggtagggcacacacaagctggctagtttgggtctttgtagagacaaatttgccatgttagccaggatggtctccatctcctgacctcgtgatccacctgcctcggcctcccaaagtgctgggattacaggtgtgagccactgcacccagccatggggtgcattcttaacctctctgtgcctcagtgcccttatctgtaagttggagataataatagtatccaccttacagggctattaggaggattacatgagttgttaggaggctttatacatgtacagcactcagaacagtgcctggccctaataagtgtatgtattaggctgttattgtgacacaggtgtttgcctgat

SEQ ID NO: 197426 - DNA, 400 bp, Homo sapiens
  misc_feature (27)..(27): n is a, c, g, or t
  misc_feature (128)..(128): n is a, c, g, or t
agtgttgctgaggtgctctagattatnccccggagccagtactgggaggtagggcacacacaagctggctagtttgggtctttgtagagacaaatttgcatgttgtctaggctgtctccaactcctgngctcaagttatactgccactctcggcctcccaaagtgctgggattacaggtgtgagccactgcacccagccatggggtgcattcttaacctctctgtgcctcagtgcccttatctgtaagttggagataataatagtatccaccttacagggctattaggaggattacatgagttgttaggaggctttatacatgtacagcactcagaacagtgcctggccctaataagtgtatgtattaggctgttattgtgacacaggtgtttgcctgat

SEQ ID NO: 197427 - DNA, 291 bp, Homo sapiens
ctatcactttttcttttccctttttctctctttttattgttcatcataaccagcaaagtggatttcttaacctgctagtcagtcggttgtcctttgacaagcttgcagtatttcagtgctatggtagggacgcatggtttcttgcccttctccctgtattcttcagtaacttctacagcatttttttacccctaaaaatgcctcaaacctgccttaactttattctgtatgggccgagctctctccttccttttgtaataagcttctgtttctattttctcacctactgtt

SEQ ID NO: 197428 - DNA, 328 bp, Homo sapiens
aacaaactgttagggagatgaaagggcaggagaatcgcttgaacccaggaggcagaggttgcagtgagccaagatcgcaccattgcactccagcctgggcaacaagcaagaaactcagtctcaaagaaaaaaaaaaaaaaaaaaaaaaaggaaattctgatacatgttacatcatggatggaccttaaaaacattctgctaaagtgaaagacaccaaaggtcacatctgtatggttccactgacaggaaacgtccagaacgggcaaatccacagagacggaaagcagaggagtggctgctgggggagagaaagtgcggagctcctgct

SEQ ID NO: 197429 - DNA, 577 bp, Homo sapiens
tattcttccaattcaagattattccaagttattaaaacagttctttctcttccatttccttatccttctatactaaatatactgtttccctttattgtttagttttttttttgatagcacaacacttggtttcttaaatggtaacttttatctatataaaatatccctgtactatccacttaacggttttggtcttgaattctacttattttggcataatttacatacaataaaatacagattttcagtataaagagctttaacaaatatataggccacctaccatactcacaggcttatgtgatcctcctgcctctacaaaataaaaaaattagctgggcatggtggcccacatttgtagtctctgctactcaggaagctgaggcaggaagatcaagagttggaggttgcagtgagctatgatggcaccactgcactccagtctcgtaagaccctatttcaaaaatttttcttccagatttcctatctctatgtacacttaggctttcagatttattttttttaactacggatctatcagttgggaagcatacctttcagagatatctacattgga

SEQ ID NO: 197430 - DNA, 363 bp, Homo sapiens
gcagcctcccagcttgccctgggcacttctgaagttccccagtcccttctctgaaggtgttacatggggcttagctgtctctgtgtactctcatgtcttgaaaaacaaaacagttcttgggaacagtcaggatcacaccgagcactgtgactcagtagaaaaagcaaaggtttgcagcatcagacatgatggaatttgaggtcagcttccaccttgtaccatgacctcagagagctgcctgaccatctccaagcacgggtccctcatttgtgaataggaagagttatattactttgcaaatttctgatggcatcagaatgcgctggcacaaagtaggtgctcagagaatatttgtgggaggtt

SEQ ID NO: 197431 - DNA, 550 bp, Homo sapiens
caaaacagtaacaacatctcctacttattgaccacttccagacaattcactagctataacaatgctattagagactgctattcccatcttagagatgagtaacaaaggctcacaaaactcacttagctccatggttctcaatagagaatattttgcccctaggggacatttgccaatgtctaggaatatttttggtttttttggttagcatgacaggggaaagaaagctactggtttacattgggtagtggccaagtaggctgctaaacatcctacaatgaataggacaggccctgcaacgcagaactattcattccaaaatgctagtagtgctgcaatggaaaaagcttgattctcgattaactgatggaagcatattcttctaaccacagtgccttaccacctgaccagtataatatgattgagcacctagcaaagcacatgctcaataaatacttgttgaataaatgatgaaagggatttgaagaattgttttactttaggaatttttctttacctttctgggtctcaatttcctcagctgtaaaat

SEQ ID NO: 197432 - DNA, 346 bp, Homo sapiens
gagtcagggtctcgctctgtcacccatgctgaagtgcggtggtgccatctcggctcactgcaacttctggctcctgggttcaagcgattctcattcctcagcctgcccagtagctgggactataggcatgcgctaccaagcctggctaatttttgtgcttttagtagagacggggttttgccatgttggccaggctggtcttgaactcctggcctcaggtgatatgcccgcttcaggttcccaaagtgctgggataataggcatgagccactgcgcctggcctaactttttctactgaggggcagaacttcctttgcatatgttatgatttacctagaatgccttt

SEQ ID NO: 197433 - DNA, 385 bp, Homo sapiens
tgagaatgcctctcaattcccaaagcccaagacacaactctttctttacccgctgacagagatgagagcaaggggagcatagttggcacaatctcttcagacaacaattgggaaacatcttacaaaatgacaaatgcatgtgccctctgccccagcatttccactcctaaaaatttcccttccatcatgcctgcacatggttacaaaatggttacacaccgcagcatggttacaaaaggaggggctgcgaacaactacaatgttcacgaataagaggcctggtgagataaacctgggtacacgcacagagtggagttccacacagctatctaaaaaaaaccaaaggggccgggcgcagtggctcatgcttgtaatcctagtacta

SEQ ID NO: 197434 - DNA, 263 bp, Homo sapiens
ttgggagctttgagggtcttgttggaaacgggaatatgttcacaaaaaactagacagtggcattctcagaaacttccccgtgatgtttacattcaactcacagagttgaacactccttttcagagagtagttttgaaacactcctttgtagtatctgcaagtggacatttgaagcgctttgacaccttcgttcgtaacgggcatatcttcacataaaaactagacagaagcagtctcagaaacttctttgtgatgtgtccact

SEQ ID NO: 197435 - DNA, 523 bp, Homo sapiens
aaactgagtaccactaagttcttgatattaacaagccatataggcatctaaatagtgacaaatcagtttttggcttatttaatagatattatctacactactacatttaaaaatcataaagataaaaatgaatacattaacctatacactgtgttataatctttaacccttcaataattgttcctatgtatttacattatttctacagattgtgttttaaggtgcttgaggcctgtaccccataattttgaagacagtgtttgatgtgtataagctaatttgatagtatgcgtgttgaattaaaataccaactcatcggtcaggcatggtggctcacgcctgtaatcccagtactttgggaggccgaggcaggcagattacctgaggtcaggagttcaagaccagctggccaacatggagaaaccccgtttctactaaaaatacaaaaaattagccgggcatggtggcgggtgcctgtagtcccagctactagggaggctgaggcaggagaatggtgtgaacc

SEQ ID NO: 197436 - DNA, 409 bp, Homo sapiens
gcctcaatctcctcttcctgctgtcccagaagcgggtggctgagttccacatggagctggagtggctgcctgccaaggacatccagaccaatgtctacaccaaaaaccctgtgtccctggagcaatacctaatggagggcagctacaacaaagtgttcctggccaagggtaacatcctcgccaagagctacaccgtcttcatcgacatcctgcttgacactatcagggatgagatggccgggtgcatcaagaaagcctatgagaaaatcccttttaccgaggccaccagatcctcttcttcaacacacccaaaaagatgaccgactacaccaagaagtgagggtgggtcccgggccccaacaactaatatagttttgccggccagcagcaggagccagaagacactacc

SEQ ID NO: 197437 - DNA, 385 bp, Homo sapiens
aggaatctttgcaatgatggaaaagacaggtggcagtgtcttggcagggttcaggtttcagctattttttcttctgtggttcttttactccagaaagtccagttctttaagttctgagaatagaaagacacatcctttgcaactccagcaagaagcttacacccaggatggatgcggtcagctcttgtcatggttttgtgttgtggggttgtctgttctgtgtttacccgtaggtgccatcattgattcccaaaagcatcaagattacactttttagaatggacaaattagaacattgtcctgaagtggaggaaatggggaagaagtggaggcaaggaccctgctcaggcatcatttctttgctgagcacagccatgcagtcccc

SEQ ID NO: 197438 - DNA, 460 bp, Homo sapiens
gttttattctaatagaaaagtcaccatttttaaaataaacacaatccttaaggaagaagaatgtgattacagttctttagtaatcttgacatcaagttaataacaattaattgtcagattttgattttaaataatcatgaaacattttaaaaatacttataaacttttaattttctaaaaatagatttatcagttacaagcctgtttaaaactatagtgggtttttcaccactgataaaagcattcacaggatagtatttttgtagcattcaaaaaaagcacatatctagtggtagctttacatgtatgtggctcagcttatttctaaacaaaattttgagtgtgcgttttgccgaaagtcttcactcaccattaggatgaatcctttgtttttaaacttgctaaacaattttcctctatcttaaatgctaaagtcaagttgcttttgacttaattcaca

SEQ ID NO: 197439 - DNA, 479 bp, Homo sapiens
tcattgtataaaaattttagaaactagttgtgaaatctttaaaagaaaatttaaaaactcaaaaggcaataatctttaggcattaagttgaagcctggcagctattttcccaaatgccatcagaaaagttctctttctcttacacatacacatgtgcaaataacactcccagattaaaaatcactactggcatgataggaaaatgacctcattcattctttgtgttccaaaaaaaaaaaaagatcccaacaaagcaaagcaattagcttggttgagtgaatagatagcaaaaggggtggatggactgccccacattttcttgctcttaaaagatgatatccctaataataatggactagagttatttcgtgtgtgtgatttgaaagtcaagttaagtgtctcataagtgtttttccctctgtccctcagatttggaccatacagcagatgtccagtgagtatagcgggagtccattcct

SEQ ID NO: 197440 - DNA, 305 bp, Homo sapiens
attcaccaagtatttcctgtgtatctccgaggtgccaggccctgctgggagtgaagctgctgagtacgtgtggtgttgcctgtgttttcactacacttatatttaggtgtggaagaaaagcacacaaacaggcaattgttatacagtgtgaggagaatgcagagcacataggaggggggcctaggactggggggccaaggaaggtggctaggagggcttcctggagaggtgatgagaatatggaaatgctgagttgctgcaacaaaataccatagactgggtggcttataaacaaccgaaaatta

SEQ ID NO: 197441 - DNA, 183 bp, Homo sapiens
caaagaataaataaataagttagccaggttagtggtgtgcgcctgtgtttgtagctcctcaggaggctaggttggactattgcttgaggtggggaggttgaaactgcagtgagctgtgatcacaccactgcactccagcctggggaatagagcaagaccctatctcaaaaaaaaaaaaaatta

SEQ ID NO: 197442 - DNA, 479 bp, Homo sapiens
agaagtgaaaacacatatccacaagaaaacttgtgcatgaatgtttataacagcattatctataatgaccaaaaaagtggaaacaactcaaatacccaccaacggatgaatggataatcacaatgagatatattgatacaatgagatatcatttaaccatgaagaagtgaggcactgacatacactacaacatggatgtatctcacaaacattacgctaagtgaaagaagccaatcacagaagacaacgtattgtttgaatcttttcatgccagaatacagagacggggtttcgccgtgttggccaggatggtctcaatctcctgaagtcgtgatccacccgccttggcctcccggggtgctgggattacaggcgtgagccactgcacccggctgaaattgtatactttaaagggatgaattttatggtatgtgaattatgtctcattaaaaaaaacaaactgttaagaaaaaaaaaaa

SEQ ID NO: 197443 - DNA, 530 bp, Homo sapiens
cagatattttttaaagaactacttatttttaaaggactaagaattattttcaaagaagtatgtcttcaagcatcatgagcagaatgaaaggccgaatgctctccttgtgacaaagtgagtggacagacccatccgcagtgcagcatgcctatcaccagccaccagcgcagtccaaagttacatgattgaaaaagaaatttgcacctgattgaagatgctttgggctcagttttgctgtcctctccccacagaagtctaagctgttcagactgctcaagataacacttcacacagtttaggaattgtggtttatgtcgaacgccaatctatatcagctttcataacatttaatatggtggggggagtgataggtgtttgagaaattaagcaaaaccataaattttctcttggtatgtatagtatatacaaggagagctttcgagtaccttcttcctagtgttctctcttaactcttgatgtgagtgaaaagcttcatccattgcatgacacagactaggtcattgtgtttg

SEQ ID NO: 197444 - DNA, 633 bp, Homo sapiens
cagctatttgagaggctgaggtgggagaattgcttgaacctgggaggcggaggctgcagtgagccaagatcgtgccactgcactaaagcctgggcaacagagcgagaacctgtctcaaaaataataataataataataataataaaataaaattctagaaatattaagaaaataaaattataaataaataatgttactggaattcttacatcccatccctctcactaaattcctatttagcaaatcacattaggctaataagaaggctaaattctaaccacctgtcttcctatacttccatatgatcaaataaacatgattactaatacaaaaatagttcctttcggcccggtgtggtggctcatgcctgtaatcccagcactttgggagaccgaggcaggtcgatcacttgaggtcaggagttcaagaccagcctggccaacatgatgaaaccccgtctctaacaaaaaatacaaaaattagcagtgcatgggtggcctgtagtctcagctactcaggaggctgaggcaggagaattgcttgaaccggggaggcagaggttgcagtgaaccgagatcgtgccaccgcactctatatcccgggcaacaatgtgagactcggcctcaaaaaaaa

SEQ ID NO: 197445 - DNA, 996 bp, Homo sapiens
tgaggtagggtctcattctgtcgcccaggctagagtgcagtggtgaaatctcagctccacctcccaggttcaagcgattctcatgcaacatccacctcccaggttcgagcgattgtcatgtctcagcctcccaagtagctggaattacaagtgcccaccaccacgcctggctaattttttgtattttcagtagacacagggtttcgctatgttggccaggctggtcttgaactcctggcctcaagtgatccgcccacctcggtctcccaaagtgctgggattacaggcatgagccactgtgcctggccgaacctctgcttttaaccccaatggatttaagtagcatttacaagaggtagtctcaaactgacacgttttactccaggataaccttccccagtcccttgaggttcccctacactggtgagtaaacaagctgtaccatggtgccataaagaaatggctttctaccagagggaactaaaattagagagaaaaagttacaagtgctagcaaggatgtggaatatttggacttcttatatactgctggtggaagaatacgctggtacaacttttgaaaactggccatatctactagagcagaatagatactcttatgaagtgaactgtgtccacctaaaatttttaagttgaaattctaatccccaatatatcagaatgtgacttatttgcagacagggcctttaaagaagtaactgaggttaagtgaggtcataagggtgggcctcaatccaatacgactggtgtcctaaaagaaaaggagaataggacacagccaatacagaggaaagatcctgtgaagatacagggaagagaagacagtcatttacaaaccaaggagaggcttcagaagaaactaatcctcccgacagcttgacctcagatttctaaccttcagaattgagaaaataaatttctgtttaagccactctatctgtgatacttgttacggcagccctagcaaatgaataca

SEQ ID NO: 197446 - DNA, 218 bp, Homo sapiens
gcattcccccttagaataggaacaattcaaggatgcccactttcatcacttttattcaacctagtactggaagtcttagccgtatcaatcaagtaagagaaagaaataaagggcatttaaactgaaaaagaggaagacgaaatatcactggtcaccaatattattactagttctgctattcaccaacaatgaccaagctgagaatcaaacaagaacag

SEQ ID NO: 197447 - DNA, 388 bp, Homo sapiens
ctgcaaagtgcagggcctgttctaggcactggagactcagcagtgaataaaacaaagtcattgccatcatggagcctacttttgagggggctggactattcgcagttctgtgagctgccatgctgtttcgtacctttgctggaatgtgcctgcccacagctaatcttcctggacagtgtctgctggaatttcaggacgcagcgacggtgtagtgaccccactagcattaccactcttctttttatgtcttccttgtgttgtgtgcttcaagcttcctcttcaccagggcctggccttaccaggctttgtgtttccagcacctatagtagtgctcagcgcataacagatgcttctaaatgtttattgaatgaaaagcacacaagcatgg

SEQ ID NO: 197448 - DNA, 789 bp, Homo sapiens
atatttttaatcttcttgggtaaatacatagaaatgcaatttctgtgtcatttgttatgatcaacttcattaaaaactgcagactcttttcaaaatcagccataccattttgcattcccaggatgttacttgacaacatcaccacacttggcatggtagtctttttaaattttactcattctggtggatgtatagtggtattttttagcttcaatttgaatttctcaaataactaatgatattgaacttcttttcttattctgatttgccatttatacatcatcttttttgaagtatcttaaaatcttttgtctgttttaaaaattaggttgttgtcttaatattgagttgtcagatttatttatttcatgtaagggctttatcatatatatattttataaatattttctcccattttatagtttgtcttttcatttcataatgggaaattgttccaaaatacacttttgttgtaatctattgtaatcagcattttaatgcatagttagcattcagtaaaattaatcaattttgactgtacaatttagtgagttttgacagctgtataaagcagtttcccatcaccacaatcatgatctagaatgtttctttcacaacagagcctcgcatgtctctttaaagtcaattctctcccctcactctcaccctgaaaaccactgataggctttccaaccagtatgaagggcagacttctaaattagaggaaacacaattcattgattattttctcttatgatttgtacattttgtttttaaaacatctttttc

SEQ ID NO: 197449 - DNA, 161 bp, Homo sapiens
atgttcctttctctaaatttcaaaaatattttcacccttattggatgtaaagagtcttttttcattttataccatcagattacagagagcttatgcgctggtccgtgtgtgtggtgggctggggagagtgtgggtgtgtgtgttcatgcgcgcatccttta

SEQ ID NO: 197450 - DNA, 811 bp, Homo sapiens
tttcctctgtctcgaaaaaaactttcacttgacccttttgctacattgtatgtccacagttcaaagaacaaaaaagcatctatgcccattgtttccactttcttatcttcctcctaagctctgtgcagtctgtgtccactgccataactgtttggaaagtatctctaggtatccaagggtgtcttctcattccttcttctctgagctgacccctccttcctgaagctccttttctttcctttgtggcccaccatactggtctagctcccatctctccaatagtactctctcttccctggctcccttctgccctcagtctttggacttctctttctgtagtccattcttcctacctgcttttaacccaagagactatccaggctcacactgatgataatcaccctcctcccactcacactaaatcaaaacaatgggatcactgtgtaatcccccactttctttctttatatccaatcagtcaccaaatcctctagaaacagcatgaactatcatcactagggtgaagttgcctaaatccttgtgcctggctcttcctttccatttctacctctatctcagggcctcaaaaatgctcatttagtttcctcaacacccccagactgaccttcaaaactgctgactctacgcacaaccatcaaaatacttgctctatgcacaattgtcataagagttggatgcagcagtgagtcagcatggcttgggggtaagggagagaaggaatgtacgggagataaggctggagaagtgtgtaggggtcagatcacaaggtgcttgcaaagctttactaaag

SEQ ID NO: 197451 - DNA, 572 bp, Homo sapiens
ggaagttcttgagaggcagagggagagcatgagaatgttaggaagggaggagagattctcacacatctgggaagctgacaatccatcagcatggccagaaggaaaataaggaggaggagcagaaatagatgaggctggatatagaagcagggctgaagctgtgtcgattgtggtaaagagttgtgattctatccagaacgcaataggtagcattctaaacagagatcttttcaaacaagagtcagcaagtattttctgcaggaggctaaatgttaaatattttaagttttccaagccatatggtctctctctcaatgactcagctcttccattataccatgaaagtagccagagacattatgtaacacatgtattggctgtgtcctattacaactttacttacaaacgcagactgtgtcagacatggtccatgcatggtagtttgccacaccctgttttagaaagctcaggtttatgatgtgatggagaatgcctacaagagctcttgttttaaatggtagagtgaacatacactggaattctatcctgcttatctcctaagctcttgatag

SEQ ID NO: 197452 - DNA, 489 bp, Homo sapiens
ctttgctgaagaacgactttaccttctggagaggtttgggcaggctgggggaagagagtaataggggcccattagataggtctgagtgggaagagagtttaatgagggaaaagagggatatgagatttgatgtggcagctggataggctctcagggaaaggtgagtaagcaaccagttgtcctgatagccttcatcttaggcctagtctctctacatcattgagtggtgaaacagacctgctgtatctctaggaactaaatttggtttaaaagatgacactgcttctggcagggtgcagtggctcacgtctgtaatcccagcactttgggaggccgaggcaggtggatcacaaggtcaggagattgagaccatcctgaccaacatggtgaaaccccatctttactaaaaatacaaaaattagctgggcatggtggcgcacacctgtagttccagctactccggaggctgaggcagaattgcttgaaccc

SEQ ID NO: 197453 - DNA, 2089 bp, Homo sapiens
  misc_feature (1)..(1): n is a, c, g, or t
  misc_feature (4)..(4): n is a, c, g, or t
  misc_feature (6)..(6): n is a, c, g, or t
ngcncnaggccacctcagccccaaccccaaccccagccgcatcccctgccccagctgacgggtcaaagcctcaggagagtgtggctctccccaggcgctaccaggaggggcaggtctcagccagctggggaaaccttattgccatggttcttagaagccaccccttccccaggcaagacaggccccaagggagtgtcccgagggcggttcccgggagccccgtgggtcccagcacttccacacactctgaggacagacacggcccctcttcttcagtggggacagtcatagggacaggtacagggggcctggttgaggctggaggtcagccacagccaagaagctccgagaccaacggatcgcccagcccagaccctcccccaggcctaagaggagagggaaccagggagaaaagtctagacccgctgccccaagccgcgatgcccaggggccccgcacagccccccgcgcagaggccgcctggccccgcggcctcctcctctgcgaggcgctcacagccggtaccccagctacggaaacgcagcaggtgcgaaatcgccccgagctcggagcaggaggtcaggccggccgcctcgggggaccctcaaggggaggcgccgggggaggggggcagccctgccggccgcagcggggcgctcacggaaaagcaggaggaggcccggaagctcatggtgtttctgcagaggcccgggggttggggggtggtggaggggccccggaagcccagctcccgggccctggagcccgccacggcggcagccctgcggcggcggctggacctgggcagttgcctggacgtgctggcctttgcccagcagcacggagagcccggcctggcgcaggagacctacgcgctgatgagcgacaacctgctgcgagtgctgggagacccgtgcctctaccgccggctgagcgcggccgaccgcgagcgcatcctcagcctgcggaccggccggggccgggcggtgctgggcgtcctcgtactgcccagcctctaccaggggggccgctcagggctccccaggggccctcgtggcgaggagcctcctgcggcggcccctgtgtccctgcctctacctgcgcacctgcatgtgttcaacccccgggagaacacctggcggcccctgacccaggtgcccgaggaggccccgcttcggggctgcggtctctgcaccatgcacaactacctgtttctggcggggggcatccgtggctccggtgccaaggccgtctgctccaacgaggtcttctgctacaaccctctgaccaacatctggagccaggttcggcccatgcagcaggcccgagcccagctcaagctggtggccctggacgggctgctctatgccatcggtggcgaatgcctgtacagcatggagtgctacgacccgcgaacagacgcctggaccccacgcgcgccactccccgcaggcaccttccctgtggcccacgaggctgtggcctgccgtggggacatctacgtcaccgggggtcacctcttctaccgcctgctcaggtacagccccgtgaaggatgcttgggacgagtgcccatacagtgccagccaccggcgttccagcgacatcgtggcactggggggcttcctgtaccgcttcgacctgctgcggggcgtgggcgccgccgtgatgcgctacaacacagtgaccggctcctggagcagggctgcctccctgcccctgcccgcccccgccccactgcactgcaccaccctgggcaacaccatttactgcctcaacccccaggtcactgccaccttcacggtctctggggggactgcccagttccaggccaaggagctgcagcccttccccttggggagcaccggggtcctcagtccattcatcctgactctgccccctgaggaccggctgcagacctcactctgagtggcaggcagagaaccaaagctgcttcgctgctctccagggagaccctcctgggatgggcctgagaggccggggctcagggaaggggctgggatcggaacttcctgctcttgtttctggacaactttccccttctgctttaaaggttgtcgattattttg

SEQ ID NO: 197454 - DNA, 1111 bp, Homo sapiens
tggcaacccgctcgggtccccttccacactgtggaagctttgttctttcgctttttacaataaatcttgctactgctcactctttgggtccacgctgcttttatgagctgtaacactcacggcgaagatctgcagcttcactcctgagcccagcgagaccacgagcccaccgggaggaacgaacaactccagaggctctgccttaagacctataacactcaccgcgaagatgtgcagcttcgctcctgagcccagtgagaccacgagcccaccgggaggaacgaacaactccagacgctctaccttaagagctgtaacactcaccgcgaaggtctgcagcttcgctcctgagccagcgagaccacgaacccaccagaaggaagaaactccgaacacatctgaacatcagaaggaacaaactccagacgcgccaccttaagagctgtaacactcaccgcgagggtccgcggctgcattcttgaagtcagtgagaccaagaacccaccaattccggacacaccggcacagtgttgacagacaggaaggtaggacaggaaatgtagctgaaatataagaacttaactgtctaccaaatgattacttatgtgatcgtaattctatgagttgtctacctgggataaaggatgatgaggatgggtttctggcagctaggacaattatttgaaagaaaacatcaaaagcaaaagaagtccccaaaacaaaagtcttaggaatgagagcatacgttagggcaaatctataaatttcaaggaaaggattctgccatgagtcaggaaaattcaaagttccatgactcctacttaatatttaaaagaagacgatactggttttctaacagatcaagaagtaaaactagaggtgatggatataattaaaaattaaatcaatagtcatgcacaaaaataatatcaggtctctactgaggtatgtattcaaacaatggaaacattgatggccagggcctaacgaagccattaataatcataacagtagccactgaattaataaccacattggaacgatggaatggatatagtagtcacaaccagaaaggtataaaggacctctgtgtgtagaagaaacagaacaa

SEQ ID NO: 197455 - DNA, 587 bp, Homo sapiens
actagcacatttcaaatgctcaagagccacatgtgggcagtggctagcacactgcacagagcagctctagagggtaacagaggacgccagagaaaggctggggttcctgggttaatctatggagcagagctgccccactggctcttagactattttaaacatttacttcagaagaaaacaacttctaccttgttagaactactgtatagggtattttgttattacagcttatcatatacctaattagtacacccattgggacctcacagaaggaccctgcagcttctcagttatgaagcaacccttcaaagaatgaacaggccaggcacggtggctcacacctataattccagcaatttgggaggccaaggcaggcaaatcacctgaggtcaggagttcaggaccagcctgggcaacatggcgaaaccctctctctactaaaaatacaaaaaatcagccgggtatggtgtaatgtgcctgtagtcctagctatttgggaggccagggcaagaggattgcttgagcccaagagtttgaggctgtagtgagctatgataacaccactgtactccagactggaccacaaa

SEQ ID NO: 197456 - DNA, 424 bp, Homo sapiens
gaaggtacaacttagcttgagctttgaaagtaaaggaaagaatagggggcatttttttaggcaaggataacaacataaatgaagcctgtagtagtagtttaatagaaagaaggagtttggttctacagcgtgtgatacaaaattaggcatgtattgagctgcttcgggggggctaaactggcttatatttagtataaatcagaatatctgtacagaatagatcataaattcatcaattaagatatggaaatatacttatacgtggtgtttaaactcctgcatgatgggatgtgtgcgtttgtttttatttgccttttatgcctgaggacaatgctgctgtcttcttaaattcagcacctattgattaccccagataaaaagttctcttcactagctccattttatttatgacttatagcagggt

SEQ ID NO: 197457 - DNA, 297 bp, Homo sapiens
agggaggaagagagagagaggagtgtgtgtgtgtgtgtgtgtgtgtgtgtgtgtgtgtgtgtgtcagggttgggaccagagcaggaacacaagcaagaagggactgagaattgtatcaacagtgcaaaagaagtcaaaggaattacttaggcataaaatgaggactgttcctcagagatgagtcagtcctgagaagccaaccaagccgggtactctgagtctggatccgaccttgctagaaatatggtctgaggcagcagaggtcctatgagagtccacagaaggtcagcacaggct

SEQ ID NO: 197458 - DNA, 1126 bp, Homo sapiens
cgagatgttacaacaaataccaacttttcagtggcttaataaaatataaatttatttttccctcatgtaatagtccactgcggatgtttctggttggcagacagttgtttttttctgtatggtaactcagggacataggctccttccattatagggatccaccattccctagggccttgaattcttctgtttccagtggacagaattgcagagatagggtggagaatgcatactttcttctcagttaccttggcctggatacgacacacatcagttctgttcacattcccacattccattggccggaactagatgcgttacctcacctgtctgcaagatgtgtgttccaggggagggaaatggaaaacattatctggctggggaaccacaggtgtggtaacagtctcatttgtagttggaaggagtagaaattaggaatgccttagtggaggacactgtgtgatatctgtcaaattttaaaacatacatgttctttgacctcaaaattccacttccagcaatttttcctacagatatacccacaaatatatacatgtttacacttggaggatatacctagtaatattgtaatagtaaaagattggaagcattctgaatgtccatcaaaggggactgagttggaaacattctgaatgtccatcaaaggggactgagtaaattattgtttatccatacattgaaacactgcagccactgagaggcagtgatatatgtactgactggggagagaaatgcaaggtacagaaccgtgtgttcacagctaccatttacttaaaaagagaaatatatacatgtatgctcatatattcatagaatatttatggagggatcacaagaaactggaaggatcacaaaaaatgtaacagtggctgcttctggttaaaattataaggtcatgggtcatgggatgagagagtcaggcttttactgtgtcctcttttataccttttgatgtgcacctatttaaatataaaagtcagttgtagaagtataataaataacatggaaagatggctgtaatatattattgcctaaaaacaagcttactgaaaattatgtacaatatgttctcacttttataaataaataaagaaatgggatatac

SEQ ID NO: 197459 - DNA, 433 bp, Homo sapiens
ggcctaatgttcactgccaggttttaaatgcaagaagcctggggagggtggctcatgcctgtaatctcactttggggaggccaaggcggaccacttgaggccaagagtccaatctgggcaacatactgagaccccatctgcacatatacaaaaaaaattagccaggcgtggagtgtgcctgtagttctagctattccagaggctgaggtgaacccagtagcagttcgaggatatagcaagctatgatcacatcactgcactccagccgttataatgagactgtctttattaaaaaataatttttaggccaggcacagtggctgacacgtgtaatactagcactttgagaggccagggcgtgcagatcacgttaaggccaggagttcaagatcggcctggccaacatcacgaaaccccttctctactataacta

SEQ ID NO: 197460 - DNA, 356 bp, Homo sapiens
atcacagtagctaactctaggaataaaaaatgatttatttttatcgaatccccagagtaatctgattatctgtcaggcacgagagataaaggctatttcttttttctcacgttagttcttacaatgttttggaaaatactaacgccaggggaacccgcagcaggaagagtgctcagccctgcctctgctgggaatacaccagcccctgaaaccaagcacagtcacatgatgggcaggatgctccaggacagagaagcctcaccgccgagggcagcaatcacgcccccgggtttgcaatcatatctctgcagtgagtggcagtgcgccagctctctgccacctttctacaggtgaca

SEQ ID NO: 197461 - DNA, 260 bp, Homo sapiens
tttgcatggttttggcattttgtagttctgtcaagttagcatagcttccttttgtactggatagagcaggacatgggtccggggcaggagctcagacatggaaatgacatcatagacctgagctctcaattccctcgatggccaggctgcaggtgccagtgggctccaaggattctattattaatagggctatgacttagctctatagaagccatcagggttgaattgcattccatgtggaaaataaatagaattttgca

SEQ ID NO: 197462 - DNA, 402 bp, Homo sapiens
ccccgactagcccgacagtccccgactagcccgacagtccccgactagcccgacagtccccgactagctccttcagctcacaccggatcgcttacctgcctggaagtcttgtctggcatgttcctcagacaggtgtgtgagcgtacattgccctctccagcttcacaaacaaatgagtcatcgaagtgacctttttcttagtactggcacctgaggcagtggcgtgtgaccacacgcccagcacctgtgggagcccctgtgagctcttccgtgtctcctaatgtgggtgtgcgctgggtttctggatctctaggtctggaaaggctttcctttctttgacacccagcagtgatcttagggagtgcttcatgctctcttcaggatggaacagagcgctttgca

SEQ ID NO: 197463 - DNA, 362 bp, Homo sapiens
tagctggtaattccagcctcatggacatacagatgtgtgccatcacgctgggccaatttttatcatttttattttattgggtttgtttggtttgtatttagagataggctcatgctgtgtcaccaggctggagtgcagtggcgcgatctcggctcactgcaagctccgcctcccaggttcacgccattctcctgcctcagcctcctgagtagctgggactacaggcgcctgccaccacgcccagctaattttttttgtatttttagtagagacggtgctagccaggatgatctccatctcctgacctcgtgatccacccgcctcggcctcccaaagtgctgggattacaggcgtgagtcacc

SEQ ID NO: 197464 - DNA, 133 bp, Homo sapiens
agtaagaccagccaagagatgttgagttacacatattgtttggggccacagagccctactctgtttctcctccacctgtctgatcccacagtactaacaatacattgtctgtaggcccagttgtaaagactct

SEQ ID NO: 197465 - DNA, 852 bp, Homo sapiens
tggtaacccccattctactttcagtttccgagtttgactttctagattccgtgtataagttcatgcagtctttctgtggcttattttagcataatgtcttctagatttatcgattcacccatgttacaaataacggtttccttttaaaaagctgaatagcattctgttgtgtctacataccacatttaaaaatccatccgttaattgggcacttgggttgcttgcatatcttggctagtgtgaataacgctgcattgggtgggagtgcagacatactctgtctcaaaaaacgaagtattagatcctcaatctcaaggtattctaagaaattttggagaccattgagtctaaaattcccagtatctttgaggcaggaacagacttggagaatgtagtttatgagcaggagtttggagctggaagaaatactgctttctgttggtggttaatgctgtcagctccttggattgtggctttagccctaaatattggggcagtagagactcttacctggaaaacaattgagggccacccatgttagcggcaagaggcagaggaaagcttggatggttgggctgaagatggtggatgtgctgtccctgtgagagtgctgatgctggactctggagccaacgacaaagtgtttgagcaagcagggtccaagcaagggcagtcgagggccggatgaagtgggcaggaaccgagtttcccaggtgacatcctgcctgtgctcatcacgccgaggggtgttgcacaatcacaccgattctttgtcactactgagtgcagtgttcttaagaatggggacctggcagctgggtgcgatctcagctcacaatcactagtgaattc

SEQ ID NO: 197466 - DNA, 343 bp, Homo sapiens
gacttagctgttactgtagattctgttgataacagttgcttaaactcaactctgtccccaccatcacacacttggatgctaagatcaaagttgcctagttacttccagattcgttcaatatgcatttattgaacactacttcctaggtaacttgccaggcacttgagtaaaagggtgaatcttctcatttttttctcatcccacagaaagtcctactttctcacaaccaataagcctcatatcaacagcaaactccaagttgcacagagactatcacatttgcaatcttcttgtttttctgaaacaagcattggcataaacagtaacagcaatgacttaggcc

SEQ ID NO: 197467 - DNA, 561 bp, Homo sapiens
gtagcggggattacaggcacccaccaccatgcccggctaatttttgtatttttagtagagatgaggtttcgccatgtgggccaggctggtctcgaactcctgatctcaggtgatccgcccaccttggcctcccaaagtcctgggattacaggcatgagccaccgcacccggccccttatattcttttatagtcatcccttttctccactgccaatccctggcaaccactgtccatataggttgctttttccagaatagtatataaatggaagcatgctcctgattcattctttgtctggagaaaacttagttcctcaaagcaaacatatcatcaccttcttatgttttcaggaaggaaaaattacctttttacttatggccaatgctgcccaagttttcctggttaccttaggtttggattgtgtacattcttcgcacagcccattccgtcttgttcatgtacctagcgttaatgatctggagtacatcagaggtggccattctctgagggtattttagatttataggtcattcaatactgggtctgaccaacagttctag

SEQ ID NO: 197468 - DNA, 505 bp, Homo sapiens
gacatgtggccaaggcaaattggtttcttctttggtccaccaccaatggacagggattgaatggagcactgtggagggatctggaggctttgtttggtgcaagaaggttccatgaagctaggctgtccttcttcttcccacaccaggcattcaaatgaaacagctgtttctctctcgaaagtcccagcctgtctctcttctgggcagccctagtttgtgaatgactacaacgtactaacaccattgcctgtgctgggcactttcactttgcaagatgagagcagaaaacatttactaagagtctgtatgtgaatgggttctagtctggttgctcccaaacctagctgagcgtgagcatcacctacatacctctgccctggcaaaggcctactgaatcagaatctcctagagatggggcaagaaaatcatagtccactaggacccgaggatgcaggatttctaggcttaataaaaatagctggaatatttgcctgcatctatcaca

SEQ ID NO: 197469 - DNA, 297 bp, Homo sapiens
aagctgagggatcatgtggaacaccctgtgcgttagtagacacatcaaaggggtcccatcttggaaggggagttaacctagccccaaaattaactctacacaacacctggctgaataaagcttgaaaataagccttcaaaggagcaaagggatccacaggtcactttagtgtacaacaaaagaaaattcagtactctttaaagaacaacagactccacatactcaacaaacttgtattacaatgttcagtaaataaaggactagacaaagaatcagaaaaacgtgacccatgaacgc

SEQ ID NO: 197470 - DNA, 235 bp, Homo sapiens
ttggctactttgataagtggtattttcattgtaactcttacggttttaatcaccatttccatgctaatgactcccaaatctagtttagcactgaattcttcactgagctttaaactgatattagaatgcctaagcatgaagaggcactaacaatgtcaaaaccaacatgtaaacacatcacctatccccccatactccaggtattcttttcttgttctaacatcatcccaagcaa

SEQ ID NO: 197471 - DNA, 356 bp, Homo sapiens
actgcaagtggcgctccagctgatcctggcttggggctctctgcactgctccaaatcaggcagccaggccaaaagaagatatgtagagtccatggggaacaaagcgaggcaaggtctgctgagcaaggcatggcttagagggaaaagtggggttgtggggagaagctacaaggagacagaataaaataatgaagaggagtgctgccaggcacctggcccagctgaggaagcctctgaggtgcgcatgccaaatctcagcagctccaagcccagctcccagaatagctggaaggaggcacactgccagcgagccacttattacagccagagctggggtcgacgcggccgcgaattta

SEQ ID NO: 197472 - DNA, 585 bp, Homo sapiens
ccccaggactccttgctggggtgatcatgagtgcatatacaatcaagtgtgtgaatctcaagtgtgaagggctccagctgggcctggtgtgccccgtgcgctcagtcagcctcagctgctgctgtcacaggggttcctgcacacttaagtccaggcccagaatgtagtatttgctcagttaaccactgaggaaggagaggagagtcggtagctgaagggaaatgcccaagtcatgtagttgcccttctccccctgatgtgctgagatgtccagggcggggcaagcggccttaccttcaaattcctgttcatcccaccaggctgatgtagctccttggtaaagctaaggcatgtggccagggccagagtggagggggttgcagaagacaacagccctttgttcttgctggtagtggtcccccgccccccgtttctgcagcaaggctctgcccaactcccttcccagggctttcttccatccccagagcacacactcattcaccccattgcctggggacatggctgtgaaccaggcaggccaggtcctagcacagggtctttgagaggggtcttcttgggccccctg

SEQ ID NO: 197473 - DNA, 688 bp, Homo sapiens
atggatgaagaaactgacgctcaggtgacgtcacctgcctaagtttgcacaggtagtaggttatagagctgggatttgactcagttctgtttgtctccaaagccggggtcctgacaatgacgtgattctgcccaaattctttaaattcaaactgtttgattatttaagaacctgtaaaactggccctgtcttacctctcctgttttctctctcattactttgtagcacaaactcagtttcagccaaggtagtctcactatctccaaatctgttgtatttttttccctctcctaaacttttgttcatatgggttcttctgcttggaatacccttccctctactcactgcttgttcatattttatacatctttgaaggactaggtcaaatatttatttatgtatttatttatttattgagacagggtctcatattgttgccaggctggagtgcagtggcacaattgtggctcactgcagcttcaatctcccaggctcaaaagatcctcccacttcagcctcctgagtagctaggtctactgacatgtgtaccacatgtgcccggctaatttttttttttcttttagtagagatgaggtcttgttgttacccaggctgatctcgaactcgtgagctcaaggattcctcctgccttggcttcccaaagtgctgggattacaggcataagcca

SEQ ID NO: 197474 - DNA, 271 bp, Homo sapiens
atcaacaacctaactctgcacatcaagaaactcaaaagagaagagtaaactgaaactgaagctagcaggaggaaggaagtaataaagatcagacctatagagatatctatatacattaggtatctgcaatagagaatagaaagacaataggaaaaccaacaacatgaaaagttggttttttgaaaagagcaaaaaaattgacaaacatttagctaggttaactaagaaaaaaggaggctgggaatggtgactcacacctgtaatcccagca

SEQ ID NO: 197475 - DNA, 348 bp, Homo sapiens
tccaccgggatgatctgtaggaattcaggatctgagttttttattttggcctttacctgcgatggaattgaatttgcatgtagaatggcagctggtgcctaggccgagggatcagagaagtcagcccactgtcaggtctggagaacgacgtctaggcaggtgatgaaattatggaaagaacaaatgtatgcgcaaggatggaggagggaaaacagatgagacacttttgcttctccccaggagcacagcctgcaccgtgaaatgtgctatttccacatattttcacactgaaaatccacggcccttccacctccagtgtcatgggctcgctctaattaattcagttca

SEQ ID NO: 197476 - DNA, 470 bp, Homo sapiens
ttggcttgtcatagattttattgtatatgctttcagcttaattgtgaactagttgagttttagcttccttcactgtctctgtcgggaaatatcataaaaatatactccagcaacaatcaattcaggctaacgtgtttgtttccttttgtatcttgccacccatccagtttcttatttcattagggaggatgcctttatcaccctactgagtaaggctttttttttttttttctttttaagtaaaggtgaaatctgtattcatcaaaaatttttttgtactaccttctcatatgacaaagtgtgctttctaaaataaatatattattgcagttatatgtttcatcattcttagcttttttcttaattttatcatgttaaaatattcatatgtgacagtttgttaataactaagtactgttaattgaactacttattattgttccctatagatataaagcagttcagaaaag

SEQ ID NO: 197477 - DNA, 207 bp, Homo sapiens
agaattttaatgggagaaataaagtatatttgtgtgctgaaaaagtgattcaatcataaggagaaaaatgattatgaaatgggtagttactagactgatgtccttactaggtgtgaggtatggggtctggtgcataagacaatgatcagggagaaacatctatgacagtagttctcaaagtgggaccagcatcatctgggaacttgt

SEQ ID NO: 197478 - DNA, 212 bp, Homo sapiens
tttatagacattgttttttttttccttcatgttaaagtgttagccatctatttctgttttcctaaatgtttttatcagaaatggatggtggcttttgacaaatatctttgaatcatccattgagatgatcatattttttctccccaagcatattaatacggtggattgtattaatagagttcctaattccaagagtcttggaggcccccttc

SEQ ID NO: 197479 - DNA, 222 bp, Homo sapiens
agtgctgggattacaggtgtgagccactgtgcccagcccctctactttcttattctatgaatttgactactctagatacctcataaaagcaggctgaaacaatactgtctttttgtgacaggcttatttcagttagtataatatactcaaggttcatttgtattacagcatgtatcaatttccttcatttttaatatatgtatgtattctgtgtcatgtata

SEQ ID NO: 197480 - DNA, 296 bp, Homo sapiens
aacaagctacaaataaaatgccaacctcttgaagcatggaagagtaattagcaatagtgttgattttaagaatctttaaatacaagatccactagtgacaactaacaatttcctaattgggcagaatttttgagaaccatatttcaagcatttttcttccaacaactgaatcctaacccagtgagtgattagcttttcctctgacacttatgtcaaagaaatgtattttaaaaggagggattaaaagctaaagccagccattcaaaatgcctgtatgggtagtgaatttacactga

SEQ ID NO: 197481 - DNA, 779 bp, Homo sapiens
aaattttatttgcctcatgatgactgtctgccgcttagaagtagacaatataaaatctcatcactatttcacaagaataaaattcaaatcagttatatccaaagtaacttttcaactgggggtggtgtctcacacctgtaatcccagtgcttggggaggccaaattgggaggaccgcttgagcccaggcgtttgagaccagctggacaacatagcaagactcatctctacaaaaaaaaaatttaattagccatgagaggctgggtgcagtgacgcaagcctgtaatcccagcactttgggaggccgaggtgggtggatcacctgagttcaggagttcgcgaccagcctgaataacatggtgaaaccccgtctctactaaatacaaaaaaattagccgggcatggtggcacatgcctgtaatccgagctacttgggaggctgagacaagagaatcacttgtacctgggaggaggaggttgcagtgagccgagatcacggcattgcactccagtctgggcaacaagaacaaaactccatctcaaaaaaaaagttagccatgatggtgcatgtctgtaatcccagctacttgggaagctgaggcagaagggtcacttgagcccaggagttcaaggctgcagtgagccatgatggggccactgcattccagcctgagtgacagagtgaaaccttgcctcttaaatgaataaaaataaagtaagctttcttcaacaagttttcttccaacgccacacactccatcaccatattaatttaaatta

SEQ ID NO: 197482 - DNA, 380 bp, Homo sapiens
  misc_feature (13)..(13): n is a, c, g, or t
  misc_feature (20)..(20): n is a, c, g, or t
gcgaggtgatctnaggatcncatttatccccaacacccagcctgtattttcattttcaatcaattcagtgtatttttaaaaatttcttttaagacctctttttgacttatagattatttagtagtgtgttgattagtttctaagtgtttggatattttcttgctacccttctgttataaatgtctagtttgattcaactatgtccagtaacacactctatatgacttcgatttttgaaaggttgtttgagatttgttttatgaccaggaatgtggtctgtcctggtgtaggtgccatgggtatttgaaaagaatgtatattttgctgttgctaggtagagtgctctatatattttgagtagatcctgttgtctaattgtg

SEQ ID NO: 197483 - DNA, 489 bp, Homo sapiens
gaagtccgtctctagaatggctatctgttagatagcagaaatatttagaatgtatatggcatttctaatatttttacaaaaataattttaaatcatgtaactcgaattttttttaaaaagtctgttttctttttggaaaactggcacaataaaaataacactaatataattccattgtatatgcatgtgcattgaacccagagtgggtatactaaagatagttcatgcaaataacttatgggaagtttggctattttttcatgtatgtttataaatatatttagtcatctactgtgaccttggtagcacagaagcattttgttagctgtatcattaattctaaaaatcaaattcttggcatagtaggctatgagagctttttgttacttggtattttggctaagaaaattatttcttgcactttctatttgtaaagatgttataacacaatgcacccacttaatgcagcttttctttagagaaaaaaga

SEQ ID NO: 197484 - DNA, 441 bp, Homo sapiens
attggcaatttagacacaaccccatggccaaccgaaaccactcactcttcaaagcactgtctgtgtgggcagctacgccccaacacccggcccagtgcacgttgagcaggaagagaagcgagctctcagctcagcgcactttccagaagccaagtgcatcggctgagcacacaacatttaaaatatttagaaaggcacagagtggcatctgtaaatatggcaagaaaagcctggtgaaagctcagctggatcctgagcatgtttgaagccactgcaccccactgttcttacgccctttagtgtagacactgtctacattggctgcttgatctgaaataacttggagaaagaaggctttgtgccaggccaggctcggaggaggtgtgttggagaagagggcacacattagccagcagcagtcagggaagactctgcataagt

SEQ ID NO: 197485 - DNA, 250 bp, Homo sapiens
aggaacccctattagacatccttctaggctctgtctgtaaagatgctgagaggtataattcctagagctttttaatctgtggccaactgcagtcatgagccacacagcccctctgagtgcactgccatggtgtggagaagatttacagcccctcaaagggctccgcctgatattattcaaagcaccaaacacagagcatgggcaaaagcaaacgtgaccagtgggttcctgattgatgggcatcctctag

SEQ ID NO: 197486 - DNA, 648 bp, Homo sapiens
agatatagtcttatagaaaaaaaacccattaattacatattcaaacatactgcatctataaagaatactagagaggagaagagacatcattccaaatgcatgtactaagggggaattagccttttcatggtggtcagagaatagcagaattactaaaggggagttcgtgttttcatggtggtcagagaatgctatcctgagatctggagaatgagtggtaactgactaagtgaggggagcacagcatctgcaaaagtcatagggcactagggagcatggtgaatacaaacatctgaaggacctgggtggctagagggcaagacagagggacagtgtagtgagatggaattaggagctacctagggacaggtcacatagcttggaccttgttggccatgttaggatttatttttattttgaaggcaataggaatcagttgaatagttttaatcatgatgtgagggttatggtgggaataacatcatggttttgaagtatccttggactgaagaaaatggagctgggcaggactatgaaatagatggtgatggttgagatagagagcagcagatcgacttgacagatatttggaaggtaaatggacaggactttttgacagattggacatgaatgtgacacaggagttgt

SEQ ID NO: 197487 - DNA, 528 bp, Homo sapiens
tatggtactatgttgtgctatactatttatatatactgatttcttagaagtcataaagcaactcaatagacgcttttgttaattacagatagggcagtgaaataaactgctaaaaaacaaaaacaaaaaactacccatgatatgaccaatccattttgaaactataacaataagaactttatccatatgcaaaatgacaaaatgagtaatttaattatgttttggtgcctttataaattaaacgaatcacatctaatttctgaaatttcattttaatgagcttttgaataactgaagtgacaaacagctgtaaataacaatataaaataaatgacaaaataaaatgctaagataatgtggaattatactgatgagtaaattaatcactttgaaaaatatagtaacatgtagaaaagtaaaggagaaatcctgtcaactgttacttgaatcattttggtgaatttttggttcataaagttttataattgtatcaatttactatcagcaattttaagcgagtcatgtgat

SEQ ID NO: 197488 - DNA, 874 bp, Homo sapiens
gatggctacgaatgcagcgagatcacttacgtagagggtcctaacactatctctaggacacgtgagagcctgcccttccctctacagtatatgacatgagaactaagatgcggtctctacacaccctcaaacactcagaaggcagacggggggacaagacagatacccaaaagtagagggcaacacaaaagtcccccaccctccataccacaccacccagcagcaccggtaagggaagagccagaggcgcccatgtgagtggccgggcacagcccactcactggcagcctgagttcgagccctgcagatggtggaggaggacttcctgccctgtctcttagcttcagaaaaggacatcagggcatctgctgggtgccctgggaatccaagcgccattgattacatggaggagcaggcccagaaaggccacaggagcctgatgaggactctggctgctcaggggactggtaaggggagacaggtggcaggcccgaaggctgggatggtagagatgagcctcaggtaaaagagaaggctttacagcagagatgaacattggcagagaagagaggtggcttgtcctgggttctcctgagtctctgctgccagacaaatcacacacaaacacttgggtatcctaacctgggagatcattctgtccagggaaagaagggaggggcatgagcgtgtgtctcccagaggttatttggaaatgtctggagatagttttgattgtcaggatcaagggggtggctactggcatctagtgagtagaggccaaacatgctgctaaacttctcacagtacgtagggtggtccccttgcagcataaacgtgtctgcccaagatctcagcagcttgaaatgtcgccaat

SEQ ID NO: 197489 - DNA, 713 bp, Homo sapiens
caaaagcattagcaatggaaataaggcctatagaatcagtcatgtctccataaactttatataaagggccagacagtgaatattttagaccacctggtctctgctataactaaactctgcttatagcatgaaagcagccattgacaatacgtaaatgagtgagcaaggtggttttccggtaaaattttatttacaaaagcagatgggaggccagatttgacctttgggccatagtctaccaacccctggaaaaaacagttgtctttaccagattgaatgttggcagggtaaatggtgacatgttatatgtattctgtactttgttttgacttaataccatttcataattattttatatcagtacgtatagtattgctgttctttttaaaggctatgtaatttttctttttatacaggtgttaatttgataatttgtgaagtttatgaagtttccaattttggggttgtaaactgttttaatgaatatccttatatatgttattttgcaaatgtacaagtatatctgtggaataaattgctgcaagtgttgtaattgtcatgtatgttgcaaatacattctaacagtttgtcactttttttgctttatggcattttttgctgtgaaatatttctttttatgcttagttaaatttattattttttaatgacttttgacatttgttataatgagaaaggcttctgagtataaactt

SEQ ID NO: 197490 - DNA, 863 bp, Homo sapiens
tgtggagtaatacaaatatacccataaatgatgaatgaagagaacatacatgtaagtggcatgtgttccttggggggtcactagagccagtcaaggcaattattttcaaccagctcttcctaaaatcttgactgctgtctgtaatttagtgaacactacatctgaaccaagttctttgaacttcacctgatggcccgatccagtgggtctggagtagggcccaagaaatcatttctaacaagttcccatgagactctgatgctgcaggttgggagaccacactttgagaaccactgttttaaactgagaactaaagcttcccctacccactctgcagagatgagcttcctcttcttttccccaacccttacaaccacctcagttccatcaacagctggctgagttcaaacacagctggataatgaaaacaagttagaagtcctattaaaaaaatctaattatggatgactctcagtttattctattacgagtttttagaagcaattttacagctccaaattagaactgctttacatactaataagacttttcaacaagtgatggtgatgaaggcaactgcatgatgaattaagctgcttttcagagagcattcctagaggatttaccaagacaagagaaatgaaagaaaaatcaatatctatgtggaaggcatttaagagatttttttaaattatattttaaagttggtaaagattttgtgctgggcacactggctcatgcctgtaatcccagaatttggggaggtggaggcgggaggattgcttaaggccagaagttcgagaccagcctgggcaacaaagtgagacccctgcccccacctctaccaaacaaacaagaaaaaa

SEQ ID NO: 197491 - DNA, 915 bp, Homo sapiens
cactgagcacaatgcttgcaaattataaatgacaagtatttgctaacatatttaaaatattttaaatcaattagtctttacataaatgatactagtattcaaatttcaggtaattctttatgcttaattcattgatttgaggagtaatccatcatactttcagagtctggggaaaattatgatgatgttaaaaatgtaagaaattaactcacatctccatatccccactggtctgcctatggtctggtttctgtgctgaccccagtgatctttaaaaatgtaaatctgctcatattacagagagtgtagagcccctattttattagtggcctattacttttaggataaaggctaacactaaactcaggatggccttttccatgctctctctttaacttcctcttgagcctggcttgctgttattcagctagactggctatttttcagatttttaaaggcctatgttagttactgtcccaggacgttgctctgaaatgttctttctgtgactctggcctcctgaactcctgtgcatccttcagatctcagcataaaggtgacccctcaaggcagctgtcctgctccttccctttttctcttcccatctcaatagcgacctttggcatctctagtcataaaaccgtggtctcttacttgaaagcatttatctccaattctaatgaatcaattaattacactggtattatagctccctagaataagtggggatataaagttgtctctctcattaaacaatgatgggcagggattgcatctgtgttttccattgtaaattctaatgcttttccactcctgaaaattttgtaagatatagataagaccatggaactcattcttctgcttaaattcctccagtacagctcctttccggtaccgaatcgagtgtatcatgta

SEQ ID NO: 197492 - DNA, 410 bp, Homo sapiens
ctagtcataaaaccgtggtctcttacttgaaagcatttatctccaattctaatgaatcaattaattacactggtattatagctccctagaataagtggggatataaagttgtctctctcattaaacaatgatgggcagggattgcatctgtgttttccattgtaaattctaatgcttttccactcctgaaaattttgtaagatatagataagaccatggaactcattcttctgcttaaattcctccagtacttgccaatcataattggaaccaaatccagactccttactaaggcctcctttgatgaacagcttcctgttgctttgctaacagcctttcctagtcgtcttctttcttatgacattcctctctcttttacgcctgtcaaattcattacaaagtcagaggta

SEQ ID NO: 197493 - DNA, 521 bp, Homo sapiens
tgttagtttttactcttaaggaggaataatgatcttttattgtaattctatgtaatttctgcttattcacttcaaataaaagtccacatgtggcctgagcgtctatgtagacaaaaagtgcattacctcatgaaaggattgagacaaattgaaagtatttcgggatcaataagataaacctcccagttgggtgctgtttatctttatacttgtaatcccagcactttgggaggctgaagcaggcgtatcacttgagctcaggagtttgagaccagcctatgcaacatggtgaaaccccgtctctacaaaatatacaaaaattagctgggtgtggtgtgtggtggcacatgcctgtagttccagctactagggaggctgaggtgggaggattgcttgaacctaggaggtagaggttgcaatgagctgagattgcaccactacactccagcctgggcagtagagcaaaaccttgtctcaaaaaaaaaagataaacatcccgacaatataagagtataaaaaag

SEQ ID NO: 197494 - DNA, 335 bp, Homo sapiens
tcataaaaaaaaaaaaacggttctgcattgtatcggtgccatagagctcagaggtttgcctttgtactgaagaggcccggggagagtgacatgctcaatgtcacacagcttgagagttcagccaagtgagattgtgactttgaccatatctttgttccagttgattcttctgttggggactggggttgcagctgctaccctgagaggaaaggaggtaccctcagagttaacaaggatccttcagtcagccaaagggccgggctgtcaatctgggcagccccagggtaggaatgcaccatgcctgcagagcgagtgtgggtgcaggtgggtgcccg

SEQ ID NO: 197495 - DNA, 554 bp, Homo sapiens
gagggtggggggatgccctccttccacagggccctgtggcttccaagcctcaacctcctctggtctcttgtctgtggagcctccttcaaacccagggaaacaaaagcacctgccacgggctgctgtttttctaggatcttctagcgaagctctgtaacttcccctgagagccatgaaactgggctggctcccagggtgatgggactccagcgtctttgttctttcttgttctatgcatccatgctctgctccaccgctgccccttcaactctgcccacacatattactccagactggccctgtggtcagagcctggaatgcctgggctgctgggggcttgcatgcaggctgcactggactagaagcattggcgccttcaagactgccctgggaaacatgacctgccctgtttctgtctagtgagtacccatttttccccactcaccggctcacttcccttggctgggtcaattagaaaaagctcttctgttggcctgccctgcagggtggagttcagagggcagctcaagagcccggtgacagctcaaaaaata

SEQ ID NO: 197496 - DNA, 445 bp, Homo sapiens
ccagttcgcaggatgcgggcaaagcacgcgtgagcaccgggcagctcttccttggggccctgggctgacctggcccagcgcagcctctgtgaccatcgcagccctggagttttgcaatgatttcattgacctgtttctctggctcagttcaagaggcatattctctgcaagataaacactcactgtcccttttaaactttgttttattattaaaatctaccctcttctgaggccacacccagtgtctcaagtctctgggccccaacattggtcagagccaggccagacaaaccacggaggcggcatgaggctgcaggcctgtgtggctccccctaatggagtcctggaggctggtgtagaccctgcaacacccagacaagtgggtcttggctgccccccaagctcatgtgaggctccccagctccaccctcagtagaactcaccc

SEQ ID NO: 197497 - DNA, 623 bp, Homo sapiens
tgtataatgacaactgtgtaatgtatccaccattatagtatcatatagaatagtttcactgccctaaaattcccctctgctccacctattcattcctccgttcccccttattcctggcaaccactgatctttttactatctcaacatttggttttgcattttccagaatgtcatatatttagaatcatacaatatctagccttttcagattgattggcctctttcacttaataatgtgcattcaaggttcttctatgtctttgtcttttcttggcttggtaactcatttttgtcattagatagtatttgttgtatgggtataccacagtttgtccattcactttccttacttcaagttttagcaattatgactaaaactactgtaagcatttttcctttcataattgagattttgttggttgtgttgaggaccagtccacagatatctcaatttgtacacaattcttaacatacgtaccaagaatctaaaaagctatgtgttgcagttcttttttaaagtatttggtcttttgtggccattgctttggtgtttagacatgaagtccttgcccatgcctatgtcctgaatggtaatgcctgggtttcttctagggtttttatgg

SEQ ID NO: 197498 - DNA, 444 bp, Homo sapiens
tgaatttatcatgtccaactttcatgagcaaatgtccctacctctattgctttttaatctaaaaggacgcttgctgagcatctctgtggtcccagcacagtatgatgttagcaggactggcctctacgctgtgatgacagtctccttgtctgatcatagcaagcagagaagcatagcttactcaagctgggttcttagcacttgttcctcataagaaagctgatgagcattccactctgacatgtcaaagacagaaaggagctttctttcagcacttgtcttttgtagttccactgacaggactaacttagtgacagaggatcctttagcaagctcccaatgtgggtgattgagcctctccctgtccagggttgaatcatgttattcccttagtaaatctggatgctagccctcatgtaatcttcaggctctgtgacctgagct

SEQ ID NO: 197499 - DNA, 321 bp, Homo sapiens
ctatgtcttcactaactttattatataagaacataaatacatgggattacatttgacaaaatcaggatctaatcagagaaatgctaggaatcttttaggtggggagaggccaagatacagcttgcaatgaagttgtctcccaggtggttttgtctcaagggcaggcctaggtacactctgctggcagtgcaccagctgtaagttaatctatctgtggctcagcagctggttctcaaagtttttggtcttctgctcccattacattttaaatttttttttttcttttttttgagacagagtctcgctttgttacccaggctg

SEQ ID NO: 197500 - DNA, 680 bp, Homo sapiens
cttgtttttccgggtataactggtcccctatctcctaagggcaacaaagcatcctaatcctttactaattcccatacgccatattctcagtgattacatgttaagtcacatctttaaatacttatcctaatcgattcctcaactccagtcctacttccccgaatgcttagcaggcatccaatctatttggatgcctgctacaacatctatgccagaaactgccgaattcctcctttgcagtgactggaatcttcctccccattcgcactaccaacattctatgctttggcttgatctctcacactacaactattgtaacagcctattatctctgcctccaggtaactcctgtctccatattattatcacagtgtttttttaataataggcatcatttaatcaccaagtatttgagtgcctacattcaaatgcataaatgctaaacagaatacaaagtaatttagtaaggttcctatcctcaagaatactgtaaatacctgctttgaaaactttcatttaaaaaataaaataactgggcataaagcagagattgagacctgtagtcccctggtggtccgcagattaaacctagcctacaaagtataggcgcaaataccgttttagattctaattaatgaaaaacacttaaaatccaagtttaaaaatcataaaaagggctg

SEQ ID NO: 197501 - DNA, 525 bp, Homo sapiens
tctccagttaaacccttctcaggcaccacccccccatccaggaaaccactccccaagaggaagaacacgtggaacttcctgaaatgcgcctacatggtgatgacctacctcttcgtatcctacaacaaaggggactggttcactttttcctcccaagtgttactgccactactgtaacttggaactggacatcagggatgatccctgctgttctttctagtgagcctgctccatctcagcttagccttcacaaggcctccatctcccaggcattctaacctctgaagaaagctctctgtcccctggactgcctgtgtggagggtaatgaactgggtcctttaaggaatggcacctgggtgcccagaggcatggccagaaggtgtctgtgggggccatgccttagggggatgcacccagggcggctgagagagcaactgcaggagtttcccctaaaatctctcctccagatcgttctcgaactttccccactacttccataataaaatgtatacttgttgaaaaag

SEQ ID NO: 197502 - DNA, 288 bp, Homo sapiens
ggttacgtcatgtagtttacgcattaactacctcactaaatgcaggagtcacgaggctccacttctttatactgatcctagatcttcctcttaaggccttttcctacccttatgttttgtggtgtgcttacaaggacacacggaaaggttgaagaagcagattcctctcctgccttctcacacagtgttctgtttttttggttgtgttttttttttttttttttttttgagatggagtctggctctgtcatccaggctggagtgcagtggcaggatctcagctcactt

SEQ ID NO: 197503 - DNA, 363 bp, Homo sapiens
cagcggctgcacaggaataagactgaaaagagactgcaaaggggcctaggaaattttggggggaagtaaaaattactctattattaaagtgattgttacagccactgatctgtacattaaaaatttgtgaaattattgcaaataaattaaagcttggtaaaattgattgaaaaaacgttatgggccaggcgcagtggctcatgcctgtaatctcaacagtttgggaggccaaagcaagcggatcactcgaggtcaggagtttgagacctgcctgggcaacacggcgaaaccccatctctaaaaaattagccaggtgtggtggcacactcctgtagtcccatctacttgggaggctgaggtgag

SEQ ID NO: 197504 - DNA, 668 bp, Homo sapiens
gctggaatatgaaaaaactggagtaaaaataagcaaatcaatacttctgaaatgaagccttcattggtagaaaagagtgtaggtcacaaaaatgaattagcagaagttcttgatttctaattattgaagattcctatctagtggtattctaatatgcttaccaaattatgagttgcattactttttaaaaacctaaaaccaagtcaagatttacagagtgaccccagtttattttgtttggtaagttttcagttccagttattaggcaaaacaaaaattgctaatacgtaacaatgctgaaacaggcgattggtagaataaaacaaaagggattcatacagcttttgtactgtcttcttgaaaaagtcatatttggccataaaagctaatacatgctttaggaatggaaatgatttaacctgattttttcaagtaagatttgttcaagaataatgggcttatgttgtcagttgtgggttcaagcagtaattcactttggactgcttctattcaacagtatgctgtctgtacgtaaagagttacatggaatttaattttagcattggaatctatttgagataccattatcttttatattcaaatgaaaaattatgggcctctagaattaagtgttactaacctgatatagatagaataatagctgtatc

SEQ ID NO: 197505 - DNA, 405 bp, Homo sapiens
gggtatatgcacttgttgtttttgatgctaccacatggggatatttgcctcgtctgaactctgtgtattctctgctgcaccttgttgcttctttgcaataaacttcctgaactcaaagctaatactggggggaatcccagaagctgctgagggcagggccatgctgctcagtgttccaccctagctcctgacagcatttccctagaaaactgctgctgggcctctaatggagcaaataaatctgtgtacaactaggcagcaatagtttgtccaaaagtcctggtgtaatctagtccctcaaactgtgcagccttacatggagtacacacacacttgcagccttgaagtactacccactgaggggagaaggcacggcaaggggaaaggttggcacaggatggagca

SEQ ID NO: 197506 - DNA, 689 bp, Homo sapiens
aaattaggattagtcagtacaaccatcaccatctttagcatcctttggtctctttatggggcacggtgacttctggggcctcacttagactaatgcagcattcaagacattacaagaaacacaatgaagaaaacatgcacataaaccaatacaaatactgagaagtgaagaaggaaaaggaaattgaatgcatgaaagaagctattttttaaaaagatgatgttaaaaaagccaaaagccactaaaggaatgaagatttgaccgtccagaggctgaaaaaaaaataaatacaaactaatgatcctagattctcataaaacacaatacggaatgggtcaactgaatttacatgtcagtagaattgcctttttactggtcaacttgtctaaaagatttccaaacatgtgtacacatgcaacaacctagagttggagggctccagtacaataaaagcatgctaggaaaatagacaaatttactttgatgctctataagggaggcatagtataattttctgttttggttataaactatggcctaaaataactcttaaaggctagatcacacaaaaaatttcacagaagtaaaactcgtagtacaacattcacttttctggcaacatttgtccatttctagtggacaaattaccctaccagaggagaggaagatggtccaacacagaaatatta

SEQ ID NO: 197507 - DNA, 206 bp, Homo sapiens
ctgggttcaaatcttaaccctgccacttagtggctctttagtaaagcagtatcctcatttaacttctctcaaatgttactaagaagacaacctcctacacttggagaattatagcaaagatgaaagaaaacgatggtgtcagaccccttatcacaaaggcattcaataaattaccattagccccacaaagcattccctaactaccc

SEQ ID NO: 197508 - DNA, 365 bp, Homo sapiens
aggggagagctgatctcccctatgggctgaagttctcccggcagtgcctggggtgacaggtctcccctggcccagggctccgggctccatcctccagaggcaaaggagacagtaagcctgccatctcgggtcctttcatggtcaccaaaaatgttgtggggaactgaggaccagagagactgatatggagaacaggaggattgtttattttaaggtacgcaccggctcagtggattcacatccaaaaaactaaacattgaacaaagacagaacgtggtttttataagcagatttacagaagcaaaacaaaagcagttaatcatacagtgacaggtcacataatctatagcataacataagttgtg

SEQ ID NO: 197509 - DNA, 469 bp, Homo sapiens
gatgctcaacgcaacattcttttgcagggcccttgtcctcagtttcccttcttttggggtgggctgagagagacagcttattcagcatgaagctgtagtatctacagtttagcaaatgtctgcggagcctttaaagcagtttttatcataataaaaatattttaacttataaccccagaaagagataggcatgggagtctttatacagcacagaaatccagatgagcataatttgaaagtcatttgaattgtaatgagtatttttaatgtaaacaggcaggaggaaaaacttgctgggttctcttgtagcacagacacccagatatatgtcttttgatagtgatattaaagtgtcaagggtgcataggaggctgcagatgtcagcggcatgaatgggcaaggcaatttctgtggttgcaggctggaggttccagcaggaatagaaaggcaatctctgtgctagatggcc

SEQ ID NO: 197510 - DNA, 546 bp, Homo sapiens
aggccagatttttaaaaatcatactttctcaaggatctccacaaactggagggtgtcctggctgtctgtgtgatagcctctttctacaagtgaggcctcaaatgaactgcagctatcctggtgttcctgtgggggcactttgtatgaaaaaagggcatgtactccaaaacatttttgtaggttctttggccaggcgccaaacagtacgaaagagtccaatgtaggatttttcttactgatagcagttattcattgcagtgaaataaaatatgatcccagtagggaatcttgaattctgacctcccatgttctattttgaaataaccactttatgtttctttttttttttttatctgatgatctctttgaggccagcttcagattttggtggtacaacatgaaagattaggaaaagcattaataatctgtgggtggaaaacttattagaaatctgagagtaaagtttgagttaaaagttgtttgaacatggaattgactgggaggccaaagatttttaaaagcagaagattcttaagacctgaggaa

SEQ ID NO: 197511 - DNA, 126 bp, Homo sapiens
accgtgatgtatccccaacaccaaaaacaatgcctagctcatggtaggttctcaataaatatttgttgattaaatgtataatgatagagagtgttgggcgataacatcacggtaccgagctcgatc

SEQ ID NO: 197512 - DNA, 313 bp, Homo sapiens
ccagccaggcgtttcctagcggagcaggggcgggagcttggacggagaagggcacaggccggagcgcggtccgctcccgcgagcctggccccgcctggcggagccccgaggagccaccgcccgcagatcgctagccgggcgcccgcgaggcgcgagccgtgtgcgcaccctcaactttgctgccgccgggggcgcggctcccgcgtgcgtgtgcgagtgtgcctgtcactagcggcctcctgggggcagcagcggaaagggggacgcagagaaaggcagcctcggcgcaccgcggccagggaggcagaggccc

SEQ ID NO: 197513 - DNA, 457 bp, Homo sapiens
cattggtcaaacagtgagtgagcacctactatgcccatgcactgtgctagatgcctgggatgagatggtgcctatggttaaatagagagaacactgaattgagagtcaagagctatgacttccagtctagctcaatcactaattatctctgttcccttgggcaaaacattaaatgtcttctgagcctcatttatttacatgactgttgtataattcaaatgagaagaggcatctgaaagaattctgaaaactgtaacatctggaaaaatttgaggtgcaataaaagaaagaaccacaaacttgcagagtaagacaaataagggatggggtggcaaatctaattagtgagtaatttaaataacagagtgcttttaaagaacttatgttccattactcttgagtacacacagtaacaattacagtgactgactgtacgctcaaacactggccacacaca

SEQ ID NO: 197514 - DNA, 342 bp, Homo sapiens
tgaaaaataagagttagaaaaagggaggaggaagtaagctaataaaaccacaacagatacattatgcaaaaatccaacaagggcttgagctccaaattcccaaaaaagacccatgcactaaatacttaaccaagccattacatttcatcaagcaagcagatgggcagttaagtgtcttttataaaacgctcaagttctgctcctatcacctggttacccctgagcaatcttcccagactttcccactctgaacctcaaatttccttgtctgcagaatggggatgataatagtacttctccacaagactgtggtgaggattaaatgagttagtcaagtgcaca

SEQ ID NO: 197515 - DNA, 692 bp, Homo sapiens
cgctgggcgacctattgccgagcatacactacaatacagtcatttgtgaagtaactaaataaaagtttttcttcacactagactggccccatggggttttaatcactaagaacacatggaaacattaaaaatgtaacctcaactaaatatgtcatcatcactcttctaatctaactggtgttcttttccaaaactgaagctttgaatcttcaatgaatttttttattatccactgacatttgaatgctacacataaaacaaaacctaagatatttgctgtcatttacagcaaaagaagagactatatctaagacatagttcaatctggacaattattctggcatgatcaaaataccagtaagattttcagatgcctaaaagattccaagtattttatacctttagactaacactttatgtattatatgaatgttttgctttggagccataggggcctgaccttgattcccaagtgtcccacttactcagtttactcatctgcagaataaagaaaaataatagtactgatcagtctgtttagaggataatgagataacacagtaaatatgtaaggcccttagtattagtaactatactaaagatgagaaatgctcatgtgtctcttcacttccccaatatagattaactaattgtagccactgtcaaattagatagaataaggtatcttaaac

SEQ ID NO: 197516 - DNA, 844 bp, Homo sapiens
tgtatacttcattatcatttctacacttcaccatcatcatcgtttaaaaaccctttttaatgggccaggtgcagtggctcacgcctttatatcccacataaaactctgtttgaataagtaacatgaataaattcatctcttcatatcatttgactgtttttaatcttgcctttcttatcactacaatacagtcatttgtgaagtaactaaataaaagtttttcttcacactagactggccccatggggttttaatcactaagaacacatggaaacattaaaaatgtaacctcaactaaatatgtcatcatcactcttctaatctaactggtgttcttttccaaaactgaagctttgaatcttcaatgaatttttttattatccactgacatttgaatgctacacataaaacaaaacctaagatatttgctgtcatttacagcaaaagaagagactatatctaagacatagttcaatctggacaattattctggcatgatcaaaataccagtaagattttcagatgcctaaaagattccaagtattttatacctttagactaacactttatgtattatatgaatgttttgctttggagccataggggcctgaccttgattcccaagtgtcccacttactcagtttactcatctgcagaataaagaaaaataatagtactgatcagtctgtttagaggataatgagataacacagtaaatatgtaaggcccttagtattagtaactatactaaagatgagaaatgctcatgtgtctcttcacttccccaatatagattaactaattgtagccactgtcaaattagatagaataaggtatcttaaac

SEQ ID NO: 197517 - DNA, 487 bp, Homo sapiens
atccaaaggcggtgttaatgttttagtgttttcaagtgtctcctatcccaccccttgcagttttcttttaagtagttggtttcatacatattatgaaatgcttttgtatcttgttttatattgcttagtgtgttttctcagtcatgagtcgcttttaattaatcattttttaagtttgcagttttgacagtgaaataaatcttagaattttggcttttgttaatacatttccatatcaaagcaagggaagtttattccagcaaagacttgatgtaaaaccatagtattatatttagtaagctggtgtttgtggtttggcaatttcaacttaggttctggtggggaggggttatcctttattgtattcctgggtcagagggtgaagatgcatgataattagaacttaaggaaaaaaaaaatcaatagtacatgatttccaacctctaagagcttataatcaacagcagggcttacagaagcaggttta

SEQ ID NO: 197518 - DNA, 1461 bp, Homo sapiens
tgtgtaaaccactaggaagtaaagacatagaactactctcacaagtgcttttctggttattgtgacgctgaacttcatggcttgttttaattaagacatcttacaagtgtcaaaatttggaaatatttggacactgtacactctggttatttaaatatctaacagcggttcttgagcattttgagaaacctttgaaaatctgatgaaaggtatgtgccattactctagaaaaatgttcctgtgtacatgcacatcaagtatcacatactgtttcaggctgttcaaagactacaaagtctgttcatgacctaatggtccatgttccctcagttaagagctccagagataaaggatgtggaactcaaaggtaagtacccagagccttgaaaactccatttgtgacttggaagaattctacaatttgaattaactttgtggagagagatatatttttgaaaaattgtgtgtacccaaaaaatttcatatcaaataatattttcctgtagtgcattcaaggatctggttccacagcaaaaaaattgttttggtctcagttcctcaaaatcacatttaaggagcttgagatttatattttctacttaataagtcttacaaaagcaagttaagaaggaaaatggacaatcatttctgcacatatagggtttaataaaacatgtataataaaatatctcatattttaaatttccaccttattggtagctttcatgacaaagggctagggtgctggtggccatacaattaaggtttttggttagttagttagcagaactgactgactcctacctggtgggtgtttcttttgtttgtttgtttggttggttggttttttcccagatggctcaggaggaaggtaaatagcagtcattgtatgtgtgacagagtttgagatagaatgagcatattgaatctcacatcctattcttattactgtcaggcagcgttgacctagcagtataaaactatctgaagcaatgtagtcactcagttctcataaagtttatttcaagtactgtaacaattcatgtttggattagaaaagtcactagaaatttgacttccatatagtaatctatacttttttctctcatttccttcattttttgagccgtaagtgtaaggcattttgctggtattattacaatggttatgaggagtttctttgcttgcccaaggtcacatagctagcaagttaaagtagattcaaatccaggcctgctagataccaaattattatttaagagtacttttcactactcctaaataatgacacagatatgtttgtcttacacatttcactttattgtcaagttattagtatgtttattttcaaaaggtattttttgcaatttctttttattattccgtactttttaaatttacttcattatcacgtcttcctttattctttttaaatagtttttgcttttgttattttgtttt

SEQ ID NO: 197519 - DNA, 388 bp, Homo sapiens
ctgtataatttgttaattcaaaaataattgccttggacacataatcagaaacttggtttaggaatgagttatgtatgaatcaaaatcttaaatgagcataaatcagggacttaaaaatatgatgaagaatgcacatactttttctcttgatgaaggttattggatccaaaaatcaaacttaattaacttagtaacagttaagaacatataacagccttaaatgatgtatcaaattagggccaccatgcacagccctcattttaaaaaggagaaaaaaagtatggcctccatctgtggatgaataagtaaacaaaggctattgggcttaaacaccaacttgattagttctacaaggaatatgctaacaagataccagtctttatgctta

SEQ ID NO: 197520 - DNA, 323 bp, Homo sapiens
cctttaaggtgcccacagaatggtaaaaaatatcctccccactccctagtccttcaaattaccatgtttgtcctagtccttcaaattaccatgtttgtcctcctcctgcttttttctttttgtgttttaaaactaactttttggtaaaaattttcaaacacgtacagaagtacagagaatagtgtaataaaccccccaaatacccatcccattctccagttcagcaatgataaatttttgccactgcttaatatctgcttgatactgaccttttctctctttccttttcttttttttttcagattgcaatagtatttaaatcc

SEQ ID NO: 197521 - DNA, 422 bp, Homo sapiens
tctagagatgatttagagtatatgggaggataagtataggttatatgcaaatactattctattttatatgagggacttgggaattcatgggttttggtatctgtgaagggtcttagaaccagtcctctgaggataccaatggacaaccgtgtgtgtgtgtgtgttcatgcatgtagtatatatgtgtgtctatgtctacatcctctatatcattgctttatacaaaagctctcagattttccatagttccctcgctcattggttcacagaatttggtatgaatgtgtagacaagtttgtattctagttcggagtttttcaaaatgggttatttctcgtcttaatctgctatgtaatgtaatcattcagttttaacaagtcagtaataatttcagaaagactgagccattccatgtagacagc

SEQ ID NO: 197522 - DNA, 398 bp, Homo sapiens
atatgtaatcgactatttatgttattgataaggcatctagtccattgcagactattagtagttaagtcactggggagtcaaaagttatatgtggatttttgactgctccgaggggttggtgtccctaaccccccgcattgtttaagggtcaactgtagatcaaaactgtaacagtctatatcaaaataagctaaaagaagcctgggcaacatggcaaaccccatctctacaaaaaatacaaaaattagctgggcatagtggcacacacctgtaatcctagctacctgggaggctgaggtgggaagattgcttgagcctgggaggcagaggctgcagtgagccaagattgcaccactgcactccagcctgggcaacagagcaagaccttgtctcaaaaa

SEQ ID NO: 197523 - DNA, 1098 bp, Homo sapiens
ctggagatggaactgatcaatttctaactgctgtggaaaattcataagcaaattcatggaatcaagaaaaggagaagggtagttaaacctaagctgctttaatattttatttatttttttaagactagttaagtacggtagtgagaaggggaagagagtagaacaaggagttcaatctgtaactgactgtgaacaattgagataataaaactaccttcagaccatcctaagctcctttaatattaaggtgttattatagtattgaaacttctgattcccatttcaccacatttaccttgaaggaaacagctttactggggtatattttcaagtgtttggagacgctgaagtagtgtatattaatgaaactgaagaataaatttcatttgattataggatgaaagaaatgcaatgttcagctatgtcttagcctaattttcactttcctagtgtacaatgtaaataatagaaattattttgtcatggagttactgttaaataaggttcacccataagtctggaattattattaatatactttttttcaagttgacaagtctgtgcttctttgggtcatatactcaaacatgaacataactttgttatttagagctcagttttggttatggttttcattaaaataattgatctatattcttgctttccaaaattcaatgttaatgtcacttggtacaatgctaaatatatgaaaatgtaatattgattttcatcacaacctacaaagccattaccattcactgctttagctagaaactagtaatcttcattcctgaactctgaggttaaagccgcaagtaatgttccatacctgaatggcagtgttccataaattcttaatgaaaccctggtttatctttttgacctttgacttcttcattgcctttatgtgtgcctttgaaaacacttaacattttccattttaaacggtgttatacagtatatacttcatgtccattttattttctcttctgtgagttccctatggagctttgtgtgtcttattcattgtatcatcattagggcctaacatggtacctggcatgcaatacgtcctcaatacacgtttgttgtatcagt

SEQ ID NO: 197524 - DNA, 301 bp, Homo sapiens
gaccagggtggctgtggcgacaagagcattttgggtgcacgtgcagctgacttggtgggtggcattgagtaggtgagggaaaaggaggcattatgggtgatttgggagagtttgaggacgtgtagaagcctctgggggtagaggtggcggccggggctgccctccttcctccaggttccttccattgcacacctgctgccagagaagtcatgctgaagctggatctgttcaggccaccctcactcaagaatgttcaatggctcccccattgcctgcaggacccagtgcacacccttgaggg

SEQ ID NO: 197525 - DNA, 315 bp, Homo sapiens
ttaagatcctgcagaagaaatagaaatattcaaatattgcaaggtgtaattgtgagacaacttattataatacgtgttaagtttctactggacccatggaagtggattaagaaaaaccgactttagcttgagaaagcaaaacccattgataagatgtgtcttcattgcatctgtctgttctctgggagaagcaaaatctgtgttacttccttgcatacttgtttgtttattcattgtgcacaagaagatatcttccacatcttcacaagctggataagaaatagagaaaatgagatcaaatatttaaatattgca

SEQ ID NO: 197526 - DNA, 518 bp, Homo sapiens
gtgttataaaagtgaaaccaagaactcagcactgtgccaggcacaaagcaagtcataataacaatgttgggtaccattataattataatcaacattattgtggttatcattattactaaaaatgaatgcaccttgacagctctttcttaaagcagaattccaaataatatatgtagaggaaatgatggaaagacaaaaatcactgttaggcaaacattacagcaataactgttgcaggcacaagacactgataaacactaaaagtagtgagcaaaagtatgagaaacaggatatctgcatagtctcaaagtatctctccacaagatatttattacaaaagagaaaacaataattctataatggagtggcagacatcatccttactaacagatcacagttatcaccaccagtaataaaacatatcagcatcacgtgcatcttgatatgacgaacttggaagaacacataacttatgtggtactcttgccaaaaatgcataaccccaatctaatcatgag

SEQ ID NO: 197527 - DNA, 185 bp, Homo sapiens
ccatggggatagaaatccccatggggaggaggatcacccctggttcagaaccacaaatctagctcaatcctttatttcttccataacatcacagttttcaattattttgcttacttgactgttggcttggttttttccctctgacctcccactcaaatgtatgttcattattaaatcttttttta

SEQ ID NO: 197528 - DNA, 467 bp, Homo sapiens
atgtttttctagcaattagtggcacacagaggctggaataggaccatccaaaatgtgaaacgtcatttgagcccttgccattttctttagtcatacaagatgggctttatgttttccaaagcaaagatgtctgttctagttttcccaaaacaagttcatggaaagctgtctgggacctgtgagtgtgctgataatccctaatccaaaggcatacctttgttcctacctatcaccccagttcccctgcaagtaggaaccatgttatagatcaagatgtataactacggaccttagactagatgacttaaaataacaaaccagtacatgcagccccaccttctcaagctatttcccaaggattagggatgctgctttggttttaatgttatgatttctgccagatacagtagctgtacacttgggagcatgatgctttttaaagttgctattattttttaaaaattaga

SEQ ID NO: 197529 - DNA, 657 bp, Homo sapiens
gtcaattttactgtaatttcgatgggacatttgaaatgaatctagggaacaaagtggcatttgtttatgcattataatttctcaagtacagagaaaaacagttctgatgaaaaacaaaaccctcatttaaaaattctcttggcaacatctacatccttaaactactggaacacaatgaataatttctaattatcctgtgtattgatttggtatattttttgctatagccatgtaatttccttgaatcccaaagtgtttcaggctgttgctgaactgaaaagatgaaaaagggatagaaaaatgtttattatattctttgcctcctagatactggtcctctcatatatatccttgatagggaagcctcctcttcccttgtgagggagggtgtagggaaacaggcatttgcatagttaggtggtaagagtgtaaattgcaaggcaagtcagaaagtagtgctctgctctatagagcactataacttactagtgcagaaaaacattattaggatatattgaggcattgtttttcatagggaaaatgggaattagtctaactgtcttttgggattaaatacattgtaatttggctatcttgtggaatgctatacagttgtgacaattagacagatttatttgtattggcaccagcatgaaa

SEQ ID NO: 197530 - DNA, 632 bp, Homo sapiens
gggaccagcgatgggtgcaaagcacaagcacaaggaaaaagatagataaacggagtcataataattaaaattaaaatgtacgtgcttcaaaggacaccaccggccaggcgtggtggtatgcacctgtaatcccagctactcgggaggctgaggcacaagaatcgcttgaacctgggaagcggaggttgcagtgagctgagattgcgccactgcactccagcctgggcaacagtgagactccgtctcaaaaaaaaagaaaaaaaaagataggaaaaatgtttattatattctttgcctcctagatactggtcctctcatatatatccttgatagggaagcctcctcttcccttgtgagggagggtgtagggaaacaggcatttgcatagttaggtggtaagagtgtaaattgcaaggcaagtcagaaagtagtgctctgctctatagagcactataacttactagtgcagaaaaacattattaggatatattgaggcattgtttttcatagggaaaatgggaattagtctaactgtcttttgggattaaatacattgtaatttggctatcttgtggaatgctatacagttgtgacaattagacagatttatttgtattggcaccagcatgaaa

SEQ ID NO: 197531 - DNA, 439 bp, Homo sapiens
ggatgaaactccagaactcatgagagaggtcttgagatataaatttagggtcctcagtgtttaattactatttaaggccttgagactagttcaaatcatcaagggagtgagtgtgagaagagaagaggaagaacgaggaaagacatctaagaagaaatgactagcatgataggaggaaaatcaagagagtgtggaatcctggaagtcaagtgacaaagtgcacaagcaggagaacctcatcaactgtgtctagtactaatagatcaaggaacctggagactgagaacagatcatggggtttggcatcacaggtgttcttgacaagagaagtttcagtggattgaatgaagcaaaagcatgactggagtagacttacaggagaatgaaaggtaaggaactggagacagtgactacagaaaacttatctatggaattttgc

SEQ ID NO: 197532 - DNA, 437 bp, Homo sapiens
cggcagtctttagtggccagcttcactggggatagaaccactatcaggaggggcaaaccagttctatggatggccccagtacggctggatcacactcaaattagaaaggagacagacgagtgacctggggagctctttctaaaagtcacttatgtagctacctcatatgctagcactgtggcatttctctcctgtgtcttgtttgtttctgtagcaaagcatctggcagcagagaaatatggctgccccaactatgtcacaggtcaaaagagtgttaccagactgagggtctagaaatttctgcaatgcaaaacatggctttgaatttcatgttcctggcaatcacaatgaaaacaaatactatatgatctcatgttgttgggaagattttgatttgctccccagagtaaaatttagatttgtgtaaaatttttttg

SEQ ID NO: 197533 - DNA, 254 bp, Homo sapiens
atttctctttgggataatatgttaatttcacatattctagatattttgtatttgttgtgatttaatggtcataaaaaaagtattttttccttttcacctcagacgactcagagctgatgtttgtgtggagaagcactcattccacctccttagagaaagctgctgtgagaacaaggcaccctgactctgtagagggaggagagaaactttggcttagaaacacaatcagtggaaatgtaatgggtcatcttttg

SEQ ID NO: 197534 - DNA, 354 bp, Homo sapiens
tatttcaaaacattttcactggcctagtgctgtgactcacatctgtagtcccagcactttgggaagccaaggtcggaggatcgcttgagcccaggagcaacatgggcagcctgggcaacatggtgaaaccccatctctacaaaacgtacaaaaattagccaggcatggtggctcatgcctatggttccagctactcaggaggctgaggtggaaggtattctttttttgcaatttagtttcaattgtacatttatgtatatgtgtactcggttgtaatccacttggatttcatgataacaatgaaacttactaagtttctaacttggtttgttgtgaatattagatagttggtgt

SEQ ID NO: 197535 - DNA, 516 bp, Homo sapiens
acctgggtcccccatcatgggcctgacttagcagctctggctggggcctgggagcctgcatttctaccatgttctccaaggtgaggaccagccacaccaggccacctggtaccctaacaggcatgcccacagtccacagcacagctcaccattttcttcctcccacgagtcactttttatgtgtactctttgaaacctccagcccttaatccacagagtgagggaagttaagccacctgcctctgttagccagggtctcggcagtctgcagcaggcaccctccggagggcgcggggtgggggtggggagcaaaaaaaaagagtttaatggaggggtctggagaaagcagctgagttgtgggtcccagcctgaggccagcaaggagagggagtgaggccagggggcatttgtgcaatccccaaaacgtggcttacggaaggaacagcccagctggcctcccgggccatgttcctgcctggcctggctccctcggccgcccaccactgggggccagag

SEQ ID NO: 197536 - DNA, 545 bp, Homo sapiens
acagaattgtctttactttggcactcttcccaaatagatacaaagagatggtgttttagggacactgtactcaacactggactcaattgcccgaattactccaagataacattctacactagtccacagacctattctgctaaatttctccacaagaaacgggaccaaattccacttctaaatgaccacaccataaatgagttttccaagaaacgtaagaatggagggaaaaaaaaattgtttctaaaaatgctttataccaaccatgactaatcaggtaggctgtggggagtaacttcttggagagaatacacacacacacaaacacgcacatgaaaacacgctcctacaccccacagacaagacatagaggaaatgagggataaatctcaactagcatttattgagcacctactatgtgacagagatcatattggacttcagggatatatggtggagaaagatctctctgttcctccaataatctcatgggtcttagtcccattttacagatatgaaagccgacatttaagaaacatcctgcc

SEQ ID NO: 197537 - DNA, 376 bp, Homo sapiens
tcagataatggaaagcatgtgcttgccagtgtgagctcatcaacaatgaggtcagaggaggacagtgcctcttgctcgcaagcccagccttcatactgccttttctttcagtctcaggtgcagcctgttgtgggattgttagaggccccttgcatgtggtctgacatgccagccttctgaccatgtgcaacaggactgtgggctactcctgacttcagagatagcatctttgtacagatgccagagatgccagagacacccaggagttgagtctgctgggggacatggacaaggacgtaggtgacaatagtgtatgtgctgtggggaaaggatgactgtgatagcatgtggaaggttctagaattcagagggtaac

SEQ ID NO: 197538 - DNA, 197 bp, Homo sapiens
cggcccttttcgccaaatcgctgctctgccgcgcgcctacgcaaggaaagattcaagggtccctccacttcagggagtggagcccgcgcctcggcacggatcagctgtgcgtctcctttggcctactggctcctctgcttgtgtctatagctagctggacgcatcgtgactttatcttctcatctttcctggcgccc

SEQ ID NO: 197539 - DNA, 246 bp, Homo sapiens
ccagtcagctcatggatgaagatcttccatcaatgcaggcccaacagcaccttctcccaggggctcccaacccatgtgccaagccctacagaaataacgtataagccctccgaaccatgtaggaatcatggtctaaacagacctttttagcttgttaattggaatattttgtggcatccattcttatgctagtccaagaactctggaatctgtagaactgttgaaccaaataaaaggaagaaactc

SEQ ID NO: 197540 - DNA, 777 bp, Homo sapiens
taggaaatgatctctaactaaagccatgaggatagtaaggtactcagaaaagaaactgatctgcacatttatgtatactttgagagtggcatttatatgagtcagcattttgaaaactctagaacaatggcatttccagtcaccagtagttgaattttatgaggtcctttagcagtggagcatagaagaacaagcagctgagttcttactttgcataaactcagaaagattttgttctttggcacttactctgtgtagaggttggcaaaacaggcaggttttatctttagcgtaaaattatccagagtataaactgcctagaaaagggggattgtaaataatctgtgccatcatttctcccgctatatctaattgtctgtgtcacttcttggtttgaaatgctcaaactacccttgcaaaaaaaaaaatactaaactggccctcatctgacatcccagtgagttcccctcccaggacagacgcactggagcagtggcatgtgcagggcaagggcgccctccccagggcagcctggccactgcacgttcccgatggagaatacacacggcgaccttgcagaacagcttgctgtcaccacctcagggatgaaagcattctcatcccttcagagaaccagttagacagcagcagctgggaagtttctactcacttccctttcatgtcaagactcttcctgaatccacatgcagcctttacagtagttagggcgtaaggcacagtggctcccccggccatctggctgcaagctggcgtaag

SEQ ID NO: 197541 - DNA, 430 bp, Homo sapiens
tgctgggattacgggcatgagccaccgcaccccacgccctttgacaacattttatgtggcataatgatggatagcacagtgatgacttctgtgtacttaagaaaaggctagatcatgttcattcagcaaataaatgtgaaatgaatttattaaatatttctatgcaaataataagaaatataaaagtatgattcttaatggtagagtgaagtttttaatatctggaagcttcatttgtgtagaatatttcctttcccaaaagcttcagataaagtaactcttactaaagtaacttcaaggtcagactcagcctctaatccagtaataaccaaaaaaacctaattggcacatttttttctaagacaattgaattttctccctgatgtctttttaatttattgagcagattctgtctttgaccgaaaagggc

SEQ ID NO: 197542 - DNA, 274 bp, Homo sapiens
attactgaaagcattttctgtttgtttccctcctgaaaacattaggatgggtgagctcttggagggatcctggctctgaaggcacctaggtgagaatggacgtgggatagtgtgagggcatggatttgaggctggtggacgggtgaagggatgacttaaaaggtgatttgctactgataaggatcccaaagaggagaaaattagaatccagatgagtacagccttcttcctagctttgccggcttttccttgggaaagaacataatatttacat

SEQ ID NO: 197543 - DNA, 1007 bp, Homo sapiens
gatggtgagtaatatttaaaaacctcattttttaatgttatttactatagtttaatttcatgtactttaagccatccttatgatacatattaaaattcttactttaaatcttgtatatgaagagcttattcagaggaatttaaggcctttttgattttgcttttgttttatgttttcatagtgctgaaatctttaatattccttaatttgaaacttttaaaccttttccgagtttttcaggaaaattaactttaaaagtcttaaagcttttgcccaagttgtctgcagattttctaaaaaagtaaaatggaactttgataatttctaaaatatttatcagagattaaattttaaaaagcttttattctgtattacccaaagcctaatgctttaacttaacttgaaaaaaatttaggaactatttctaatttgaaaaaaatttagaaactatttctcgttagttgaagcagattttgatcttctatctagaacttttttttttctcataacctttatgaagtttgttgatctttgtattgcttggcttttctggtaatagcagatgtttctacctatccctcaagttctagccacaaatcgcctttcttctatgaagccttcctagcaattctactctaaattggtcttagatacctaaacttctataccaattattatgtacctcttattttacctttgttcattttgcctctagaattagattacaaaattcttaaagaagttgccatattttatcatcctcatgtttttaccatactctgggtccagtatgattacagtgatagcatatactgaaaagattgttactgtgcttattggcctagagccagggtgtctaaccttttggcttccctgggccacattggaagaggaagaattgtcttgggccacatgtaaaaatacactaacactaacgatagctgatgagcttaaaacaaaaacaaacaaaaaacaaaaatattggaaaaaaacccaaaaaacaaaaa

SEQ ID NO: 197544 - DNA, 633 bp, Homo sapiens
gccttcctgctgtctgtgctgtacaggtcggtacattttgcttgtgtttgtaggtggccaatgcatctagttgatggtgacgggttctcgggattaaaccacatctgaactaaaaatttccattttattgctttcaagtctgaagaaatggaacttacagtatacgcttctgggaagttgtgactagaataaagctttgctgattttcccacctaatataacacaattaagcaacacatgcttttcaccagtgctagtggtgataacatgtttgtatcatacaagatcacagaaataaaaatttctgtgatttagtgagaataaaaaatctcattaagtggctggacagaaaacacagcctgagctcatataaacatcacaaggggatctgatgtggatttgccacaatacagaagagtgtgcaaagcaatatttaaaaacaaatcacacttagcacagagtccagcgccaccaacagcaaaaagcaaatacgtgaagaattagagtcaatgtctgcacatgttaaaaagcccactcaaaacaaggaacaatgcgcttggtgagtggcagccctaagatgcacgcgaggatctgtccatcccggggatgaaggcacccgccaaggagagctca

SEQ ID NO: 197545 - DNA, 355 bp, Homo sapiens
agactgcatggcttaaacaacagaatttatttctcacagtgctagaggctggcaatctgaggttagagtgccaggatggtgaggttttggtgagggctctcttcctggcttgcaggtgagtaccttcttactgggtcctcgcatggcagagagagaggagagaggagagaggagagagagagagaatatcttcctcttcttataagggccttaatcccaacatgagggaccctcctcatgacatcatctaaccctaattactttccaaagggccccatctcccaccaccatcacattgtggggttgggcttcaacatatgaatttgtgggggacacaaagttccgttgaagccgt

SEQ ID NO: 197546 - DNA, 479 bp, Homo sapiens
atactaccatatgagttaataaaatttaatacacgaaatttaacttaattattataaactggtgttaatatatttgtaaaatgtaggtatttaaagggaaactaagtctattaaagaagacaatgttttaatgttgttgctagcttgtttgcattttctgtcaccattttcacctcattctgtctattaaaaaattctatatatagtgctaaataaatgatgacttggcctatcttattatgtcaactaagaattgcatttgatacttacaacagacaataacaaaatcttatatagaagggatataatcttcctcacctaacaacaaatccagaagtggatagtccagacctggtaagttggccctccaaagcaaccatggacctaggcacctctggtgtcctacactattaatagtgtctgtgtggcttttgttattatgggtgaaatatggctgttctacctccagtatcatgtcc

SEQ ID NO: 197547 - DNA, 296 bp, Homo sapiens
tagaggtgaggaagtggaagacagtgagtattgactaccgtttgaaaagtttgcctatgaagctggtggagtacaggttaaaagtgagcaagcagggatttgaaagtgttaatgttctagggaaggagagagaggagggaatgagagattgaactaaggataaaataccatcatcttgaactttctagagaaatgttttttatgcttcttgtttgctctttttgtaaaaattgttctaaggtattttttagataatgctgaatatcttttttgatacctttatgatatttcagcta

SEQ ID NO: 197548 - DNA, 188 bp, Homo sapiens
ttcagagtttcatccggcagtgatgctgtgcccaaagaaatgggtcagatgatcccccactgtgccagaatgttggggaggaaacacaaggtcaggcgagccagcgtgccctgaaaacccctcaatctcctggcttctctcagtttgcattcattccctcaccctgtgtgactgcccccaagctctct

SEQ ID NO: 197549 - DNA, 355 bp, Homo sapiens
agttttaatcttggggcactggagcttctggacttcatgtggaattgtattggtgaccaccacctgtgaagcaaaagaaaaaaaaccacagcatcagaaagccaaatagcttcatggtttgatctggaaatgtgacagcttctcaaatctgaggcttgccacgacaggaaaacacagtggatctatgtctcaagtcaatgtttcaattatttatttatttatttatttttagacggagtcttgctctgtcgctcagcctggagtgcagtgatgccatctcagctcactgcaagctctgcctcctgggttcatgccattctcctgcttcagcctcccaagtaagctgggacgacag

SEQ ID NO: 197550 - DNA, 422 bp, Homo sapiens
ataagaaaggtgtagcctttctctgaatgagttgtcttccgaatctgcaactttttttgtcttttccagtttcatgacctctggtaaatgatgcctccttactttgattaaaaataaaataacaaggctgggtgtggtggctcacaccttgtaatctcagcactttgggaggccaagacaggtgggtcacctgaagtcagaagttcaagaccagcttggccaacatggtgaaaccccatctctaaaacacaataattagctgggtgtggtggtggatgcctgtaatcccagctactcagaaggctgaggtgagagaatcacttgaatccaggaggtggaggttgcagtgagccgagatcacaccactatactccatcatgagtgacagcaagactctgtctcaaaaaaataaataagtaaat

SEQ ID NO: 197551 - DNA, 612 bp, Homo sapiens
taggggtcaccatggggaaattgaaatggtcgccaatccgaccatttcaataaagcctgggagacagagcgagactccgtctcaaaagaaaaaaaagacagctctcaagtaaatgactcaacagatgcattcctagggaatccaacatgaccatcaaaacttcatcctaccttccatgaagccaatcttgatagggaagagactaggaaaggacaaaaccaacaacagccccacaagcccaaatgtagtttatgttacccctctgctccccaaaaacgggtaaacttttcccctctatattccccgttttttattgttgctgttgcccaggatggagtgcaatggcgcaatctcggctcaccgcaacctcggcctcccgggttcaagtgattctcctgcctccgcctcccaagtagctgggattataggtgtgagccaccgcacccggccagatatagacatacaacttctaggagggacaaaggttggcatatgattcaccagtgttgttccgggtggttggctagatagctgtctaatggaatccattaaggagtaggaaagagcagcaagaaaaatggctattttcactatttttgaaatgtcgccgat

SEQ ID NO: 197552 - DNA, 512 bp, Homo sapiens
tgtgccggagtttatccccttgtcccaaactctgaaggttatgcaaatgcacaccctgccactcatgtttgtatagggcacgtttgtcacttgtttggacagcagttgttgagagtcacactatgacctggcacgtttgtattctttgacccagtaattttccttttaggactttgaccaaaggaaatggatgaaagtttgtataaaacaatggaatgcggctgggtgtggtggctcatgcctgtaatcccagcactttgggaggccaaggcggggggatcacttgaggtcaggagttggagaccagcctggtcaacatggttaaaccccgcttctaccaaaaaaaaatacaaaaagccaggcgtggtggcacgcagctgtaatctcagctgctctggaggctgaggcgggagaatcacttgaaccccgggaggcggaggttgcagtgagctgagatcacgccactgaactccagcctgggtgagagagtgagctcctgtttcaaaaaaata

SEQ ID NO: 197553 - DNA, 684 bp, Homo sapiens
agacagaggttgcagtaagctgagatcacgccactgtaactccagcctggtcgacagagtgagactccatctcaaaaaaaaaaaaatattttcttcaaatgtataacttgtttcattctcttgatgcaatttttaaaatgtattattaagtaagttggcctataatacaagaataactaaaatctgtgtagccccggcaacctacccaagtatgttcacactgttactttatctgatccttttgacaatagcatgcaataagtaggtgaggtgttacccacattttatacctaagagtggaggcttagaagtgtctaatgactttcccaaagtcacaaaactactaattgttagccaggatccaaactcagattttaagactctaaaatctttcattagcttatagtctttatttattcagtacgactttatttcacttctgtttgacaggtactgagctaggtgctgaatatgcaaaactgaatgaccttcttatcttcaaggatctttgtctagtgcgggagccagacatgtacaaaggggctatggactgttggggtgggggtgggaatagggaggtggccaagaagttatggccaggtgataattcgtgaaggtgatattttaaccaagtcttaaagggaaaatagcagtctcttaggtagatacagtgggaaagaatat

SEQ ID NO: 197554 - DNA, 165 bp, Homo sapiens
atgaaaccaacagactgaatgttgacagaaaagcagagagtcaaggataaaacccatgagaacctggcagtccaagactgaaaggaggagaaaccaaccaaaggatagaaattaagtaagcaaaaagataacaggggtctggcagagtcacaggcatcaggaggg

SEQ ID NO: 197555 - DNA, 450 bp, Homo sapiens
agactctgtctcaaaaataaaagaaaaaaaaaatgatgctttggcactaaatttgtcatctgctgttacagtaagtaaatcactagatgtaaatgctaccagatgaacagcctgtcattagttcagaccagtttaacatcaagatctaagaggtaaaatctatcatagccaaattctttacatcattgatatctggctaatgttctgttttagaagaacaaactaatcattagtgttcttataccagatcatcaaattaatttataatagtgaaaaattgaaaatgaatactgtacttataaaaatgcattattgaaagttatattttaagaatatatcataaacatgttcttatatttaagtgaagaaagcagacaaagcagaattatcctaaaaaatatatatatatatatggctgggcacagtggttcacgcctgtaatcctagcac

SEQ ID NO: 197556 - DNA, 422 bp, Homo sapiens
caggccatactgtccccaactcaatgtggctatcttgccgccttgcacacaagctcacctgcaccacgactgcccgttgaccccattctcacagaacaatgtccagaactgacagcaagtatggctcaagaggccaactactagtcaacagagtggaaccggagaagtaagaaaggacatgagtgtacctccctgagccatgggattcttcagagtcagtaaaggatatttccagaaatccagtctcgtccatacaacctcctggtgacacacacactggctccttgtgacccgatcgccaacaggggtaagacctgtgtacccatcagtgctttaacttgtacaatggatcggaccagcccaaagtgttctttaatcaccaggtggcatcttagtcgtgtgaaggtccttgtttgtaggaa

SEQ ID NO: 197557 - DNA, 345 bp, Homo sapiens
aggaatatggagatacttacagaggcaaagactgtcctggcagggacaacagttcaagctcacgggtaagaccactaagccactggatggaaatgtggttggagtctgcctcaaacctcagtggaaaggggcaagttcctgcaaagatgcatgcattcacatggcctttcctgcctggaggtgacagtgagtggtagtacctgcacacagggctctggcagactcaaccaggtagccagtctcagacaaactgtggaggcaaattacggaaggtttgatccctggccctgtcctctgtgactggtccatgaagtcacttttcctgcctggtatgaatgcttcccc

SEQ ID NO: 197558 - DNA, 387 bp, Homo sapiens
gatacagagtctctcttttgcctaggctggagtgcaatggtgtgatcttggcttactgcatcctccacctcccaggcctatgcagtctacctacctcagcctcccaagtagctggaactacatgtgtgcaccaccatgcctggctaatttttgtattttggtagagatgaggttttaccatgttgctcacgctggtctcgaattcctggcctcaagtgaaccacctgcctcggcctcccaaaatacttggattacaggcatgagccaccatgcccagctgtgtctttgatacccttgatgcccctcactttattctatttttcctctttttcatagcatttattacattttgacaaattatataatttttttgtgtttacagtatgt

SEQ ID NO: 197559 - DNA, 585 bp, Homo sapiens
ggagacatttcctcagcaccattcctgctgccgacatatgcttgtatctgatagattcttatatccaagctgaaaacataatgacaaagtaaagtttaatgaaactatgctataagggcaaaaatagtactttacagctgagcttttctctttatttatctggcttgatccagaaaaaatagttctaaatgtttagagattgaatagatgcatgttattccggcctttcatggatgtttttatcttttaataaaatttgggcagcagataattcaaggttgtcttttggcaagaagatgaagtgaataattctgttagtcttactcatagtttgaagggcttggccctttattccagcagcacggggagatattcagtcttgccctgattcactttttaatatcttttgaatatgaattagaatttttaactgagtatttccatgatttggaaagcagaagagtgggaggaagaaagcaactcttcaatatccacttcttttccagctctgattaagcttttcaaatatccaagcctgagagagttccatttctttccaatggactctcacaaagaaagcaaaac

SEQ ID NO: 197560 - DNA, 1226 bp, Homo sapiens
gtactggtctgtggcctgttaggaattggactgcaccccatgaggtgagctttgggcaagcgatcatttctgcctgagctctgcctcctgtcagatcagtggcggcatttgattctcataggagcgcgaaccctgttgtgaactgcacatgtgagggatctaggttgcatgctccttatgagaatctaactgatgatctgaagtagaagagtttcattctgaaaccatttcccacctcctcctgtccgtggaaaaattgtcttccacaaaagtagtccctggtgccaaaaaggttatgggatactcagctccacgttgcacctaaagtagcaaaagactagataaaaaccctgaatatgtacttgtgaaatcctgaatatgtaccttcgtgaaatcagtgacataaacctcctcctgggttacgtgttacagttcacaaacgatctcaagtattctacagttcacctgtagttgtcccttgtacaggtggaagaagagagggatctcagattccctgtagtagcgtccccgcccccagacagatctctcccttcttcatgccctggattgtttcatccatttaaatagttctcttcttgattctgacttgagggatgggcatcctgtgattaggtttggatgtgacagtggaagtttgtcagaaacattttggctcatgggccagatacattggagtccgtccgaaagctcactaggaaatgtagattctcaggtttaacctaactaggctaactatacctaagtatcttagcagaggtttggatgttacagagtttgaagatcgcatttttaggccctgtattcttattctctgtaaggatgatgtcgcccttcaagggtgtaaggattgttattggggagtatatattcagggcagcttgaatctgtgctcccgctcctcacctcattgttcttcggagggggatggaaaatcttagatgttaatcatggtttgtggccctccagaagttaatcttacctgacaaaaccttattccttaatgtttaatttcccttgttaagaatacatttaatttattgaattaaatttaaattaaatttctctcctggggatgggatactcaaaaaaggttgagaaacataatcctataagaattactctggcatagtacctgcctgcattatctgtgtcccctctcccatctttggaaccttaggatgtgatttgcaacattattttaatac

SEQ ID NO: 197561 - DNA, 285 bp, Homo sapiens
cttagcgagctcggtaccccaccactcctatagatcagtgcaactatagtgagagcattttacttagatgttggaggcagaggacagatttcatggtttgaggatacagagatggtcagtataacacctttttgaggaagttggtgctgaaaataatatgggaggtaggattgaaagaatatctttaaaaattttttttcattgtggtccttgtggaacatgaacatctttttaaaataggaagtttgtgagcatttgtatagactgagaggaaaaggagatggt

SEQ ID NO: 197562 - DNA, 904 bp, Homo sapiens
ggtggtcatcgatgccactattcattcaggaagcttctggactagtccagtgaaaaggtaataaaacctgaattaagatagtggaagaagaggagaagaaattaaaagaaattcagtggtaattcagtagtacctggccctttacgaatgaaggtgagtgagatagcaaatgtgaggcttttggtttggatgtctggatagatggttcaggtcattaactgagattgggaaggcaggcgaaaccagtatggatgattgaatttggggtgtcttactggctgcgtcaggagatgttccgtcagatagccacaagtaaaggctggaacttgtggaaggaagagcccgagataggagttactgcatacaggcaggagccaaagccatgagaacgggtgagtctcactaggagagagctaagatggataaggacacaactctgaagggcatcattatttaaggaggaggcagagaaagaagaggtagcaaaagaaactaagaaacagcaatcaggtgggaggaaaaccaaatgagagtagtctgctggaagttaaggggtgatctggcaaaaggggtgcttccaaaggattcagatgctacagggatggaggtgtggtgagaacacaaagtaggcctatgggtttgtgattagtagatcagtgcaactatagtgagagcattttacttagatgttggaggcagaggacagatttcatggtttgaggatacagagatggtcagtataacacctttttgaggaagttggtgctgaaaataatatgggaggtaggattgaaagaatatctttaaaaattttttttcattgtggtccttgtggaacatgaacatctttttaaaataggaagtttgtgagcatttgtatagactgagaggaaaaggagatggt

SEQ ID NO: 197563 - DNA, 681 bp, Homo sapiens
tgggcaccaaaaaataaaagcaatatatgataatcacaaagagaaaatttttaaatgttagaaaaagtttttagcaatgaaacagtattgcttttggaaaggaagatttcatatttaagatgcagtaatttgccttttctaagttgatatgttatagcagtggtttttttcaagcacttacagacagctgataaccacaaattaccttatttcgtcttctagactaccggtgagtttgaaacgaaagtgagactcaaattttgaagtaatttacccaaaatttcactcctgcctcatgttataattaaaaggtgttctcaccttatttatcctaattagtgtgtttcttggaggtagaaccatctacctgcattcatgtctctaataaccattgtagcataggcagttggactcagtctcaaattctcacttgcctttctatgtgaggagtcacaaatttcagaggttgacagaaattgggcagctaagggcataccttttctgatgtagacaatgctagccaatcattttcttgtgtccatatagtctcgaaattggtagattttaagcactttaacaaaagtttggaaatccaaagtctttctctgaaatatttggatttttcaatattggcagccaactgaaaaagtagtggctctttcctgttcaaataaacctcac

SEQ ID NO: 197564 - DNA, 432 bp, Homo sapiens
taggagtgtagaaagtttaatatcaataaaaatgataaatagcaggggtttttgtaataatgccaacaatgtcaatggcaaaagaatgagggttttagattaaatggtctccagctgctttcaactttaccagtacatgatttttaatgagttctacaggtgataagtgctagagaaattcagaggatggagagaaaattgtcagcctgaatagtcagcggtttcttcatggaggaggcagtcttgatctgggtcttaaaaatgaacaggcttcgcagagttaagaggaaagaaggcatttcaggcaggcataatagcactaaacagaaatacaacggtgtattagagcaaaacatattcttggacagtagatacaccaatttaattctaagtttagtgtttgggaaggaaaatggcaggaaacaaacataa

SEQ ID NO: 197565 - DNA, 577 bp, Homo sapiens
ttgtagtggtatttttctgacctcattctccattccacaggttttagctgcaaggctgaggcatccaactcttaataaagaggttatgcatgagtgtgagtgtgcccaatattatctgatgcaaatggtagaagagcttttcttaaaatagtaatctcatcttcaagaatacatttttattctctttaaatgtacaaccattcacattttaggctaaatttgaacaatcttgattcctatgcaatcctaaaggtgtgatggtacaaataaaggcccaggaatctctagttttttccccaaagatataaaaagaggatagaaatgtggtccagcattacataatgttgccaccactccaggaaaagaagtgagagcaccttttcctatgtttcttggctacttgcatgcaccccaccccttttttggtgtgaagtatcttgtccatttttctttgtatattttgaatatgagccattttttgcatttacatgtgattttctcccattttggcttcttttttcactctcaatggtgtctttgatgaagagaagtgcttaattttagtgttttcccattt

SEQ ID NO: 197566 - DNA, 365 bp, Homo sapiens
agagatcttctactgtctgggtaagggccaaattgcaaaaactttaggccttgtgggccaaacgtctctgctgcagccactcagccctgctactgtatcctgaatgtaaccccagacaggaacaaatgggcacagctgtgttccaataaaactttcctggccggcacaaaggctcacgcctgtaatcccagcactttgggaggccgaggcggacggatcatgaggtcaagagatcgagaccatcctggccaatatggtgaaaccccatctctactaaaaatacaaaaaaatcagctgggtgtggtgggtacctgtagtcccagctatagggaggctgaggcaagagaatcacttgaacccggtag

SEQ ID NO: 197567 - DNA, 266 bp, Homo sapiens
tcagcctccaaagtgctgggatcacaggcatgagccaccatgcccggccatgaatttgactttcatgaaagttgaaaatgtgctgctaactccttcattcagtgatcattttgtgaacatgttacattttgctaatcatttgggatacaatagcaagtaagacagtgcagcatagagtttttatttagctgtatgggaaaagatgtctggtggtacaagactgcacagtaagtaaacagtaaattttggtcttggaaaagacaagg

SEQ ID NO: 197568 - DNA, 559 bp, Homo sapiens
accaacatggagaaaccccatctctactaaaaatacaaaattagccaggcctggtggcacacgcctgtaatcccagctactcaggaggctgaggcaggagaatcgcttgaacccaggaggcagaggttgcagtgagccgagatcacgccattgcactccagcctgggcaacaagagcaaaactccgtctaatgaaaaaaaataataatttcctttgtgtgatattgtgaaatacatatttggtctttgtctctgtttcctggtatattccttcaaaaattcttaaagtcttccaaatgataagtgtctttttgtatgccaatgagttgactgatggcaggtcaccagaaagaccaagatgggagtagaaggttggcactttcagccccacccagcaacctttgagaaggggagaggagccgaaggctaagttgatcaatggccaatgatttaatcaatcatgcctatataatggagccattataaaataataataataaactgagttcagagcgcttccagatagctgaaaacctggaggttctgaagggtggcgtgcc

SEQ ID NO: 197569 - DNA, 556 bp, Homo sapiens
atatgtaccatattcatatgtagattcaatgctattaagatgtcagttctttccaatgtatagattcaatgcaattccaatctaaatgaaaatgtttatatggagaggcaaaagaccttgaatagctaacaccatattgaaggagaagaacaaacttggaggacagacactactcaatttcaagacttaccgtaaagctacagtaatggagacagtgtggtattagtgaaagaacaaacggataaaatgagatagggagttcacaaatagaaacacattaatacattcgattaatttttgacaaaaaagtaaaggcattatgatgatgaaacagttttttcaggaagggctgctggaatacctggatatccacatgcaaaaaaaataaatcacagaccttacacccccacccaaattaactcaaaatggatcagcaacataaatgtacaaaaaactataaaatttatagaaggtaatatagaaggaaatacagattatcttgggtttaatgatgacctttagaaaaaacaccaaagttgaagtcaatagaagaaag

SEQ ID NO: 197570 - DNA, 333 bp, Homo sapiens
acagagtggcgacggggtaggggagagtgttacggaagacagagcgcggcggggtaggaaatagtgttatggaagacagaaaaaaaaatctgacatatgtcttttgcacaatttaaactttttaaatgagcatgttctacttacctaataaataagctcaataggtcactaaccaaaaaataaacttctcaagggtcactttcctaaaaatgttcaccactgctgcttctaatttatgaattttttggaccattttaaaaatgagtattttaaagcctcagaagcattctaaatagtgctttaaaagtccccttccccaacacttctcaaact

SEQ ID NO: 197571 - DNA, 782 bp, Homo sapiens
[322 bp omitted]gtaaacgggcttaaaatctatgtcaaactagccacgagaataaaaattatagaatataaaatcgtctgacttttttgtataagcaaagaatgctaccaagaataaacaggcaagaatagaggtgaaatagaatgagggggaaatgagggaccatcgtttgaatctactatgaagtatggtaatcactgttttaagaattccagactattaactactgtgcagttaggaagggaattagttgtagccaaacaaaagccataaatatgaattttaggttgtacggaagaaatcctcttgatcccaaaacataaatgcatgtactgagaagccaagctgcacatggtgtaattttttctgtcttatcctgattaattgacagtcaactgtatgcttctttcctgaaggtgactttacaatctctagacccagacatttctctctgaagtggagtgaaggaagg

SEQ ID NO: 197572 - DNA, 332 bp, Homo sapiens
acaagccgcctatagatggccaactaagagagtaccctgtaacacacacccaccgatgcttcagctgtaaacactcaccccaagacactgacgtggggtcggagcctcacagcctgccgtctgtatgctcccctagaggtttgagaagtgggcaatgaagaagcaagccagtcaccctgttgcacgccctccaagggggacaagggaacctttcctgtttcactaacattcttcacaaacagattttgaaaaacatccattcagctaaaatgcatatatccttatgctaagaaggtggcaagatattttgaaataaaaatttaaaaaacaat

SEQ ID NO: 197573 - DNA, 843 bp, Homo sapiens
cccttaaggaccagcgggaaagataaaagctggggtttagtctgtgctgcgtgaaatatgtcttggcctcacttcctgtcctctgagctgcctgcagccgggcgaggtggtgttgaactgtgttttttgtgacgaagcttacttttaagtttcatccctaaactaagttgacctgtttctttaagacggcttgcaaaatgtgttttcctcaatgtgggatatggaaagaagcagttgctcctgttattttgagctagtacctgacgctatgagaaattctaaaagagcgaatcagatcatgcaacatgaataactatggaggctgagtgatcaagaacagaagttaatattttggtgttacaaactttccacggattaggtgaataagatatttataatttggtgtgttcatctcaagttatggattacgagtgcggggcactagtgctttagattggtaaatgaatcatcaacagtcgccttgaaaatcgaatatttttgtcaccattttcaggacatgagaaaacacgctgagagtttaaagcaattatggtcctcacaaactagatcattctgtccccaagatgtgtactcctacttccataaaaaaactataaaacagcctcaggcaggtccttcaggaggtattccagaagaaggcattgttatcataagagatgactgctccgtgcgtgttattgcccctgaagactttctggtgggacaagatgtggaggtggaagatagtgatgttgatgatcctgaccctgtgtaggtagacctaggccaacatatgtttgtcttactttttagccaaaacgtttaaaaactataaaaaaataa

SEQ ID NO: 197574 - DNA, 635 bp, Homo sapiens
cccttaaggaccagcgggaaagataaaagctggggtttagtctgtgctgcgtgaaatatgtcttggcctcacttcctgtcctctgagctgcctgcagccgggcgaggtggtgttgaactgtgttttttgtgacgaagcttacttttaagtttcatccctaaactaagttgacctgtttctttaagacggcttgcaaaatgtgttttcctcaatgtgggatatggaaagaagcagttgctcctgttattttgagctagtacctgacgctatgagaaattctaaaagagcgaatcagatcatgcaacatgaataactatggaggctgagtgatcaagaacagaagttaatattttggtgttacaaactttccacggattagtgtactcctacttccataaaaaaactataaaacagcctcaggcaggtccttcaggaggtattccagaagaaggcattgttatcataagagatgactgctccgtgcgtgttattgcccctgaagactttctggtgggacaagatgtggaggtggaagatagtgatgttgatgatcctgaccctgtgtaggtagacctaggccaacatatgtttgtcttactttttagccaaaacgtttaaaaactataaaaaaataa

SEQ ID NO: 197575 - DNA, 1472 bp, Homo sapiens
  misc_feature (1104)..(1104): n is a, c, g, or t
  misc_feature (1121)..(1121): n is a, c, g, or t
  misc_feature (1144)..(1144): n is a, c, g, or t
  misc_feature (1157)..(1157): n is a, c, g, or t
  misc_feature (1163)..(1163): n is a, c, g, or t
  misc_feature (1167)..(1167): n is a, c, g, or t
  misc_feature (1171)..(1171): n is a, c, g, or t
  misc_feature (1174)..(1174): n is a, c, g, or t
  misc_feature (1176)..(1177): n is a, c, g, or t
gaagggcaacctcgtgctttctgcagaggagaccggagggcagaaggcagagtccaggcttagactgcagttcctcgcttacctgtgcagtctaattttgagctgcctctttgtagtcttaaaaggcaggagcttcgtgttgtgggtctgctaacccgtacgtttccgtgggcaagtcgtgtgtactcctcgccatggctcagctccaaacacgcttctacactgataacaagaaatatgccgtagatgatgttcccttctcaatccctgctgcctctgaaattgccgaccttagtaacatcatcaataaactactaaaggacaaaaatgagttccacaaacatgtggagtttgatttccttattaagggccagtttctgcgaatgcccttggacaaacacatggaaatggagaacatctcatcagaagaagttgtggaaatagaatacgtggagaagtatactgcaccccagccagagcaatgcatgttccatgatgactggatcagttcaattaaaggggcagaggaatggatcttgactggttcttatgataagacttctcggatctggtccttggaaggaaagtcaataatgacaattgtgggacatacggatgttgtaaaagatgtggcctgggtgaaaaaagatagtttgtcctgcttattattgagtgcttctatggatcagactattctcttatgggagtggaatgtagagagaaacaaagtgaaagccctacactgctgtagaggtcatgctggaagtgtagattctatagctgttgatggctcaggaactaaattttgcagtggctcctgggataagatgctaaagatctggtctacagtccctacagatgaagaagatgaaatggaggagtccacaaatcgaccaagaaagaaacagaagacagaacagttgggactaacaaggactcccatagtgaccctctctggccacatggaggcagtttcctcagttctgtggtcagatgctgaagaaatctgcagtgcatcttgggaccatacaattagagtgtgggatgttgagtctggcagtcttaagtcaactttgacaggaaataaagtgttataattgtatntcctattctccactttngtaaacgtttagcatctggaagnccagataggcatntcagantggngggntcncnngaactaagatgggtcattgagtgatgtgtcctaagcggtcactaatggatgggtgacataagtaaggatacctacaatgaacagaggggatcggacctctatatacactgttgacggggatatacagaagtgaagacacttaaaaatggttctgagatacataggtaaggacaaaggactagaagaagcgacgaggtaaggttaaccacaagagagagaacatagaaatttaaagaacactataagagagtaagtgacaaaactgagaaagagggagaagaagcagagtagggaa

SEQ ID NO: 197576 - DNA, 1056 bp, Homo sapiens
  misc_feature (688)..(688): n is a, c, g, or t
  misc_feature (705)..(705): n is a, c, g, or t
  misc_feature (728)..(728): n is a, c, g, or t
  misc_feature (741)..(741): n is a, c, g, or t
  misc_feature (747)..(747): n is a, c, g, or t
  misc_feature (751)..(751): n is a, c, g, or t
  misc_feature (755)..(755): n is a, c, g, or t
  misc_feature (758)..(758): n is a, c, g, or t
  misc_feature (760)..(761): n is a, c, g, or t
ggtatatccggagtccgacggaggagcagacagcatggtgcacgagtgaagtgaactgaggtgcagtctgcagatgaagacgggtgcagagagacatggtagtctctggagctgaagatcttgactggttcttatgataagacttctcggatctggtccttggaaggaaagtcaataatgacaattgtgggacatacggatgttgtaaaagatgtggcctgggtgaaaaaagatagtttgtcctgcttattattgagtgcttctatggatcagactattctcttatgggagtggaatgtagagagaaacaaagtgaaagccctacactgctgtagaggtcatgctggaagtgtagattctatagctgttgatggctcaggaactaaattttgcagtggctcctgggataagatgctaaagatctggtctacagtccctacagatgaagaagatgaaatggaggagtccacaaatcgaccaagaaagaaacagaagacagaacagttgggactaacaaggactcccatagtgaccctctctggccacatggaggcagtttcctcagttctgtggtcagatgctgaagaaatctgcagtgcatcttgggaccatacaattagagtgtgggatgttgagtctggcagtcttaagtcaactttgacaggaaataaagtgttataattgtatntcctattctccactttngtaaacgtttagcatctggaagnccagataggcatntcagantggngggntcncnngaactaagatgggtcattgagtgatgtgtcctaagcggtcactaatggatgggtgacataagtaaggatacctacaatgaacagaggggatcggacctctatatacactgttgacggggatatacagaagtgaagacacttaaaaatggttctgagatacataggtaaggacaaaggactagaagaagcgacgaggtaaggttaaccacaagagagagaacatagaaatttaaagaacactataagagagtaagtgacaaaactgagaaagagggagaagaagcagagtagggaa

SEQ ID NO: 197577 - DNA, 641 bp, Homo sapiens
ccagcccccattccagccattgtctcttgatggtactactgacacttccccaggctgtcctgtttgtaataaccaccactcttctgtgccagctatgcctgacgttcattcaggtgcactcagactttgagtcctgcttctggttgatcaatccctctccagaactcctaccacctttcctaggaccctgaaccatttattagccacttatgttgtgttgcacggtgacagtttttatcttttaatgttctctcttgtttctccagctaaatgggagcagccttgaaggcagagatcatgcagagatcatttctcatccgactcagtatccctgtgcttgggatagtatctttcatatattaatagttgctgctcagtaaatcttaccactgtgatgtcttttcaattgctgttttaaaagtctttttgcagaagagacagtaataagaggttttgaaaatcttagctgcttttcctatcagagttttatgtatgaattagaaaatcatgtttgttagatatccaactgaatagttatatatgtaattaaagcttcttctaagaaaatggaatgaagttggaatctttctgtggttttcctcaaacaggcataaaaacattgctaagcacaaacagatata

SEQ ID NO: 197578 - DNA, 474 bp, Homo sapiens
ccgaccaacttcaagttgaagttcccatgaacccttctttgggttggatttatttgctggagtgcagtggtgcgatctcggctcactgcaagccccgcctcccaggttcatgccattctcctgcctcagcctcccgaccagctgggactacaggcgtccgccaccacgcctggctaatttatttttgtatttttagtagagacggggtttcaccgtgttagccaggatggtctcgatctcctgacctcgtgatccacccgcctcggcctcccaaagtgctgggattacaggcatgagccactgtgctcagccaaaactcatagccacttttatctttgttttctcttttgattctacccaaatttccagtgagaaagtcctgaattcagtgctgaaattaggtttttacatgtgcttttttctataagtgtgaccttgtaataaaggaagtggtttgttgtccttgataatctc

SEQ ID NO: 197579 - DNA, 556 bp, Homo sapiens
ggcagtgacattttctttagcctggggattgccatgcacagtgtggtgttggagaacattaatactggaggaagccttgagttctacgccatgttctgttacaggctgcatctgtcccggcacacatcatagagcctttcttcccgggcctcagtttctcctttgataaggtggaagaaaggactagatctttcttgtaaggcccttctgggacttaacaacattcctgaatgggcccacccttgtttcccattgatcccccgtgagcctcctttctctggcctctaggcagttgctccagccatgacaagcaggtgtccactgagacctcaagatctgataagcagggtttgacaccagggaaggggcctggaatgaaaattgtttccaaacacccttgtttatgacttccagaaatggttaaagctcttctaatcagccagcacagataggacccctgccgtgaatggagccactgggatgatggtatttggctacgagggctccagagcacaggcctgccctggaggcattagatcgtgactcaggagctgga

SEQ ID NO: 197580 - DNA, 318 bp, Homo sapiens
taagactgtgaaagtatgttgaaagtatgtttagtgcattgtgtatttaacaaaatttacttatagattatgactacatgctaattcttagaatgaacaattatttaataatttcctggcatcctattgcgtagatctgcctttggcagcttaatgataaaaggggtcatttctgcagagatttctggaagcaacttgagtttctcaagggcttggtaagtcttcagcgttcacatcattcctcctgaaaccgcctttcacgccatcagttttgaccatctctccctcagctgtgagccaggcttctgctgccaccat

SEQ ID NO: 197581 - DNA, 475 bp, Homo sapiens
ccaacctctcagatcttatctgtgtcattaagcaatgcatgactgtaattaatttcagatatattgcaaaacagaccattagcaatgccttttgaaggaaattattggacttcctttagtgaatgggtatggaatacttaagattagcagtatttattggcatattgacaatattttctgagtgttaaaatatgttttctgcttcttttgttctaaccattagagaattgctagtaactgattcttgtgtttaggcatttcttcattttgtgatcactaatacaggttttcctgacactctgattcctaccctttctcttgtttgttatttttccattttcctctgcaaagaggtacactttcttttctgatgctctttactttttattcctttctgttttcagttgtgggaccaaagacgattccctatcatgctcaccattgctagttagaaatgtttatgtgatttgaaacg

SEQ ID NO: 197582 - DNA, 267 bp, Homo sapiens
cacagacacacacacatgtacacactcacacacacaacgctggaccaatagagagaactttatcagtaaaatgtaactatttcattacaccagaagctatccgtgtttaaggccctatccccaaagcaagtagagaatgacaattatcttggtaaggaacaagggccttcccacttccatcccctaaattacactaatttctggcgtttccaccttctctgagccagtgcttccatttgggaaataaatatgaaatgatttatccat

SEQ ID NO: 197583 - DNA, 108 bp, Homo sapiens
cacatgcaacccacaccccagcaacaccaaactacttcctactcccaattgcaccaactggatcttttttgccactgtgttttcccatatgtttttccctccacatgg

SEQ ID NO: 197584 - DNA, 374 bp, Homo sapiens
ctttttcttttctttgagggagaaattaggcaaataggcaaaagaaaatatgagaggcggtttccttccttagaagggctgagcagggattacgaaatctcaaatgccaagatcttatgtgcaaaccatgcccaatgctgtaaacattattaagccctaccaaaggctatttacttgaatcctaccaagaaacattaagcattacgaaacttcttttaaaatattgttttgcattataaaatagaatacaacataaaaatatttatgttaaataattataataaactatgcaaaatgagtaataaggaacaatatagcataaagtcatgtatataatgtttacaatatttttataaagtaaataagaggttctt

SEQ ID NO: 197585 - DNA, 301 bp, Homo sapiens
acaggaaacacactgagcaggataaatagaaataatatttataggggcttacagcatgccataccagcctactggcagaccaaacggatgtgctttaggttcatggcacaaggccagaatccagataagtgctattcttccacagagcccagattccaacaccaacatctgtatgttctcttttctaagatgcatcttttagacactctttgggagtatgaaaacaatggcaaaaactaagacaaaaagtggaaagttccactaacatcaaagaattcactgctattatgaagttagtatt

SEQ ID NO: 197586 - DNA, 570 bp, Homo sapiens
tgcaagcctccaagtgttctcttccaagtatggtcacacaggacatacctcatttctccaggaatgcattctgagaacacatatgaagtgttgtctactagggaagctcattagaggctcagtgaccatagcttttattgggggctggtcatgcaggcaccctttgcctagcacatagcaaaattccaggcttgcggaaggaaagcaggtgttcagcacaaaccccattgtttatacagtttagccacagtgagccattcttatcagggaatagtggcaactctcttgaaatccaggttctcagatgccagctaagggccatccttgaaggcaggcctttttaagtataacagtcttgggcctcaaatgtaaactctatatcaccttctcaaggcatttttctgttacttgctttttggtttcttatatgaatctcactttttttaaaaaatacctcatactttttgctgaaacctacaaattttagataatatattgcagtgatttctggatactgctaccccctcctctactgtggggctcattggtattgtttacttctttgtttag

SEQ ID NO: 197587 - DNA, 455 bp, Homo sapiens
ctggtcgatctctagaaggatccccagttgcctcgtaatagtcaaaaagtgaaaaccgaaatgtccatcaactgatagctaaataaacagaatgtggtctacctagacaatggaatactattattcagccagagaaagtaattaaataacaatacaacatggatgaaccttgaaaagattatgctaaatgaaagaagccagctacaaaagaccacgtatagtatgattccatttatataaaatgtccagaataggcaaatccatagagacaaaaagtatattagtggttgccaggggctggggagagggaatgctaagtactgctaatgggtacaaggctcaggggcaatgaaaatgctctagaattagacagcggtgagagctgcacaaatgtgtgaatagagtaagaaccaataaatcatacacttaaatcaaaaagccaggcgtggtggatc

SEQ ID NO: 197588 - DNA, 245 bp, Homo sapiens
agctgcacaagagccacagagggaatgacgccagcgagaagcagagatgcatttcttggaaatgccaaaaattatcaatgtatggggtagatttacatcatgctaagcatggggaaagactgtatgtggtacatctcctaagcttgatacaacgtctctgatgacctctggacatcacacatccataggaaattacctaaacatgaaatgtgcaagtagcaaaaggaaattgcagttctaggatg

SEQ ID NO: 197589 - DNA, 1163 bp, Homo sapiens
ctgggtcacattacatgacacatatcctatactaaaatctacatgaatacagattcggcatgaaagatcccctgcatatatatatatatagtcaaacaggtgtggttataattctctaacccttaaccttctaccatacttgggatatatctgcaatctgtaaacaatatttctgtcatggcaatttttgacaaataggaaggaaggctatttctgtcaagggcaacttaattactaggttttagggcttcatttcataccagtgatggtggtaataatagtaacaccagcaggttcagtgtttgtcatgtgtactcactaagtgtcagagactattctagttccctgcattgctacaaaggtcctatgttaaagggcctataaggtaggtattattgtctcaaagttatagctaaggaaagtaatgttcaaacaagttaatgccacatagctagtgtcagcatcaggttgtctgaattcacagctagagcactacaccccactgctgacaagaaaatgaatccaaagatgctgctggctgtcttggatcacttgttctcaaggaagctagctaccatgttgtgaagacactcaagcagtcctaagagccttccacatggggagagactgagacatcttgccaatagccggtatcaaattgcctacaatgtaagtaagccatcttgacagcagacaccaagccactaccatcgaactaaggcacctcagaattatgacccatacaaaccatgtgaggtgataaatactgttatttaaaaaggaaaacaaggtgggtctttcacttctagcactcagattatggatcctaaatagcattttccaataaaaggaagcagagctcttcaggaaaatagtcaactccaggtatagggcagaaaatgtacaaaacttgtcataacagaaagcaatcaggccatcaatcacttctggagttatgtcccaaggactcagagagagttaatgtgaagaggctcccactaacaaagatggggtaatttgaggagcaataaaaaatgaccacaattggccaggcgcaatggctcacgcctgtaatcccagcactttaggaggccaaggtgggtggatcacaaggtcaggagatcaagaccatcctagccaacacggtgaaaccccgcctctac

SEQ ID NO: 197590 - DNA, 382 bp, Homo sapiens
gcattttgttacggcagcctgagctaatactcctactttgtcctgcatttacttggtcttccagttagttttttagactttgggaatcagagcagtcagttgtcagattttagcttacagttgtcctacctgtgcaactgaaatttcttccattttaaaccagagcagagttttagagtcaaaagaaaccagatcttttagtgcagaagctttcacactgtattagaagtgaggaagttggttttgtgagttgcagccagcagttctcttatgaagtgcattgcctgcagttttgtgaaagttgtattcccagcttgtgtgtgtatatttgcgtgtactagattgagatataaagtatatttttgactgtaggtatggtaaa

SEQ ID NO: 197591 - DNA, 419 bp, Homo sapiens
aaaaatgtaataaattatatgatgcaaaatgaccacatgaatattctaggtaacactaaattaaaatattcaatttatacttcagaaaagtaaaacaactttctttctctaagtaactttgctatctttaaaaatcagctttaatctgtatcactgttcaaacatgggtcataattattagtggatcataattaacatatcataactaactttctattatgaattggaattaaaaaaccttacaaagtaccaaagtgtttaatacatggtaatagcattgttccatgaaggatttttttctttcatgaagcctttgctttagaaacatacagatagggagaggtagaaatgagatatagctagagacagacatacagatgtgtgtgcacatgctcatctgggggtgtgtaccagctcat

SEQ ID NO: 197592 - DNA, 265 bp, Homo sapiens
ggaggctgccgggctgggcaaggggtctgttccagcctgttctgcagctgggacttggccacactgcagcaggttcacagatgaagcccgcaggagcaagaccccaacccatgaaccagaggtgccccaaagagcacctggggcaacaaagggatttccccatggaggaaggaagacccaggggccatgtggggtggacaagcctgggtcccagtgccaaggccgacctgctgctgcaggttcctctgtcttcttagccttgctt

SEQ ID NO: 197593 - DNA, 449 bp, Homo sapiens
gcatcacagtcttcaatcccatttgccatgtgacataaatcacggctttcactggtccgctgcctgcggggtcttcttgaagatctttctggttggctggaatccatctttgctttatctgaggctcgttcactttcagcaggatcttggaaacactgtgagtgtaactccatttgtcttgcccgattttccaccaattcgagcatttgtgtaacaatctgtattttttcatctcccaattcttgactattaattagtgctctctggagaagctgctgtagacgtttcttatggaatgaatcattgctttcttatatttttcatagacatcatcaatttcctttaacgtttgcggagccaggatccgcgaccgtccaagctactgatcgccgtcctgatccattggttgggaaagagattggaaacatcaccacaaaacatgctgcaaa

SEQ ID NO: 197594 - DNA, 510 bp, Homo sapiens
actctagacgatcccccttagcattccttactcatacaagagcggatacattatcataggtatcttacaccgtgtcagcagttattcaaaagccaatctttaaattatgcagcttttctgcctcaactggtcttcatcagctgtttatcaccatatttctattgctaattgcataaatgaagacagatgcaggaaactctggatgtgggatgtcttctttgaaaacgaatgctgctaacgccattttcagaacgtctgctacaaaattccttctataaaatggtagctatcacatatgtgtgtgaatgtatgtgtatatatgtgtgaacacacgcagacacatacacagttggggttgcagctgttcctcacagttgtccgataatctgttaactgaggtagtgtccatacagtttctttgaggcataaaatgattatacactgggcagcaaaactgcagcctatttttctactctgatagtttcatttgtgttacctcttcaagaagaa

SEQ ID NO: 197595 - DNA, 707 bp, Homo sapiens
agggccacgtggctaatgtcagtgagctgtgggagagacagagaccccaggtggggcaggcagatcagcaaatcttggaggacctgctatatggcaggcactggagacatggaggtaaagaacacaatatccatgttctcagggacacactcatatgcccttagcattcacgttcttcacactgacagcttcttaatgcaagcccaccagatactttcataagcactacctctgacttcaggcacttgctgagctgcacacagggcaggccaaaaggaatggaaagtgagccaccaccggggcagcactcactagtgaaagataaataccccagctctctcagccgcttgtagaactctgaggagtgttctgtgcagcttcccagctgcccaccatgaagctctttctcaataagtgaccagcacagcttaattcctgaattaagctgtgtgtgctgtgagactgacacaagacagggttgacaggaagctgtcggaacatttgagtagggaagcagcaagatccactgtacatttaaagaactcccttgagctgttatgtgaagaatggagtacaggaagcaagagtggaaatcaagagaccagtaatgaggtatggacaacaatgtaggcagagaaatggtggtggttttaaccagggagatagctggagagattaggtgtgggcaaatccagagagttgataag

SEQ ID NO: 197596 - DNA, 182 bp, Homo sapiens
atggaactcagcatgtcatttatccgttgtttttcacactttagcatatatcaccatcacccagaaagcttaacacaaataatggaacctgggaattttcatttttagtaacttcaagtaatgctgatgctgctggtctggagagactttaagtcttaatcactgttccagcccacaacact

SEQ ID NO: 197597 - DNA, 563 bp, Homo sapiens
ctgaggtgggaggatcgcttgaggctaggaggtcgaggttgcagtgagctatgattgcaccactgcactccagcctgagtgacagagcaagacccatctcttaaaaatatatataaaaagtaaaactaaagaacttcttgcctaaacctgaattaccgcaatttgctgagtgactttgagaaaaatcagactgtttagttcagtcgggatgaaaagcttgcgattgcttcccacaagaatgggcaatagtgacggctgcaaggtacttttatttgttcatgaaagaacgacaatttttcaaaatgtaattaaacataatagaatgttttaaactactgggcactgaaactggaagaaaaaggaggctttattgaacattcccctttttcagttggttcaaagttcagcactgtggttatcattggtgatgccagaaaacattagtagacttagacaattgctatggcagtttctaaacagagctttttctatacactatttgcaactggagtgcaatattgtatattctgtgttaaagaaataaagtatttttatcatttatt

SEQ ID NO: 197598 - DNA, 363 bp, Homo sapiens
agaagacatctcagtttccaggaccagttcaggatgtaaaagtggtctccttctgtcacccaggctggagtgcagtggcacaatcacagctcactgcagccttgacctcctgggctcaagagatcctcccacctcagcctctctagtagctgggactacagcaaggtttctctgcccagacatgcaggatttcttcagcaaagcaaaagccctgcagattaccagatccatcctctcctaaagccagagggaccatgagacattagtacctgagcatcacctctctccaagtgatttatcaaagctttatttccaatcacatactgagttttgataaaacagttttattctttggttttcttc

SEQ ID NO: 197599 - DNA, 497 bp, Homo sapiens
cagaccagggtcaggggtcattcccaaccatcttagtgtacatcccaggtctcatatgctgttcttcctgaattaagttatttgaacataaactgacttaatcctaggacttcctcttccccctccagcaagcaccactgaattgtgttgccatggcttgaacctgggcgggcgggggttggccggggggtggggtgcggggagggatttagctttaaatcgtgttacttgctgcctagaaacctagatctctcagagcaatgttgagaagtgtaaaattaaagtgaattaaagttggaagtgtaaaaataaagtgtaaaattaaaaggagagaagaggtcctaaatatggtgggcatggaactcctttaagaatttttctaaggttgtctgttgagaggaagtggctgcgtatggtgtgaaaacaaacatgtcaatgctacagtgatacaaacttgacctttagtaaagatgagcttatttgatagtttcaaatat

SEQ ID NO: 197600 - DNA, 567 bp, Homo sapiens
cctaacccctggatgagtatgcccatctctcaccctctgtgacaatccaggaaacatgaaggtgtttccagatgcagagtcggtgggccaaaggggaaggcaggatgatgggtgtttgggagagtgggagacatgttttatttttccttccctccttctctcccttcttccctcctcctctccttgtctgtctctctttctggtgtggggaaaaagtagaagatgctttggaaactgatatggcttcatcctgagttggctgctcccttgctgtgtggtgttgggcaagtcaccccacgtctctgaacctgtttctgcatcctttaaaaaggaataacagtccctgcctttgaagggaggacccgatgaagtaatatacatgaaatgcttagaatagtgcctggcatgtggttctcttccctgggaaaaaattaccctccaatttgctgatactgtctctctctttctctcttttttttctttttgtcaaaaccccccaaacccttaaccaacacctccacccacccaaccttgcctgcccagagatgttgttggagcggtggaggg

SEQ ID NO: 197601 - DNA, 652 bp, Homo sapiens
aactgtatatgttccacttaacatttctacattagcaatgatgtaactctccaacatttccttataaaaaaggcaaacaagaagtgacaactcatgctccaaatattaaaaaatatatttaaacatatgatcaagaagatatgggccgtgagtggtagctcacatctgtaaccccaggattttgggaggctgaggtgagtggatcacgaggtcaggagatcgagaccatcctggctaacatggtaaaccccgtctctactaaaaatacaaaaaaattagccaaccgtggtggcacacacctgtaatcctagctacttgagaggctgaggtgggaggatcgcttgaacccagaggcagaggtggcagtgagctgaggttgcgccactgcactccagcctgggcaacagagcgagactcggtctcaaaaaaaaaaaaagaagtgaatataggataagttggatgtatatagtgtacataggatgtatataggagtatatagtgatgaataaagcagggaaggggactggcctcacagggcaattttcggacaaggtggccaaggaaggcctctctgaggaggccctgaatagaggagggagtgaggcggtccccagcctaattcatccacagccatccgggagatcacagtcaa

SEQ ID NO: 197602 - DNA, 545 bp, Homo sapiens
ggaaaaaaggaagacagcaatggggacggagaaggaaagaaagacagccactggtttccccgtgttcacacacttgttctctttctctctttctgctgactggtctgaggtttagcatttgtatccgcaaaatgtcttttgagtcctcacagacactggctttgagaaacctgctcttgttgtccccacatgacctcattggtcaaccttagtgctgctaacagcaagacaagcagacactgtgtgcattccaacatgaggcagtacaaagtacatagtatcacctaggaactagtcttgccaaaagcagaggggggcagggggagacagagagacacagagagagaaacagagacagtgacagtgagaaatttaacctaagtctaacccagcctttggatctaactttcagttcatgggaaatacaggggatagaggaacaagttaagtgacaccactagaaagcaacaagacaaatccaaaaaaccacactctgaaagacttttaaaaatgtcaattggccgggcgcggtggctcacgcctgt

SEQ ID NO: 197603 - DNA, 528 bp, Homo sapiens
agctattaatgctgatgtagatactgatagagttattgtataatcagtttttagaaaaagagagttttgagttttattgatacaaccgtagtttgcttttgtgcagatgggctgcttctttatagcatttgtgatttgacatttgccgttagtattatctcttgactctatgcagatggcgttacttgacccatgcaagttcatttctgaacctccagatatgtgtctgatgtcaagcagtgtgagttatttggttagattgtcttctgagggaagactgtgtattttttggaacttatttgcattggaaatgattctatcatcctttgaaaatttggtggagaataattagcttgctttaatacagtgattctcgttttttgttctcaaaactcttttgcacttttaaaaattactcagaacctcataatttttctttatgttattgaactctattgatatttgtcatatttgaaattaaaattgaatttttactatattaatttaataaatgtctattaaatcatt

SEQ ID NO: 197604 - DNA, 424 bp, Homo sapiens
agtaggtgacaaaggaggtctagttaccctgcctgatgagaagagttttaaaatgttgctatcacaggatacacattcagtttgagtcaaacagattattgttctagagtattttcatagaatagaaattcaaaggccaggtgtagtggctcatgcctataatcccagcacattgggaggccagggcaggaggatcccttgagcccaagagtttgagaccagcctgggcaatatagtgagatattgtctctaccaaaattcaaaaaaaattagccaggcgtggtggcgcacacctgtagtcctagctacttgggaggctgaggtgggaggattgcttgatctcaggaagttgaagctgcagtaagctctgatcatgccactgcattccaacctggacaacagagctatactctgtctcaaaaaa

SEQ ID NO: 197605 - DNA, 557 bp, Homo sapiens
actccaaacattaataattttttagcactgtgttacattgtgaaaataaccagaaatggtagagaatgtctgaagggaagtatattcccagaaagggaggatgtcaaccaactctggaggatacccacatcagaaaaggacctcctctaagacacagttcccaagtaaacagagggctatgcagtggggctaacaggcagcttttcacagtcctgccatagcctcagagctgacagttgggagcagatgtaaccgcctgctcaggaacctctgaattcagagggctcttcacatccacaaactgcactacagaatctgagagcactgtcagagctccaaagggtgcatggccctgggctggacacagatgcagcaggtgggaatgaactctgctccctagccaccacctgctcctctggtactcaacagtccttcctatccccaccaggtcatggaaactgcagctacctgggttctagtacacttaggagattggaaacttgataaatggaacagaaatgatcattgagaaactaaaataaatcactatattctaa

SEQ ID NO: 197606 - DNA, 457 bp, Homo sapiens
tcaggcctgccagccctgccactggctttgtgattttcgttcctgaattcatagagatggctgccagcaacgagaggtaatctcaggacacacaggcctgggctaggccttggaatattccggaagtcggtggccagagttgtatcaagccagacgggacacatatgggaatacaattacagcaaagccggcaaggctcagtgaggggcagagggcctggccacatgaggagccagtgctgtgggcaggcccgggtctgagtgctggctgtgtgtcctgcacaaccacatctcccagagtgcattcgtcaccatccactccagatgccccttgaacaaatgaatttcacagttgcaaaaggctgaaaaatgctctgtgacctggcacccccttggggaaccacagtgcattaaaggctctgagaagtcctgcagtaaagaaacctgatgaacttttg

SEQ ID NO: 197607 - DNA, 601 bp, Homo sapiens
aaatgaagaggggtgtcaaagaatcagtggataactgaacatgctttgaactttgagattgaaaaagttttgaattgtagtgttgcttctttttttgaagactcacatattcaagccaaatgttaacatcattattcattcaacaagtatttattgatatatactgtgtagcaaacacatttgtagtgctggagattcaatggtgaacaaaccaggaaaaaaaaaatccttattttagacttacagtttaattgggaacttgaataactgtgtgagaaaatacatccaataaataagtaaactaataacatttaataacattttagaatgaaggaaatgaacaaggagatttgatagagagcagttgggtgggattgaggtaggtggagtcagaggttaccagatactatggttatgtctgtcctagaccagaaatcagaagggctagatattcacccaacttctgccaccaatccagctgactggccttcgaaaagggacatctgtagaccgagctggtcatttagactacataattccaggagctttttacagcccatggtaggcagaatggaccctctaaagcagcagtccccaacct

SEQ ID NO: 197608 - DNA, 525 bp, Homo sapiens
actctacacctttgaaataatggctgtccatttcccctcctagccactagttacttttttctatgttctatctttatgaatttgtctattctagatacctcatggaagtggaaacatagaattttttgtgcttttgtgtcagacttatttcacttagcataatgttttcaaggtccatccatgttgtatatagcatgtgtcagaatttccttaaggctgaatactattccattgtatatcacattttgtttatccattctttcgttgatggacatttggctgttgtgaatactattaatactactctgaacatgggtgtacggatattggttagagtcccagctggattatatgtggttatgcttaattttttgaggaactaccacacttttcacagtagctacaccattttacattcccaccggcaatgtacaagggttctaatttcactacatcccctccaatatttggtatctttcctttcttaaaaaaatagccagcctagtgagtgtgaagtggcatctc

SEQ ID NO: 197609 - DNA, 423 bp, Homo sapiens
agactttgaggccattgtgataaaataaatgtattttacatgggtgaagagcatgaatttggggggccggagggtataatgttgtggtttgaatgtgtcccccaaaaagcatgtgttggaaacttaatcatctgtgcaacactgttgggaggttgggcctaatgaaaagtcattaggcaatgaatgtagaatgaatggattacagccattatcacaagtgtgagtttattatctcagttgtgggttgactatgaaagggggagttcaccttgttttactttctctctctctctcacgctctcgtttccttctaacttccaccatgagatggcacagcaagaaggtcctcattagatgctggcaccttgatcttgaactacccagcctccagaactgtgagaaataaatttgttctttataact

SEQ ID NO: 197610 - DNA, 319 bp, Homo sapiens
attcttatagccttcctggggagatttattttttggagacatcgctcacattgtttactcctctaggttaaatgtactaggccatctgttgttaattttgtagttgtattaaattccatcctttggctggattttaagcaccaaaagcaaacttagacagaagcaggagcatttgcaaattacatagctttgagcctaaatggtggtttttataagtgcagttttcaaatgggctgagattctattttgagttttgggatcagtaatttaaacacagggacctctacgagttctctggaaaagcccattttgagaccct

SEQ ID NO: 197611 - DNA, 301 bp, Homo sapiens
gtgagccactgcagccagccattgtaattgtttttctagatgaacaataccagctgttgggtggtcctccctacccactaaggctcactcactggtggtttgtcccttgtgtgtgctgaccttcgtggtaggaatttattgccagatcctagtcaatctggcttttggagatgcccccttccctgtccttagggaccatgtcttatgtgacctgttctgtagtgggagctgtgatcacccataatgctggaaggaagatggttcccagggatggaaagacttcgttaggacataaactaaa

SEQ ID NO: 197612 - DNA, 277 bp, Homo sapiens
tgaggatcaacaggcaggcaaactgccagttacgatggtcactgtgtgccactgagggctttacaatcttattatcagtgagatccacaccaagagtataaataagagagccaacacaataaagttttagctgttttagaaagttctctccaaaagaaaagtgtggaaaaaactgtaacaaaaggtaggtctgtaagaattcacataaaagatgtttattgcagcattattcacaatagcaaagacttggaaccaacctaaatgtccatcaatgata

SEQ ID NO: 197613 - DNA, 1134 bp, Homo sapiens
  misc_feature (933)..(933): n is a, c, g, or t
  misc_feature (1038)..(1038): n is a, c, g, or t
  misc_feature (1054)..(1054): n is a, c, g, or t
  misc_feature (1081)..(1082): n is a, c, g, or t
tgcttgggcagcgactgtcatggcggcggccgcccccaatgccggaggctcggcccctgagacagcgggttccgccgaagctccgctgcagtacagcctgctcctgcagtacctggtgggtgacaagcgtcagccccggctcctggagcctgggagcctgggcgggatcccaagtccagccaagagtgaggagcagaagatgatcgagaaggcgatggaaagctgcgctttcaaggctgcgctggcctgcgtgggaggatttgtcttaggaggtgcatttggggtgtttaccgctggcatcgataccaacgtgggctttgaccctaaggatccttaccgtacaccgactgcaaaagaagtgctgaaagacatggggcagagaggaatgtcctatgccaaaaatttcgccattgtgggagccatgttttcttgtactgagtgtttgatagaatcttaccggggaacatcagactggaagaacagtgtcatcagtggctgcatcacgggaggagctattggtttcagagctggcttaaaggctggggccattggttgtggaggttttgctgctttctctgctgcgattgattattacctccggtgagagtaattgcctgcagggaaggatgatgccagccccggatccgggctgctctctggaggacagtttctgtaccacaccaggccttgcttcagggcctgaagacattcattttccctcatgtcgttggtattctgagggagctgcctggcttctctgcctccagcctttggggtagccacactttgctgctcctggactccagccagccttcacagaggacgtcccgtgccagattctctcacagcagatcgggagacaggatgttgacatataggaattcagctccacaaagcttcaggcctgaccacagctggccctctaggttgttnggtgttgtgggcacagaggtgacagtgtctctgcaggcactcaggaagctgttctaccttggaactccatgcaactatccgtctcgaataccagggcagggcaangcggactgatgccgtncaaccaattatctcacttgtttgtgtnntgtcatccttgtttttttttaaaaatacactcccctcccccaccgccaaaaa

SEQ ID NO: 197614 - DNA, 1030 bp, Homo sapiens
  misc_feature (829)..(829): n is a, c, g, or t
  misc_feature (934)..(934): n is a, c, g, or t
  misc_feature (950)..(950): n is a, c, g, or t
  misc_feature (977)..(978): n is a, c, g, or t
tgcttgggcagcgactgtcatggcggcggccgcccccaatgccggaggctcggcccctgagacagcgggttccgccgaagctccgctgcagtacagcctgctcctgcagtacctggtgggtgacaagcgtcagccccggctcctggagcctgggagcctgggcgggatcccaagtccagccaagagtgaggagcagaagatgatcgagaaggcgatggaaagctgcgctttcaaggctgcgctggcctgcgtgggaggatttgtcttaggaggtgcatttggggtgtttaccgctggcatcgataccaacgtgggctttgaccctaaggatccttaccgtacaccgactgcaaaagaagtgctgaaagacatggggcagagaggaatgtcctatgccaaaaatttcgccattgtgggagccatgttttcttgtactgagtgtttgatagaatcttaccggggaacatcagactggaagaacagtgtcatcagtggctgcatcacgggaggagctattggtttcagagctggcttaaaggctggggccattggttgtggaggttttgctgctttctctgctgcgattgattattacctccggtgagagtaattgcctgcagggaaggatgatgccagccccggatccgggctgctctctggaggacagtttctgtaccacactttgctgctcctggactccagccagccttcacagaggacgtcccgtgccagattctctcacagcagatcgggagacaggatgttgacatataggaattcagctccacaaagcttcaggcctgaccacagctggccctctaggttgttnggtgttgtgggcacagaggtgacagtgtctctgcaggcactcaggaagctgttctaccttggaactccatgcaactatccgtctcgaataccagggcagggcaangcggactgatgccgtncaaccaattatctcacttgtttgtgtnntgtcatccttgtttttttttaaaaatacactcccctcccccaccgccaaaaa

SEQ ID NO: 197615 - DNA, 576 bp, Homo sapiens
ttgtcacctgtgcttttaatgccatatgcaaaaaatcatgccaaatcaatgcatgaagttttcccctatgtttccttctagaaattttatactttttggtattatagctagttctttaatccagttttagtagatttttgtgtatagtgtaaagttagggtccaacttcgttcttttgcatataaatatctaatttttccaaaatcatttgttgaagaggctgtcctttccccattaagtggtcttggcaccctcaccaaagatcatttgactatatatgtgaagatttatttccaagatttatattctattctatttttctatatctttgggcaatcaagcttaagcttgattgcctgattaaaaaaaaataactattgcccgggcatggtggctcacgccagtaatcccagcactttgggaggcagaggcaggaggattgcttgagcccaggagtttgagacccacctggacaacatggtgagaccctgtctctaaaaaaacaaataaaacaaaagggatctttcttttgaagcatcactgatcaatcatcttgtagttaggttaaattatctt

SEQ ID NO: 197616 - DNA, 300 bp, Homo sapiens
gaaaatcactgatggctgatgatttgggactgggggcagtttctaattgtgagggagctgtgacttcatccagccccagctttcccatccaggcccactctgctcttggaggtgctttctgcatttccagtgtaaatggatgaaaggtagtcttggctgctacccctgtgaacacatgtcatgactgctttgctgtcactgggggctagaagttttcttggctctttcttcaaagctctcttaagccgtgtaccaggtgcttggcctgaggatgccctgtggcgtgaagggacacccaga

SEQ ID NO: 197617 - DNA, 391 bp, Homo sapiens
ggaaacatcctaggcaggcaatcatctgactgcttttttggggcaggtgatgccctgggaaattgggagggagggagagagggaggtaggctattctagaaactgggagagcaggtgaggtaggattgggaggaccaggggtcagggtgcccattggtccctaattgtgaacggagagagcattggtctaggaggcaggcagctcggttataagaccttgggaactcttgatttagaatccaagatcctttttagatctaagattttataaaattaagatatcccctaagatcaaatgcaacgtggagtcctgaattggatcctagaacagaagaaggacatttgtggaaaaactagtgaaatccaaataaagtctgtagttttgttaata

SEQ ID NO: 197618 - DNA, 473 bp, Homo sapiens
gtaaatgttttattaaaacagaatgtggtacactttctttcatctgacaataatagctaagtaaagcttgtaggaactatatgttgcctaggctgctggggaactccaaagtactccacagctcaatcacagcacttattcaatcgtgggtgttggcattttatgatgacttataagttattataattaagagtggaatgattacattatgtgcgtacttgcttccatgttatatttctgctttattaatgctcatcacactttaatccctatgaggtgaggatctttgtagatctgcctgttaatgtggttattatttctccctccccatttccatgagggcagggatgttttctgattaattcttatccaatattggcactgggtctggcacacataaaataataaatacttattgatgaaatgactgcataaacattttggaaatttgtggcaattaatctttttttttt

SEQ ID NO: 197619 - DNA, 620 bp, Homo sapiens
ctccctctatagcttttcctgaatcccataaatatggatggggctattttacttatcctggctatcaagaggaaccccaaatccaggatggaagagcttgatatttccaacgtgctggtgtccgagcagttcatgaaaacgttggacggagtgtatgccgttcacccgcagctggacgtggtattcaaggcagtacaaggcctctctcccaagaaaaccatcttcttgttgacaaaccccatgaaactgatccagagctatgcagaccaacacaaaatcacgatcgtggacttcttcaagagcttgaaccctactgggacaatgaagatgtctgtggatgagttccagaaagcgatgatagagcaaaacaaggtccccctgaaccagtaccaggtcagggaggtgataaagaagctcgatgagaagacaggcatggtgaacttcagtttcttgaacacgatgaagccatagcaacaagtctggtctagaaagaagtctcggcgagaggagtcctcgcaagtcggatggtggcagggaggagagcaagaggtggctgaaatctcgatggacagatgctgtggcaggggctgggcacaagcaaataaagtctggcttggttc

SEQ ID NO: 197620 - DNA, 1345 bp, Homo sapiens
gccaggtctgcagttggagcccattgtgtgaggcagtctgtgaaggaagtgtgagaaccaccctcatgaggaaagctgtagaggaagagtgaggaatgcgacagactccctgaaagcaaaggtggaaaaagaattcacgtggtgaagtcagtgactaatcagtgatgtaactttcctctctggaatgggccctgctcaaagaaaaggtagtgacatgattcaagactgagaacacaggaacattatgacatatcttgaagtaacatctggaagtgtgacgctcgtctcctacctgggtcctgaccgcagaatgaattgtgacatacgacggagtacaaaacctaggtgaaattatgccatatacctgagacagatcaaaggaataataacaactttatacctggagccaggatgtgcagaatggtgactctcattcctgaacatttccaccagtgctattgtgacatacaccttggtccagctcctcagtgatttaataatcctgcctaattatagcctgcatatgacattttgacatatacctggacctagaaccttggtgatttgactctcctgttgtagagggtcctcagaaaaaactataacatatctatgggcccatcatctaggtaatgtgatgttccccatttgtctgaacctcctttcagtgaagagtgtggcatttctaaacactgcatccaaatgacatgactctcttgcctgggccatttcaacaggaggccttgtgacatatctctgagcccatcattttggtgatatgactctcctcacctgcctggacattgtccacaagaggcattatgcgatagagctgggactggcaccaaagttttctgacttttcggttagtgccctgctgacaaagagaacgttgtaatacttctggcttagaatgtaggtgatgtgtttgttctatctcttttataaccaaagacgggatggtgacatataactaggcacagctaataggcatgataatgactctcttatgtggacccagccaatagaagaaatgttgcctcttataactaggtttagggacatgagtgatgtagaatctccttctggtaaaaaggtcacagaagattgcaacactcacacatattttttaacacccttgtgttgaatagagggtgtcacaaagcacctagcacacagaataaattgtgagtattgtatgcacacccagctgacagcaaggaatttcaccatcacaggtggatgaaggcatctgtcctacatgaaaacaggacatgtgtggtattctaaatctaatccccagaattttatttcttcaagactgtgatataaatctttgccagtt

SEQ ID NO: 197621 - DNA, 396 bp, Homo sapiens
cctcttaactgtagctaagatatgagagtatctttctctcaagatggtcactgtaggaggctgattaaaaacactttgacttcgtcagacagaagggagtattgtatcttgcatgtcatcaattaattaaacttttcagcatcatccaagaatagccttaacaatgcgtttattattaaagaggacactcatgtggaatgagatgcatgtgaggctacagtgcattgccaaaccatctatttctggggttaagactatattaaaattccagttttatgactttaagctatgtgcttctcaaacatctgctttaaatttgtcagtactttcgtaatttagcctaataaagttgcatagttcttaattcctagggaaagaatagtgtcagggggagca

SEQ ID NO: 197622 - DNA, 437 bp, Homo sapiens
agtgtgtgaatgtgccgagttctccacgtcagctgagcgacctggcccctctcaggctctgcaaggcttctcgctgaagacctcttttcaagtgttatttcaaatggttttgttttcagttttcaggagcatctttttaatttcctctgccaaatggcattcatccccataggaaaggtaatgttagcatcaggaaatgtagtttggccggtgaaaggttgattgctatggggtattcttcctgagctccgaaagttggttctaatgtgttggggtctactgtgaagggcatggcctctggattctcctgcactctgatttctttctttttcattttactaaaaatgccttttctgtttcactaactcagaaagagcaagaatcttccctgtgacttttcaatttttaaatgactaatggaatgtgtctgtgtaatt

SEQ ID NO: 197623 - DNA, 340 bp, Homo sapiens
ccaacttccctcaagctcaggaaagatttcctcaggtaacagttttcccccacaacaggcaggcagccctcttaagcgtccatttcctgctgctgctcctgctgtagctgctgctgctcctgctcctgctcctgctcctgctgctgctcctgctttagctgctgctgctgtggcggcggcggccggtggggcggcaccaagccattctcagaagccctctgtgcctcttattaaagctagcaggcgccgtccagctgccgggcgccccaccagattcgtaaaaatagccccagccattcaggtccggacaggctccactggcctaaaggccaccaacgtg

SEQ ID NO: 197624 - DNA, 338 bp, Homo sapiens
aaaatgctttgcagcccacactacctagatccccagaccctcagtggattcctgatttcctcctattgatctctgcacgggctgttactgtgaccaggcctcgcatctgttcccttatgaccagatggttagaacctgatgcctcctaactggtcctgtaccaccggaacagagctgaaggttctaagccaggggtgtccaatgttttggcttccctgggccttaagaggaagaagaagaatggtcttgggccacacataaaatacactaacactaacaatagctgatgagcttaaaaaatatcattaaaaaaatctcataatgttttaagaaagttt

SEQ ID NO: 197625 - DNA, 515 bp, Homo sapiens
gagagatgacttaacactaaccactgacagttcactcaacacaccaggtttcctgacagggaacccaaacctaaaagggcctaagtgtaagtgcttaaatttagttaattatcgcacagaggtcaggcctgatttaagggacccctttcaaaacaagacaacagctattcatagatggctcctcccaggtaattgaaggaaaaaaacataatgggtattcagtggtcgatggggaagctgtcgcagaagtcgagtcagaaagactgcccaataatcggtccgctcaaacatgtgaattgtttgcaataaatcaagccttagaacatttacaaaatcaagaaggaactatttatactaattccaagtatgccttcagggtagcccatacctttagaaaaatttggactaaacgaagtctcatcagtagcaagggccaagaccttgtccacagttaattaatcacacaggtactggataaccttcatttgccacctccccccccccccaaaaaaaaa

SEQ ID NO: 197626 - DNA, 381 bp, Homo sapiens
tatcccagagaaatgaaaacttatgttcacacaaaaacctatatacagatgttcacagcaactttattcataatagccaaaaatgtctttcagtgggtgatggttaaacacaaactgtggtacagttataataccacagagtactactcagcaatgaaaaagaacacagtattgatacacccaagaacttggattaatcttgctgactggaaaaaagccaatctcaagtggttatacactatatgactacatttatataccatttttgaaataacaatgttttagaagttggagaacagatgagtggttgtcaggggttacggactggagctgggagattgatgtccacatcctggttgtggtattgtgctatcgttttgt

SEQ ID NO: 197627 - DNA, 473 bp, Homo sapiens
agtctgacccaaaattttaatttataattttagcatctatctaatacagtttgggaagcatctcatgaaagctacaattgccagaagacttgttacagtttaatgcatgttaactaaaatgtgtacatattttagtgttcatgataaatacagtttcgaccttttttgagatggagtctcactctgtcacccaggctagagtgcagttgcacaatctcagctcattgccacccccacctcccaggttcaagtaattcttatgcattagccaaccaagtagctggcattacaggcgcctgccaccatgcccagctaatttttgtatttttagtagagacagggtttcaccatgttggccagtctggtctcgaactcctgacctcaagtgatcctcctgcctcagcctcccaaagtgctggtattacaggcatgagccacagcacctggcctctttttgtttttttctaatcatt

SEQ ID NO: 197628 - DNA, 248 bp, Homo sapiens
tccctttgtgatatagtggttctgtctgtggggacactgccagtggtggccaccacctcctgcatctgaagattactgtttggaagagagctctttttactggatgtctggtgtcatccaagactcagggagactggctatgggtagcagaaatggaaggaatcagagatatctttgcaaaaggagcaactgctacaataattaattgtgaggcctctggcttttcagaggaaccagaagtataagtg

SEQ ID NO: 197629 - DNA, 236 bp, Homo sapiens
atatttgagtaggtttgcgtagacaaatgtttttatttctcttgtgtaaatacctacgggtggaatacctgggtcacatggtaggtgtatgttgagctttataagaaactccaaacttttccgaaggaactgtgccattttggattaccaaaagcaatgtatgggttcccattgttccacttcctcactgacactttttagtatcagccttttaattttagccattctagtggcac

SEQ ID NO: 197630 - DNA, 428 bp, Homo sapiens
atggaataagattacaaatgggatagcacatagaagaagggaatgacattgcaatgcagcaaacacagtattgaggatacatacctctacaaaaatgttgtgtagaaaataacctggtttaaagaaagaaaagaaaagaaaagaagccaggcacggtggttcacacctgtaatcctagcactttgggaggctgaggtgggtggatcacctgaggtcgggagttcaagaccagcctgaccaacatagagaaaccccatctcgactaaaaatagaaaattaaccgggcatggtggtgcatgcctgaaatcccagctacttgggaggctaaggcaggagaatcacttgaacctgggaggtagaggatgcagtgagccaaaatcacgccactgcactccagcctgggcaacaagagcaaaactctatctcca

SEQ ID NO: 197631 - DNA, 213 bp, Homo sapiens
tcctttttagcacttaatatactgtattttagatttttatttatatggtttttagtagcaggctttcaagatggtgcccaatgatccttgcctccttggagtggcccccttatgtactcccttcctactttgttccaggattgatttgtgtgatagaacatggtagaaatttgatatgtcccttctgagattcggttttaaaagtctgccagt

SEQ ID NO: 197632 - DNA, 200 bp, Homo sapiens
gaggagagagagggggatgcccgatggggggcagctctgagttcagggaggggactagatgcagaaagcagcaagggtgtcagccctggtcactagaatggccgggaaggggtcagaagaagggcagggatgagggcagttggttggctgtggggacagttatgaggactcggaggagaggactgccccaggtgctccac

SEQ ID NO: 197633 - DNA, 443 bp, Homo sapiens
tattttgagatagtctcgctctgtcattcaggccggagtgcagtgatgaaatcatggttcactcactcgcagccgtgacctcccaggctcaagtgatcctccgagctcagcctcccaagtagctgggaccacaggggcatgccacgccagctaatttttaagttttttttgtagagacaggggtctcaccatgttgctgaggttggtcttgaactcctgggctcaagcaatcctcttgcctcagcttcccaaagtgctgggattacagacataagccattacgcctggcaaacaatttttttgagacaaggccttgctttgttgcccaggaggagtacagtggctattcacaggtatgatcctagtgcactgtagcctcaaacgcctgggctcaattgaccctctcgcctcagtctttctagtagctagtattgtaggtgcac

SEQ ID NO: 197634 - DNA, 610 bp, Homo sapiens
  misc_feature (495)..(495): n is a, c, g, or t
agaatgagaggatggacttacgtgaaagaaatcagcagtcgtagtcacttgagttgtcatcatccatcaggtccaatctagcagggagggaatagcttgagagacttgagactgaggcacagatctctgtagaacatgggatttatcctggcaaatacagtgatcaaatttaggagattggctttgatataataccattatttaccatataatctatcttcacatttcaccagttgtctcaaaaatgtcctttataagatccacaccaacaccacatattttatttagttatatatttttagtcttatttaatttgagataattcagcctgtcttttttttttctgagatactgccttgctctgtcacccaggctaaagtacagtggtatggtcatagctcactgcagccttgacctccagggatcaactgatccacctgcctcagcctcctgagtggctgagaccacagacacattccaccacgcctggctttncttttcttttcttttctttttttttagacagagtcttgccctgttacccagtctggagtgtggtagcgcgatctcagatcactgaaggctccccttcccgggttcaagcattctc

SEQ ID NO: 197635 - DNA, 606 bp, Homo sapiens
aagatttgatcccttcctaggtcttctgcatcctattttaatatgctaccacttactttagaaattctcatatctggattttatgatgattggtctggtgctccacagacctcaccagaaactttaacgctacgtgccttgggctttcttgctggaaaatatcctgtgtagaacactctgtctgcctctaggtaagtgtcattttcggggagggaatctccctgaggacttctgccatttcagatgagaaagcccagaattattcttacagcataagatgccacatagtggttatgatatgaatataagaaatgacttagaggagatgcggggggggtgctgctgcaaatatacattcaattgcttgagtaaaaatcaaggcaagaaaggtgggcttaaattatagaaaggaaaatgtggggtggatttctgaaaaatgtgagtggcttgtaggatttcgccgtgggaagtttttaatcagaaaaattgaatacttgatgaacatctcttacctggtcaattgcaactatcttccaaatagactttttgtcattagcattcaccatgactgcctcttccccacctcacacacacacaacagatatg

SEQ ID NO: 197636 - DNA, 711 bp, Homo sapiens
gggaaatgtgaattcacctggacttttgaaatatgctattttgaagacatcaaaaccccctggaagtttgccgacaaagcattcagatggaggcagacggcgatatacagcaaacctagttcccactatgaaaaatcctatttaactgaagaaaaggcaaacgattccaatgttttggaaagatattaagtgtttctcaaatttgagaagggctctttgtgctccacctttgagccaggtgccctttaccttataacacgacaccactgatgaaattgtgcagtaaagatggaaaacacaacaccactgatgaaatcccctgtgcagtaaagatggaaaaatccagtgcccgaccagtgaatgctgctccacccgacaagacagcagcaaaagcgcgtggctactctttctgccttttccctcccatgctcgcccaacatgcatcaccgcacagaccttcaacgacagtaaattattcatccggcatctgacgtctctctcccaaagagacacatattcagaacttcagacattccatctctgataaatcattcatatccttttatccgccacttttaaatgattataaaaatacctggtggtagtaaactgtggctctcatacatattgagaaacagaaatgcagttaccttttaccaaaattccctgaattatttagaaaaatgggagttactccaggaaactataatc

SEQ ID NO: 197637 - DNA, 382 bp, Homo sapiens
gaaaactggagtgagttggggagttatttgggtttatctttcaagatcatgaatattacaaaatgactttatagtatttagttgggacaaaaagtatttaaaataaatatcaaaggcctagcatgaaaataataggtaaatttaggctttgggctaactacatctaaattttgtcataatgtgttcctgatattttacatttttcactataaaaactatagcctttcatacctcaaaattataagctataggccaggcgcggtagctcatgcctgtaatcccagcactttgggaggccgaggcaggctgatcacctgaggtcaggagttcaagaccagcctagccaacatgatgaaaccccatttctactaaaaatacaaaa

SEQ ID NO: 197638 - DNA, 295 bp, Homo sapiens
ctgagagatggtggctgctcgcaccatggcctggatctgctgcagggtccttttctgtgtgggccctacttgaagctggcctcctcctatgtcacctagagtgtgggccaaagcaacatacctagatgtggaaagtggtgttgtcagaactggaagaggctcatcaggcagtgtgcttccttctttctggtgaggatgcaagatgaaacagtttgtctgttaccttggaggggacacacctgcattcccctaaacacttggccattgttcacccataaaactttacttcaatgcc

SEQ ID NO: 197639 - DNA, 577 bp, Homo sapiens
gaaagatgaaggaatttcataacatgaaataatgattacagttctggtcaaacttgtcaattcagatttcaccaattgagaattagtaagtaatttctctgatacaggcctgaagtttaccttagtaaacactttacttccatatggtaaaaattagattttgggaggaatgcttacctcctaaatatattcaatctaatatttgagggacacatgggaatatatttatgattcatctgctttttaaacataagcctttgttaactgtaagttcttgaactttataaggctgctgttatttaaatgagcacagctcctgatctgcaaacagcagagcgcagggctacagcttgggggatgccagccgactcagggtggtcctatggactgaacaatctcttgctgctgtactggagggcctgggagcttttccatcagcctcggcctgaggtgtgcactcttctcctgcccaccccaggaataaatgagattcctggttaaaaaggaccagagcagtcattttacagttgaggaaactgttgctctgagaagtgagggatttattcatgactacact

SEQ ID NO: 197640 - DNA, 360 bp, Homo sapiens
ggaattccccaagttctggacccaccacaggaactttttatttcttgggctcatctgtctattctaattgtgcttaacatatcacagattcagttttgttatgagattctcaatggggcagccccctgctcagtcctgaaatggctggcattccactatgaggacaaaccacgatcctctggccactggagtgacaagctggcttcccaccactccgtgctcccatgctcacacttgcctcccagcctgttactcgaaccttccgaattctgtactgtgagactcttcctccaaagctctcatggctaattcgttaaccatcttcaagtgcaagtttttcgtcgacgcggccgcgaattt

SEQ ID NO: 197641 - DNA, 532 bp, Homo sapiens
ggtcgactactactactaaattcgcggccgcgtcgaccccgtcctgtggtctgcctcagtttccctctatgacttggctatctgatggatgcaaaacaggcacagagctactgctgtggtttgaacagttgtcccctccaagtgtcatggtgaaatttaatctccaatatgggcgtattgagaggtggggcctctaggaggtgactgggtcatgatggctctgctctcatgaatggattaatccattaacaggttatcgcaggagtgggactggtgactaaagaggaaatgagacctaagctagcctccttgccatgtgatactctgcaccaccttgagactctgcagagagtacccaccaacaaggaagctctcaccagatgcgcccccttgaccttggacttctccacctccagaacagtacaaaataaatttcatttctcataaattactcagtttcagaaatcctgtttaagcaacagaaaatggactaagctactgccctgctgatcagccagccacctgtacatgt

SEQ ID NO: 197642 - DNA, 376 bp, Homo sapiens
tcatttgttgctatcaaatgtactatatcgcagaaaattaaaatatccagtgttggtaagagtatatggccatgaggctgggtgcggtggctcacacctgtaatcccagcactttgggagactgaggcaggcggatcaactgaggtcaggagtttgagaccagcctgaccaacatggcaaaacctcatctctgctaaaattacacacacacacactaaatagctgggcgtggtggcacatgcctgtagtcccagctactcaaaaagctgaggcaggagaattgcttgaacctgggaggcagagattgcagtgcaccgagattgcgccactgcactccagcctgaacgagagagcgagactctgtctcaaaaaaaaa

SEQ ID NO: 197643 - DNA, 288 bp, Homo sapiens
ttggtcttcctgcagggcaaagccaacttctcggagcagaattccgattaagaagtgtttgcgacaaaattcatttgtgactgaatattcaggcatatctttgtgaggaaggaaaataactcatgttattgaaaatcagatgatcactttataattgagacagatataccaaacaactaccatcaacttcttccaccactaggagggattcaggaatacagtcttgctacagaaatgaggtgtgttgtatcctcaaggagcattcagtaaggggactattctgtgtag

SEQ ID NO: 197644 - DNA, 121 bp, Homo sapiens
tcaaatttttattactttaaatcagggtttccccaccgtggcaagcctgacatatcagctgggacccttctttgtggcggggtggtcctgtggattgtagaatattcagcggcatccctag

SEQ ID NO: 197645 - DNA, 259 bp, Homo sapiens
cttaaaggaagtgattcccaataagaggagggccatcttgttaaacttccttcttgaacttttatctgcctccttttttcttgatcttcattgtaccttttacttaaaatcacatttgattggtgactctttttcagaactgatgtgtatcattggtaccaattgtgacaatagataccttgctccaagttggggcacaccctagtctctctttcccttaacgttaatttatttttctgttctccatagccttttccat

SEQ ID NO: 197646 - DNA, 389 bp, Homo sapiens
tagaagttaaagtgtgggttctgatttcagactgcctgggtttgttgggttactatgagaattaaatgaattcatacattgtaagtatttaaagtagtgtcttccatacagtgacactaattatatttaagttgttattcgtattattattattgttaatctagtacagtgctttgatacttcattcaaaatcattgccagatgtaacagaagatggctgaataaggaatcaggcaattctaccatagcgttttctcacagacactctagcaatttttaaaactaaatgggattatcccagtatactagtctaataagtctaccaaaaaccaagaaaccaaaaattgttcttatcaaactgtatgctgtctcttcttttaaaaacacag

SEQ ID NO: 197647 - DNA, 273 bp, Homo sapiens
ccctttctagttggctggatgtatttccatgtctgtggcctctgcttataagcttttgatttgcaaaagtgtcaagtctgaagatgaagcttagccatgtgaaataaggcacttaacaattcctcattgaaaaatcacagaaatgtttttttcaaagatacattttaccctcttatctatatttatttcctcagaaaacaaaaaagaaagaaataggctgagtgtggtggctcacgcctgtaatcccagcactttgggaggttgaagcgggca

SEQ ID NO: 197648 - DNA, 167 bp, Homo sapiens
caagtttagtttacatttgtttcctaaaattaatctgaggtgcctttctcaacttctctttatcatcatccatcttctcatgtcacacactcgaagtaactggtttaacacgttgttttgtctcaggaagccaaaaggacaactcaaaatttaattgaggcaccacg

SEQ ID NO: 197649 - DNA, 664 bp, Homo sapiens
ctggaggggctgcaggtgccttggagtctagacagcgggtgtcatccatggggtgaagtccctggagcgggaacttaaacatgaaggtggaatgtgaacagacaatgaagagagagggtatgccacgtggaggtgcaggttttgtgaggaaggaattttctttgctaggaaagtggtgggggtggataggctgagctgcaggtatggagaacagccaagacaaacctattactagaagaggggttgatgctggttgaggaagttccagaatgtctggggggaatttgatcttattcttcttggacttcagcgagctgatctgtaagggccttcccagggaacagggatggggtatttgacgactgtactaggctgaaggacagaactggctttcctgtggaccgggtgtcaagcacggcagtaggccaggggctttcaggctgccccattaaatcctacctcatccatacatgggacctgttcctttctgagtacctggacacccaggtcatgaacatgataggcctctctgataatagatgtgtcttaaaagagccttcaatgctaaagatcagactttgctggggagaaaatggagcacgtggaaggtgtaaggagtggtttggaaagaaaatgtggggcttcctgaggctcttcaaattga

SEQ ID NO: 197650 - DNA, 482 bp, Homo sapiens
tgcaacacaaattccttgggatcatagtggggattatatgaaaaaaaagattttcttgttcactaagtttggggagctctgggtttatcgactacagtatttctaagaaagaaatatcatttgcagtattctcctgaatggtttggtcacagagttccctctcaccccaacccctccgatttcaacatttttttaaaaagggatttcttagctgagggcagtggctcacttctcttatcctagcattttgagaggctgaggtaggaggatcgcttgaggccaggaattcgaggccagcctgggttacatagtgagaccctgtctgtacagaaaaaatgaaatgattagcccggcgtggtggcatgcacctatagtcccagctactctggaggctgaggagggaggattacttgagcccaggggtttgaggctgcagtgagctatgactgggtcactgcactctagcctgggtgaaagagcga

SEQ ID NO: 197651 - DNA, 351 bp, Homo sapiens
ggttcctacagcgtctgctagcagccacattctctctaggactcagatcaagttcttgaatctgaactgaaggtaaacgtgcaaggcatgagccctgttgtcctcctcaatccaggctcttttcgtcagcaccaatgcaaaaatctctcctccctccccttccagtcaatagcgctctgcccctctattgtcacacgtgctcagacatgtctgaacaccaagttaaactcagtctgcaaacacacacacacacacacacacgtacttctatgcctaaggtaaaaagaaagagccaaaggaaaggattgtagaatgttttgctcagaaagtcaagaggaaggcgatccatgc

SEQ ID NO: 197652 - DNA, 580 bp, Homo sapiens
tatcatgtagccagtgtgagttttagagactaacagcaaaaggaagttggttgggaagagggcaaggatagacgttggaagctattgtagtgataagttgagaaattgcgagggcctcaaagaaatggagaagggggcccgatttataagatattaataaggcaaatacccagaaggtataatggcagattaaatgtcgatacacttaggcatagctggaaatgtacagagagcaggtgaatatcccattgtcaggagagcaagctgatttgctggcagaggattgaaagtcagccacctgtgggaatagtggaagccttaggtgaggtaaggtccgctcccagagagtgctggggtaggggcccaggggaactagagagagccttggggagacactgaccttaaggggaagtggaagaatgattgatgctacagaatgtaaggaggggtccaagaagtagaaggagagaagcaacggagaatgagtgctcattcatatctaatgccatacagcagtgctgtccagtaggaataaaatacatgctgcatagataatggtaaactttccaggtgctgcttt

SEQ ID NO: 197653 - DNA, 151 bp, Homo sapiens
tctagaggatcctcggattggcgacatttcaagtttggcaaaaacaatgctacatattgcttaggaatagatatacacgtggcaaccacatgaaaaaaaaaggcatgggaatgacaaacacttttttttttttttttgagacagagtctca

SEQ ID NO: 197654 - DNA, 312 bp, Homo sapiens
tacttttccacgcgtcaaagtaacaggttcacaggattaaggcatggacgtttttaaggggccatttttctgcctaccacaaatgtatatctttaactgcatgtcattacaatgattttttcataaaagataaatgaggtccttataactacagagtcttctattcttccactcttcctctgccctctcccactttcttatatgttactgaaagtgagtttcttacatcaagtgtaaatccattgcacagttaattctaaggcctttagtgtccctaattcctcttctttcggaggttactatagaccgcgt

SEQ ID NO: 197655 - DNA, 432 bp, Homo sapiens
agcagcttccccggacctgggctatcgtgagctcacattcttcctccacccactgaagattgctccctgttggttttgctgggtaaacgcaaatcccattatcagccttctcctccccggctgctgctggagcccccggtacagagttacctgcttagcaagctcctgataagtccttggaggccccatctcgtgagactttggggcgaatcttccctccccttctcattttacacttgttgcaaggtgagggttagagataccggctggggtgttattctttcctattactggtttcccagataagataggcaaaccttcaggacttagaagcactcgatctcaaggctccgtggagaagagaagccacccagtgcccctttatctatatcccctgaccccaagtgtggtcagcatgggctattacaggat

SEQ ID NO: 197656 - DNA, 1949 bp, Homo sapiens
gtctcagagtaaatagcagcgcagggcgatctcaatgtaaattgcgcttgtcagaaacacacccccctccctcactttctctcctcctccccacaccatcccagtctgtaggtagctaagcgggggggggagaaagaaagcaaaagaggaggggggaggggctctccaaccaatggcgtgcaggaggcttggctaaccttagcctcccattttctctccccccgattcagggctctgaccagtcagtcgcctttgattatcagttgccagcagcccttcttttggctccttgacacgagctccatataaggcagcgatctccatagaaacgtgtcagtttcaatagtagtgtcaaagttcactatatacagacattcgcgcagatccccctttcggaaacattgctctgcgagtcctcccgtttaaacgcattcaatttttgggtctctctctctctctctctctctcttcttctcttctctctctctctctctctcctctctctctctcctctttctcccccctctctccctcctctcctctctctctcctctcttctctgaacctctcttctctttctcttttcttacatattctactagttgttttccccttcttcttctcctttctctcctttttctccctcctccttgtctcttttactccattcctgcagaagagagagggctaaacttaaagaaaaaaaaaaggaggaggaggaggaggaggcacccccttcgtattcttcttatcgttattttatacatatatgattttttttggagggagggtgttggttgccggctgaagagcacttatttaaaatactaaaaaaagaacatttttgggcgatctccagggtttttttaactagctctgtgtgttatagcagaagaagcagaagaaggagcaagaaagaggaaaagaagaggattatttattcgacctactttggatgtctctctcgcttttcctttttcctttttttggcaattattttcttctgatttttattttttctatttcgctgtgatttcgtcgccggcgtgaattatcccgtatttttctcccccttccgtcacctcccgaaagaagaaggcagcgagagcccggcgccaccggcacaacaaaaagagcaaagtgtgtgatcttcctcgccggctgcctcccgctctccagcgctgccttcctgaatggctggctgcgtccggccctggacctggccccccgacacccgcgcgccctgatcgccggcggcagcctcgcccagcgccctgctcggctcaccgcgctccccgcactcccgagcccggcgagggctcccgccgggacagcggcggcgccgcgggcggccccggcctccgctcgcgctccggctgcggccccgactcctgctcggactccggcccgggtcccggctcctccagcggcgctcgccgcagcagctccggcggcagctccagcggcgcctgcagccgcgacctcctcctcctccgccgccgccgccgcctccgccctcgccggcttcctctatgtcggctcagcccgcgcgctgcgcgtagcccgagcggccggcgggcgggcgcccggcgcgggtgagcgactgtgtgtgcgagtgtgtgtgtgcgcgggggtgcgggcgaggcggagggcgagtgtgtgcgcgcgccgtggcccatgcccgccgcccccggcgctgcgccccgcgccgctcccggctgccgcctgtgccatttctgattttgcaacttggggaagaagaaaaaagcgagagaagggagcttgctcgccggggggtggggaggggggaaggagagcgcggcccccccaggaacggagcgcggggggagcgggcgaggggagcaggggtgttggggggggagcctgagagcctgggggggctgcaaaaagagagaaagaaaacagcaggaaccacaacaaaacgccag

SEQ ID NO: 197657 - DNA, 174 bp, Homo sapiens
aaattttaatcatgctgaagaattataaaaggatagaatacacctactgaaacagaaatgaccactttaaaaatagaaattttcctgcttcaaaatatggaagatatattctaaaagcaatcatcatttaatacatatagtactattattaaatcagagaagggtgtacttttg

SEQ ID NO: 197658 - DNA, 533 bp, Homo sapiens
gggcctatggtgattccatgtgtgctaaatgtgttagtgacaggatcaagcatgctttccttatcaaggagcagaaaatcattgtgaaagtgttgaaagcacaagcagggagtcagaaagctaaataaaagatgaagcttttttgagtaataaaaattaaaagactttttaaaaaaattagaaggcaggaacccagatgggaagtgtcttcctaatgctcttggccttggagggtcctttctgtgtgttcaattgacaaaatctaaaaatgcgctagcttggcaaagagaaatgtttatagggtctagctctagtatcagaaaggaaagcagaggaagggtggatttggaactgatagacaataaattgataattggcacttaaagagtagtgtaggccaggcgcagtggctcacgcctgtcatccccgcttcccaagctcctactcgccaaattatctttaagaactctgatcctcaaatgctcagggagactaatttgtgtaataataaaactctggtctcccccaaaaaa

SEQ ID NO: 197659 - DNA, 405 bp, Homo sapiens
tggtacaataatatttgttgaactaacacaagaattatctctattttgaagatgcccacatttccagagcatccctttttacaattgctagagatttttcttaagggtggaaattatttcaagcaatgaatttaaatacagcttcaagattcacctttggatgctatctagtataatcaatccacctaaaatcaagccatccttcctcttgacttaaggtacagaatcacctccaaattcattcatttaaaacaaattccaataataattataattgtatgttgacaatgaatgacaatttaattaccaatagaagatttcataagcatagaccagggtttctcaaattggggtgataaccctggggatttgtgaatatattctaatggatccccaagttctaca

SEQ ID NO: 197660 - DNA, 581 bp, Homo sapiens
gcaatctctaagtatcctgagagctcccagatctgcacttctctgataggccaagctgggtctggctacagacgttcaggacacctggctagtgctggggtgaaggagggtcagtgctgctgctgcctcagggccctgttcttggggaaggggtcacagctggagccacagaccctctatgtcatggttgagccactctggagagaacatcttctggttttgggggtggagatgggggagtgtgtgtgatttcatctttcctaaaaatgggaaagaaatcacatgacaggaaaggatggtctaacttcaagggcttgcccaccaataccaggaagactctgactgcctcctactaagcccaccttcccctatctcagcattgctaagcacccctctgcattcatggactgatggcagatggggcaccgtagaatcactggtacctacatagctgtcactttgtcggcattcttatgccatttttttcttccaccccacccctcttatgcaatttttatccattcgtttattaatccactcgatacatgagaagtatccactgtctatttctcgatacatga

SEQ ID NO: 197661 - DNA, 423 bp, Homo sapiens
ctggttgaagaggaaagaacaagacagagcttttattttttttagatgggattccctttccttgttactttctccattttcattcatgggaaatggtatgcctcgtcgaagaaaatgctctaaatataagagaagaaagtagaataaaatgagtcactgggagatcagggatttctgtctgggaatatttatctttttaaggctgtcagagtgcatgtttctgcttgttgttagaatcctgatcattggtcacatggcttctgttttattaatagtgggctgtacttttctggaggatagattggcttctaatagctgcttaaatccatgtggaaactaagcaaagcagggaagaaggagcagcagtctgtagttacaggcttccgtgggtagcagagtgattgaatagaacagcgctgccat

SEQ ID NO: 197662 - DNA, 519 bp, Homo sapiens
gcaggctctctttgtctctatttcttatctgtctcctaaactgtatgtctctgtagcaccacatccagctgttaagtttcattaattgctggctgatgactccattttttaaaaataatgtgctggtgcataaattgcttcacactctgatccaattaaatttgggtgtcttggcagggccaggctttgagggtttctctgaccacagaaggactcatcttagagttatctcttcacctgctttgtctggtaatacagctggcttatagttttgcttgttgctctcatggagctaccagcctctccttaattgcttattaccaaaatctccatggtccttgagagttcctttaggattgaacttacccgcactttgttccaaataaattcaatttcttcgggggaagtttctgcatcttatgttattttgacttgcctcttcatctggcaaaatctctgaaccactgctctggagatgacagcaggcaaaatcacccacttctcttggaataccatgtt

SEQ ID NO: 197663 - DNA, 193 bp, Homo sapiens
gatgaaaaattctaatgtatatagagtcccagaaggagaggaaatgacagaagcaacacttgaatactgaattacagaccgacaattttccaggactgataaaagacatcaaattacaaatctgaaatctttacatacccaataatatatgtaagagagaaaaaaatcagcattattgtaatcaaagtacaga

SEQ ID NO: 197664 - DNA, 497 bp, Homo sapiens
tatattaaaatatccttaagttcagaaattatttactcagctctagcctactaataagcccaacaaaggtattcttcatctctgttaccgggtttttaatctctggcatttattttggttctctcttagagtttccacttttctgtttacattgcttacctattcttgcatgctgtctttttttaaaaaattttttttatctcttacagtccttagtctgttaatcatagttgttttaaattcccagtctgataattccaacatccctgtcacagctgagtctggttctgacgcttgctctgtctcttcatactgtgtgttttgctttttagtatgccttgtaattttttcttgatagctggacatgatgtcctgggtaaaaggaaccacaaaaaatagtaatgtggtggtaaggtgtgtgtgtgtggtaagcattctctagtcctttggttagatctcagtctctgagtgagcctgtgaccccagattgtgaactt

SEQ ID NO: 197665 - DNA, 824 bp, Homo sapiens
cagcctatcatgagggacacatttctaataattacttctttttctccaaactgtggagcatatacacagacatattagaattttagaaatcccatacaattttggaacatatattaatatcattcactaaaatataacctgaagataattaaatattattttttattttgacagtacttcccatgtaactaaacatgtcaaataatcctatttacctctcttttcaatgcttcaggggccctctgtagcactgcaaagttagagatcagaaaagtctattttaaagctgaaatttgattgtgggaagcctattaaatatgttaaagatttacaagaatttacattcccatgacttcttataatcttttaccaatcattcaactggtttgctcagagagagaggggccagaagtccgactggtaagaattcttaccctattgccggcatgtcaggtttctgggttcctgtcccttagcagcccttgcaactctgctcaactgtatgcaaacaaacacattgccatgaattaagaatattcacaaatagtttacaaattttggagaaattaggtagagagagaaatatgactcaaattctttttatgaaagtatactcaacacatgtaaagtatcaggaatcctaatttccaaaaatttagcttaaggttagaaagttgatgtgctccatcaatttctgcaggcctgacaaaagtagtctaggaattcaagataaatgaaacaaatagtgacttgctagatatgcataggaaacaaaatggctattaatagaactaaataaaagccttccactggaaactaaaaaa

SEQ ID NO: 197666 - DNA, 406 bp, Homo sapiens
gactaggcttaagtgccagcgaagtatccaaattcctgatcctttccccagctgttactttgttaacccctgccttcctgcagaacactgacttggccttttcctgctgagggtctgagacagccgtgctataattaatgaacgaatgtctccccagccagactgtaagctcaccaaggacctctccccaccctcactggtctcatttacacattataactgcacctgggacagagtagacattcaataaaatatgctagatggcctgagatggataaattacctctctatcctaaaactccacatatgcacagaatttcagggtgttcacagttcccttagtattcatgaatgctgggtaagaaccactgtccttaaaagaccttgggggttatctctgagggga

SEQ ID NO: 197667 - DNA, 323 bp, Homo sapiens
cttcccacctcccccacagtgagggcactggtatgttggagtgaagagccacgcaagacctctgtgaatgggcagagatgggccagtgacgcaacacagtaaagtgtattttggttataggcatcgtctctaaacttatgtaaacattattaaaaaatggaaggacaacgatgaaatgatggccaaaaatatagaaaaggataccttgcatgtcctgtgaaatgcaaaggaattctaaagtgtcattatgagttacctcatggaagaaagcaaaaggtgaatctatctagagtttgtggttctgactcactgtgggggatgtt

SEQ ID NO: 197668 - DNA, 113 bp, Homo sapiens
cttaagatgtcagaaaaatttaaaacagttctttcaaataaggtctattacaatgttgatgataaagttgtctggaaaggaacattactctaggaaaattaaaatactaaaaa

SEQ ID NO: 197669 - DNA, 504 bp, Homo sapiens
attgggtctcactatgtttcctagggtggtctcaaactcctgggctcaagccatccacctgccttggcctcccaagctgctagatttgtccatttctgatacagttgttaaaatctccaactgcgatagtagattaatctgtttctctttgtagttctgtcagtttttgtttgatgtattttgatgcttagctgtagatttttttgtagtgttccacactttgtcttttatcatttgtatttatttatttttattttttgtagatatgggggtctcactatgttgcctaggctggtctcgaacccctgaccttaagtgatcctcctgcctcagcctctcaaagtactgggattacaggcatgagccaaccatttcccagtcattttaattgagcattttatattaatcaatttttctctttctactttattacacttctctttttacattctttagtggttgccctatagttttcatttacatttataactaatccaagtctgc

SEQ ID NO: 197670 - DNA, 459 bp, Homo sapiens
cagagtctcactgtgttgcccaggctgaagtgcagtggcatgatttcggcttactgcaacctctgcctcctgggttcaagtgattttcatgcttcagcctcctgagtagctggaactataggtgcctgccaccatgcctggctaattttggtatttttagtagagacagggtttcactatattggccaggttggtcttgaactcctgacctcaagtgatctgcctacctctgcctcccaaaggttcccaagcaagttactcctttatctttttcagctcccccaactaactgtgagctcatggggcagttttttttttcttttaagggatgggacccaggctggggtgcagtgagtattcacaggtgtgatcatatgtgctgcagccttgaactcctgggctcaacgatcttcctccctcagcctcccagggcaacatagtgagacctcatctctatta

SEQ ID NO: 197671 - DNA, 446 bp, Homo sapiens
agcatttgcgggtggagtggttacttgagagcacaccattcgttacaaggggtctttatatgtaaagcagaaacatttttgttttgcttttcagttggagtgagcacgaggaattgattcttttttttctccaaagttaaaagagcaaacccagagactaccaaaatgttaggtttgtttatcatttccaagttgaaataaagcgtaatgtgaatactcagcactctatctttccctgattaaagtgatcctgccctttgaattgctacacaggatactgttctgtacagctcactcacacggctgtaataagtcacaacagtttggcacctcgcccaacaaaatacaaactctcctgaagtcttgagctttcccatggcaacatcacagtcaccaacacagcaaacaatcactccaatccctgctcccgctttccttttctaaca

SEQ ID NO: 197672 - DNA, 1250 bp, Homo sapiens
gtgaaagccaacatcctcttcatgggatataaaagactgcacaatctgactggtttttttttgttgttgttttgggggacacacaaatatgcataattttgagaaactctatgttaaacagttttttaaattctctttttgcatcaagtctgaaatgtgtgagtagtgatttctgttccattggtttttttgttgttgtttatttttctgtatattccattctgtttttactactatagctttgaaatatagttacatatgtaaggcatatgcagtgccaatataccttttcaggatttggctattttggattggctttttctttttatttggcaggacagatttgctgctggtattattctcacttgacagctattttcttcaggacttggacaatgtcacacagttagttcccttctggcctgcaaattttcttgagaaattcactcattacctcataagactatgcttataaataacatatcacttttatcttgcaactcacaatattctcttgtctgtgacttttaaaattgtgcttatatatgttcttgttgtaaatatctttgtgtgtattctagtttctttgttaacctttttaatttttacatcagtttttcttataatttttcagttccttttttatattttttacctccacaatatctgttttttgatatttttaatatttttgttatcccaatttttatgatttttaatagttgtctgtgtttctatttcattcatggagtattattcaatttatgttaactttttaaaattaattttttaatggttgctttctgaaaattttataatatctgatagagctatgttgccctaaaattttgtatgcattgtaatctttaattgaaatttgaacattaaaaacaagctacctgtcacagtgtctataatgtagctttgtcctggcaaagtctgaaaccatttgtcttagctagagatcctgagagtctttcaaacatgttcttaggatgtgtcttgtctgaaatgttctagttgttttttagttaaaagactttattcatgtttcttcttaatagtcatcacttgccacaactgttccctgtctgtagtacagtctctttcctgctgtaacatttacctttgatctcagcagactcaaaatgtcattccaaagtataccactgttaatttcagcactttatgtcattggagacagaaaccagtgtccgccaaagcacctaataaagccagaaataaagatg

SEQ ID NO: 197673 - DNA, 419 bp, Homo sapiens
aaatatttgttgaataaatggattaacatttttaaaaggtcaattatgcaagcaattcctttttgaaagtttgtaatttagaaagtttcaactatgttgaaatatgtgcgtgtgtgcaatagctttaaaaagcaataggcggggcgcagtggctcacgcctgtaatcccagcactttaggaggtggaggcgggtggatcacgaggtcaggagatcgagaccatcctggccaacacggtgaaaccccgtctctactaaaaatacaaaaaaattagccgggcgtggtggcaggcgcctgtagtcccagctgctcaggtggctgaggcaggagaatggcatgaacctgggaggcggagcttgcagtgagccgagatcgcaccactgcactccagcctgggcaacagagcgagactccatctc

SEQ ID NO: 197674 - DNA, 478 bp, Homo sapiens
aaatttaagggatatgtgttatatcataaaagaattgtatcacaaagcattaagacaatgcacagaaaactttgccaatagctgatagagcagaagggattgtataattaaataagaactaacacctattttgtaactggaaattgcattgtcagagtccctttccttttatcactagatgctaagaatctagccatgtaaaaactcccaaaacatccaaattcaaaaaaactggaatctaacgtggtaatgcagttgtcaagaacacgcaatagtctttgggcttttacaaagcactgaaaactaaatgttgcatttgtgcccttatcttccacaacttctttcttggcagcttttcttggctcacttcagacacacagaatttcaagtaatcagggaaagttgggacagaaacttcctctgtctttccatggccttttctttttcctttacggatctgtgatcctatgctttctct

SEQ ID NO: 197675 - DNA, 251 bp, Homo sapiens
gctttcatgtgaaggatagattgggaagaaagagcatggcatgacccgtgaggaagctattgcaatagttcaatcctgaggaaagtgaggatgggaactaagtagcaggtgtggagagagagaggaccatgtgggcaggagaggcagcgtgcaggtggaatcagcagtacttggagaaagagttcttgaaagttgtggaacacagagaggagtctggaaagattcctgggactgttgtggctggagggctt

SEQ ID NO: 197676 - DNA, 772 bp, Homo sapiens
ccaggctgatctcaaaactcttgatctcaagcagtcctcccacttcagccctccagagtgctgggattacaggcatgagccaccaccccagcttgggacatgacatttttgagagaacaatatgtgcaaagacagggaattataaaatgtcattatgtgtttggggtagaagcagaaggtagtggaagcgggaaatgacagtagatgaggattgaaagtttagatggaaataagtcatgaaagtacttgaatgccccattaaaataagtgttttggcaaaggagagctgtcaaagggtttttaatattttaacaacagctttgttacgatgtaattcatatatcataagatttacccctttaaagtgtgtacaattcagtgggggtttaagagtgtattcaggtcgggcgccatggcttatccctgtaatctcagcactttgagaggccgaggtgggtggatcacctgaggtcaggagtttgagaccagcctggccaacatggtgaaaccccgtctctactaagaacacaaaaaagtagctaggtatggtggcatgtggctgtaatcccacctacttgggaggcagagacaggagaatcacttgaatctgagaggtggaagttgcagtgagccgagattgtgccactgcactccagcctgggtgacagagtgaaactccatctcaaaaaaataaataaaataaaagtatattcatagttgtgcaaccatcaccacaatgtaattttagaacatttttatcatgtcaaaaaga

SEQ ID NO: 197677 - DNA, 552 bp, Homo sapiens
tactcactccccgcttcccaaccaccccacaacacacatacccagtgcatacacacagcctccctcaccatcagcatcccccatcagtgcagtacattttttgcaattaatgagccaaggttgacacattattatcaaccaaagtctagagtttacattagggttcactctttgtgttgtagattctatgttttgacaaatgtatagtgacatgtacccaccattctagtagcatatgggtagtttcattgcccgagcagtcatctgtgcttcacctattcatccttctatctccctgagcgcctggcaagcactgatctttttactgccttcatagttttgcctttttcagaatgtcatataattggaatcatatagcaggtaggcttttcagattggtgtctttcacttagtaatatgtacttaaatttctccatatcttttcatggcttgatagcttatttccttttagtactaaataatatttcattgtctggatgtatcacagttttttcatccatctactgaaggacagcttggttgcttccactt

SEQ ID NO: 197678 - DNA, 324 bp, Homo sapiens
cgcctgtgatcccacactttgggaggccgaggcgggtggatcttttgagctcaggagttcaagaaaatggtaggccacttcatcctggccttcaaagataaacactgtttacaatttggttcaccgcttccagagtttttctctatgcctgtatgtgttttatttatttacttaaaaatttttttaaacaaatgcaattctatgttgttactttctttttcaatttaatgtttcttggatacttttccatataagtacatatatatctttttattgaatacatagagtaaattgtatggatgtggcgggatttattttgtcctt

SEQ ID NO: 197679 - DNA, 139 bp, Homo sapiens
accttgggcaagtcacttaaggtctctaggcctcagattccccatctataaaatggggatagtgataacagtacctacctccattggtggttgggacgatgaatgagattgtgtcaagcactgagctgctgctggaaca

SEQ ID NO: 197680 - DNA, 373 bp, Homo sapiens
ttgtttgtcatatgtttgactatctgaaggggacagaatgctttggtgagaaactacggaacagaatcttagcaccaagagtttggagtaaaacaaagttacccagaattaggatttttaccattccttcagaaaatgcataaatgtctctggaagacttctgaagtcttttaaagccagaatcagcaaaggatgaagagaatataaaggggataatgtccttgaaattttctgcctcgtttcccatcaaattaaatctataataatacctcccattgaattttccttcctgaattgaaatttctcaaagtcaagtcccggtcttgcacatttaaggagtgattgtgtgtatgtgtgtgtgtatgtgtatgtg

SEQ ID NO: 197681 - DNA, 640 bp, Homo sapiens
ccacagaccagggtgcggggtggggatgattttgggatgaaactgtttcacttcagatcatcaggcattagattctcataaggagcacgcaacctagattcctcgcatgtgcagttcacaataggctttgcactcctgtgagaacctaatgctgccactgatatgacaggaggcggagctcaggcagtaatgctcgcttgcctgccgctcacctcctgctgtgtggcctggttcctaacaaggcacggactggtacagtctgcagcctgagggttggggacccttggcatagggaatagaatgctcaggagaaggtggtatcctgtactgctcttaggcatgacaccacctgtgagactgctgaaggcgttaatttctggccagctgaaggtagcattgccagaaggaggagctgggcagattgcaattggtgttgtggatagaggcaaaggatcataaatgatcgtcagaagggagctggtggattatggaatgtgaaatgggacagggcaacatttcatatctcaggctatgaatgacagagggacttggaacctgaacatgtttatatataatttattaagttcttaccatgtgccaggtactattctttgcatttttaatgctaagcttatttaat

SEQ ID NO: 197682 - DNA, 556 bp, Homo sapiens
tctctgatagccttggcaggaaagtgaagtcctgaggaagacattgtctagtttcagtcatgtgctctttcctgaacgagacatgttgttaggggtgggtagtactctggtcaggcttgggtttcttgtatgtctcaggaccagagactctccttaaaggaaaggatctgtgtgaaagtacctgtgtctgttacaaggatgtatagaactagaaggagagtcaacagttgagaggctagttaggaggtagttatgatagcttaggtgaggactgaagtgggtttgaattaggtcactgtgaagacagagtttaggaaaactttatgtaaaatgcatagaacttggtgactgactaaaagtgggagatgaagtaagggaaggctactgtgtgttgggctactttgtacatggtgatgccattactattaaccaacatgggaattcagaaaaagaacactttggggaagtggactgcagatgataagtagaattttgacatgagattgtccaaaaagagattaaaaggagctagaaaaaaaaaaggggggtgtgtgta

SEQ ID NO: 197683 - DNA, 894 bp, Homo sapiens
  misc_feature (100)..(100): n is a, c, g, or t
  misc_feature (886)..(886): n is a, c, g, or t
tccatgctaatttggtactaaaaaagattttgaggatttatacactcctgtgaatggatctatagtgattgtcagagcagggaaaatcacctttgcaganaaggttgcaaatgctgaaagcttaaatgcaattggtgtgttgatatacatggaccagactaaatttcccattgttaacgcagaactttcattctttggacatgctcatctggggacaggtgacccttacacacctggattcccttccttcaatcacactcagtttccaccatctcggtcatcaggattgcctaatatacctgtccagacaatctccagagctgctgcagaaaagctgtttgggaatatggaaggagactgtccctctgactggaaaacagactctacatgtaggatggtaacctcagaaagcaagaatgtgaagctcactgtgagcaatgtgctgaaagagataaaaattcttaacatctttggagttattaaaggctttgtagaaccagatcactatgttgtagttggggcccagagagatgcatggggccctggagctgcaaaatccggtgtaggcacagctctcctattgaaacttgcccagatgttctcagatatggtcttaaaagatgggtttcagcccagcagaagcattatctttgccagttggagtgctggagactttggatcggttggtgccactgaatggctagagggatacctttcgtccctgcatttaaaggctttcacttatattaatctggataaagcgggtcttggtccaacaacttcaagggttctgccagcccactggtgtataccccttattgagaaaaccatggcaaaatggggaaaccttcccggtactggggccaatttctatatcagggccagnactgggcc

SEQ ID NO: 197684 - DNA, 829 bp, Homo sapiens
tcagaagcttgttcttaagtagttggaagccctccctaggggagtagatgttcagaagaggatatgcagactcaggtcacatgaaatgaataagccatttctttcacataggaaaacagaaatcaggtttgatttggtatattcaggaaaaactctagttctttcaaggcagcaactgacacaacttttggaaaaacaagagctgatttctgagcaatctaggccagccctggcaaggctgacctatgagaactccaactgagcactgtgagctgagagccttctgcagcccatgggcgccaggcagctgcttttcctacattgcttctcccacccaccctgagaggtggcttgccattagacttgcagtgcctaattaaggccttcaggagcagagatggaatgtactagactgtgagttcaggtttttctgactctagagcctgtgctggagagaactgtaacctaacaggctatatagtccagagggggacacgtggactctgacatcacaactttctgtgaaccatgccctctacagacgtgctctgctatgaatgaagcctttcttctctacccatgaattctacagcattgtgaacatacctctattataacatgactgaataatgtctcattttttacgtgaactgatttttttataagattatgaacttcttgaatggaagaaccatgtctcattgttccctataccttcactgcctagcccagtgcctgagagacagtccctcaagtctccattccttcctcatcctctgagaggttgcgatcacttcacccaaagattacagcctaattctggaacgga

SEQ ID NO: 197685 - DNA, 787 bp, Homo sapiens
acctgttgaagccaaccaggcactgtgctcccttctgttatgggaagtgcaagatgcagtaatttattcttctgaggaagtgtcttgtcattgcccagaccagtgaacttctaaaaatttactgacatggaaaagctcctgaattcttcctaagttttacctcccacccactggatcagatatgtcttaccaaggctttgaacatcctagcctcgtggagaagaagcctcttctcctggttctgttagcatgatgttatgaaaggaaattaaattttgggaccccaaactcattttgccaaagggaaaaatcaagctgagaactgggtcatgcaaacctgcctcccccttttggttcctaaataagatggctacaagaggaaaagctacatgcctcccccatattttgctcacaaggaaattcctagtgagcaatgcaaagtgatagcttatctttacaggtgcagtcacccaggcccaccacacgcaaatgcatatctaattgttcccctgccccattttgtctgtgttatgtagaatgcagattccctacgtttttcttctgccccgtttatgtcatcttatgtaaaaacatgcagattcatggagccagacaaaggcatgactatcttttcccacccacccccttacctgaaaattgtgtacttctcaatatcctgccctttcccctttaaatttgaagccctcaaaaatcatcttcagagaaagatgtctgtctcctgggtgcgtgtccttaactttggcaaataaatctaaaatgattgaga

SEQ ID NO: 197686 - DNA, 194 bp, Homo sapiens
aagtgtgctggcagtagtattgaactcaaggaatgaactcaagtatcctagggtctatattcattggttatatgttacatttttatttctttatggttctgttttccactctatttttgaacaaactctttttaaagacacatggtacttgttatacttgttctctgaataaaaatttaaaaatctgtaatgga

SEQ ID NO: 197687 - DNA, 817 bp, Homo sapiens
  misc_feature (30)..(30): n is a, c, g, or t
tagttttagactaccttgcccaggccaatnatagttacctttttctggggcatatgctgctaacacattttatactccgaaaaaagtacaacctgcactccagcctgggcaacaacagctagactccgtctcaaaaaaaaaaaaaaagccttctatctttgaatttacagagtaaaacagttgctgaacacggagcgatgaagatgagtgcctgtaacagtgttagctttttccagtattgatgattcccccgcccctcttttttttgtttgtttttttgtttttgttttttgctatccaccatttttctcttccccctccttcctagccttcgtgtttcattttaggactttggctcttataggggacttgaaccaaatgttacttaaaacctggaacaagttgaactggaaccatatttactcgactttgaatcaaatctaagtgcttaaaaatgtccttggcaaaccactttcatctgaaacagtatattttctgaaaagttttgagcctggacatctgattctctgactcttatgactgtggattataagttcacatgttgaccatctaatatgaggcaggcatggactaggtgccaggtataatacagaggtgaagaggacatggtacctgccctttagcgcccctcattggtgggggagggagcacacctggacatatcacagtacaaggtgtagcagatttctccactggggtgcaaagtagacaccactgaaatgtcactcagtagatgtcatttcagttgggttttgagataagcagaagttaagaacatgaaggaatattttcatgt

SEQ ID NO: 197688 - DNA, 493 bp, Homo sapiens
agcacattagagccccagcatgtctcttctgtactggttactggagatgaaagcaattagaaaattattctgtttaggagagtggacagcaccaacagcttcctcctcaccatgtgcctgcataggtaacaaataagcaatattctgccccttcctgaccactgggcaaagattaatgccatgcattgaaagttatttttaaatgtcctcaattagctataatatttttaacaaagcttgtaaggtttaggtaatgtgtagggtataagatggcagactcattactgtactttcacagagaaacaaaaaggaataaatccacaactgagaaagaataggaggatttaccaataaataaatgacagcaactttctggatgataggaagaagatggaacattgttaatggataaagtagttggggaaaaggaaaccctcagtctggaatgtgcaacgaggaccttggagaagttccatgttcataatcagcagtt

SEQ ID NO: 197689 - DNA, 526 bp, Homo sapiens
atatactataatgtttaagagtatgggctctggagtaacatctggttagaagttgaaggcaatccctctatacctcagtttgttcttttttataatagggttaaaattaaaattaggaacagggggttgtcaacaagtgggtaaagaaaatgtggtatatatacaccatggaataatactcagtcataaaaaggaatgaaataatgtcttttgcagcaactcgaatgcagctggaggcgattattctaagtgaagtaactcaggaatggaaaaccaaatatcctttgttctcacttataagtgggagctaagctatgaggatgcaaaggcataaaaatgatataatggacttcgaggactcaaggagggagaagggtgggagggggtaagggataaaagactacacattgggtatagtgtacactgcttgggtgatgggtgcaccaaaatctcagaaatcaccactgaagaacttatccatgtaaccgaaaagcacctgtactccaaaaactattgaaataaaaat

SEQ ID NO: 197690 - DNA, 557 bp, Homo sapiens
gtgattttagtactttgggtatatgtattaccattacttttaggagatacaaactgatttaggggcaaaatgatatgatgtttataacttaactctcaaatggtatcgcaaaaaaatgtattttatagaaaaagcaaaatatacattttcaaatctaggtggaaggtaaaaatgggtgttcattatagaatgcattctatgtttctgtgtctcagagcattttcataataaaattagtaaaaactttctaaatagacagcttttttctttttttgagacaaagtcttgctcttgtctcccatgctggagtgcaatggtgcaatctcagctcactgcaacctccacctcctggattcacgcgattctcttgcctcagctcttgcctcagcctcccgagtagctgagactacaggtgcctgccaccacacccagctaatttttgtatttttagtagagacggggtttctccatgttggccaggctggtctcaaactcctgacctcagatgatccacccatctcagcctcctaaagtgctgggattacaggcgtgagcca

SEQ ID NO: 197691 - DNA, 485 bp, Homo sapiens
tttttttttatttaaagatgggtaaaataaaagaaaatgttaagggggaaaatagaaattttttactggaattggtgaaatctaagactatcatatttattccaggaaaaacaaaccactaattggtggaatattttcagatctttgggcactttgcccctgaccaccatcctcaaggtcagaatcaggaagaaacagctcaaggttattggagaaagtaaagatgttttcaaagcagtatagtgaccacctctggcttccattcgtaaatttgtcttacattccatcagcctccttactctcctgggcttatcttctttggatcttttttccccagtgcctgcttctccgcgatcgaagtgtgcacacttcgatcgcggagaatttggcagtccgattgggggggggtcccttcagagacccacaggccggtggcttcggcgcggagtgcccaggttcccggtgcagcttgtggctcgtgtcca

SEQ ID NO: 197692 - DNA, 559 bp, Homo sapiens
tagcacagggtgcatggctggcactcagtaaacgttagctaaatgtatagatgagtgagtgagtggatgaatgtttttactttggatctttttttcaattaagcaagaagttttcagagtaattcgggtcctattagaattttaatagagtataggctcaaataactttcctcctttcaaggatataacctaatttgtgtctgacaagtagagaagattgtagatttcgtttccttttttgcctgttggaaaccgaacattttttcgtttgtttaattgtgtaccacaaaatgtggaagattgatgtctctggataacatttatttggcagaatatcttgacatcggatggcttttcctcaccaggctccaaaatgttaggaaacagagatatgctgcaactccaaaggtgaatctgtatggagaatgttgaaggcagtgttttctgagacaccctgcaaccctctgctgcgttacgcagtactgagccctccagagaggtgcatgtaatggatggatgtgctccctggagttaataaataactatcttcacctggtcc

SEQ ID NO: 197693 - DNA, 957 bp, Homo sapiens
gacaaagcgaaaggcaaggcagcatgagccgatcacccctcaatcccagccaactccgatcagtgggctcccaggatgccctggcccccttgcctccacctgctccccagaatccctccacccactcttgggaccctttgtgtggatctctgccttggggcctcagctgtcttctggctctgcagcatgtcttggtcatggcttctctgctctgtgtctcccacctgctcctgctttgcagtctctccccaggaggactctcttactccccttctcagctcctggcctccagcttcttttcatgtggtatgtctaccatcctgcaaacttggatgggcagcaggctgcctcttgtccaggctccatccttagagttccttatccctgctctggtgctgaccagccagaagctaccccgggccatccagacacctggaaactcctccctcatgctgcacctttgtaggggacctagctgccatggcctggggcactggaacacttctctccaggaggtgtccggggcagtggtagtatctgggctgctgcagggcatgatggggctgctggggagtcccggccacgtgttcccccactgtgggcccctggtgctggctcccagcctggttgtggcagggctctctgcccacagggaggtagcccagttctgcttcacacactgggggttggccttgctcacctgggctcctgccagtttcatgtgtgcccctggaggcgagcttcaacgtcatcaactcacactcctctccctgtcttccggctccttttcggcaactgtctgccccaaccaaggccaccatggattcgggctgcttcaccccatgctggaccccagcagtggctcccttagtggggtactctgagttgggcttggaatctccccaggtgctcgatcttcaccacatccattccgttgagagggtgccgggttaccag

SEQ ID NO: 197694 - DNA, 649 bp, Homo sapiens
ctgagatgctcctggaaaggagttttgggaggaacccatacttagaattaggaagaccaggctgaggccagtttgattgagcagaatgttttctctccatcctctcctctcttctaccaggtgtccggggcagtggtagtatctgggctgctgcagggcatgatggggctgctggggagtcccggccacgtgttcccccactgtgggcccctggtgctggctcccagcctggttgtggcagggctctctgcccacagggaggtagcccagttctgcttcacacactgggggttggccttgctgtacgtgagtcctgagaggcgtgggatggtgcccagtgggggtgtatggggggactaggggagggcagaactgctggtcctatcagattcagcagcgactggaatagggacatattttatatttggaatccaagacttttccttgattcatctggtctccttgaatttcacactgttttctgctgtcccccaaggtcacttcctattccttccatgggagtttccttctctggtatcaccccccgctcttatgatattctgcccactcccacctcctttcccatcctacgctcctcacggtctctgcttctgccctccgcctctcaggttatcctggctccgccgcc

SEQ ID NO: 197695 - DNA, 394 bp, Homo sapiens
ctgagatgctcctggaaaggagttttgggaggaacccatacttagaattaggaagaccaggctgaggccagtttgattgagcagaatgttttctctccatcctctcctctcttctaccaggtgtccggggcagtggtagtatctgggctgctgcagggcatgatggggctgctggggagtcccggccacgtgttcccccactgtgggcccctggtgctggctcccagcctggttgtggcagggctctctgcccacagggaggtagcccagttctgcttcacacactgggggttggccttgctgtacgtgagtcctgagaggcgtgggatggtgcccagtgggggtgtatgctcggtcctcgcccctctctctacccctcacctctccttccccg

SEQ ID NO: 197696 - DNA, 988 bp, Homo sapiens
gacaaagcgaaaggcaaggcagcatgagccgatcacccctcaatcccagccaactccgatcagtgggctcccaggatgccctggcccccttgcctccacctgctccccagaatccctccacccactcttgggaccctttgtgtggatctctgccttggggcctcagctgtcttctggctctgcagcatgtcttggtcatggcttctctgctctgtgtctcccacctgctcctgctttgcagtctctccccaggaggactctcttactccccttctcagctcctggcctccagcttcttttcatgtggtatgtctaccatcctgcaaacttggatgggcagcaggctgcctcttgtccaggctccatccttagagttccttatccctgctctggtgctgaccagccagaagctaccccgggccatccagacacctggaaactcctccctcatgctgcacctttgtaggggacctagctgccatggcctggggcactggaacacttctctccaggaggtgtccggggcagtggtagtatctgggctgctgcagggcatgatggggctgctggggagtcccggccacgtgttcccccactgtgggcccctggtgctggctcccagcctggttgtggcagggctctctgcccacagggaggtagcccagttctgcttcacacactgggggttggccttgctggttatcctgctcatggtggtctgttctcagcacctgggctcctgccagtttcatgtgtgcccctggaggcgagcttcaacgtcatcaactcacactcctctccctgtcttccggctccttttcggcaactgtctgccccaaccaaggccaccatggattcgggctgcttcaccccatgctggaccccagcagtggctcccttagtggggtactctgagttgggcttggaatctccccaggtgctcgatcttcaccacatccattccgttgagagggtgccgggttaccag

SEQ ID NO: 197697 - DNA, 447 bp, Homo sapiens
ggttatcctgctcatggtggtctgttctcagcacctgggctcctgccagtttcatgtgtgcccctggaggcgagcttcaacgtcatcaactcacactcctctccctgtcttccggctcctttcggtatgtgtgggtctgggcagggcagtagaggtcagaagggctggccctggagtgctcactccatcccctaccttttggcttctgtctacccctgcaaggctggctcagaaggttctgggggaggagttcttttctcagtctcgcccctcaggtgctgatcccagtggcctgtgtgtggattgtttctgcctttgtgggattcagtgttatcccccaggaactgtctgcccccaccaaggcaccatggatttggctgcctcacccaggtaggttttctcctagtcctccattctcttgttcaaataaaggtatctatttgaact

SEQ ID NO: 197698 - DNA, 670 bp, Homo sapiens
tttgagatggagtttcgctcgttgctccagctggagtgcaatggcacgatctcggctcactgcaacctctgcatcccaggttcaagtgattctcctgccttagactcccaagtagctgggactataggcgcccaccaccactcctggctaattttgtaaaaaacaaagctgaaaacagtagcaagctctgcaaacagtaacagccttcaaacactgcctgatcaacaggctctacccacagtagcaggatgtacaaacagctgaaggctctgcaaacatgcacaggctgccatgaagagcggcagatgatacaaagacactctagcctacccaatcacttcaagagaatgtcttcagtaggtaattgtaacaataacaacaaaaagcagaacttgggctccatgccttcaacaggcaacagaatctggtagatttcaataattttattttgctttttacagtattttttttttagaattaccttcatttcatgatactggttttccagttagaggagtgatataaaatttcctttaaaaataaatgcatgttgctgggtgcagtggctcacccctgtaataccagcactttgggaggccaaggcaggcggatcacctgaggtcgggagttcgagaccagcctgaccaacacggtgaaaccccgtctctac

SEQ ID NO: 197699 - DNA, 468 bp, Homo sapiens
gctgtgtgttactgtggttgtgtgtcattgtggttgtgtttgtcagggtgatgttgtgtgtccatggaactgtgtgtctaatagattgcgtgtatgcaatattgtctctcactgtgcttgaatgtgtcactgttgcgattgtatcactgtgatctagtgagtgtgttgggaccaattggttgtgggatgagtgtcactgtattgattgtatgtcactgatactgtgtgtgtcagggtgatgttgtgtgttcaagggactgtgcatacctcatggagattgcatgtgcctgggcagcactgtgtgtgcctgtggttgtgggtctggggagtgctatgtgtcctgggactgtctgtgtcactaagttgtttttttgttttgttttgttttgttttttgagacggagttttgctcttgttgtccaggctggagtgcagtggcagcgaccttggctcattgcaacctccacc

SEQ ID NO: 197700 - DNA, 390 bp, Homo sapiens
cagttcaagtgcaaaaagtcattaacaacagaagtaaaacttctccaaagtgttccatctttagtggagatgacagcatgtgaaaaagcctccatacgaaaatcaacacatccaattcacaccagatacagaacaggggagaagaacaagtttagcattctgcaccttgatgatccaactggaattttcaatctgtgaacgatgagaaacagtagaacgtggtttatcagttagtgtgtaatctgttctggttccttttcaataaagaacctaagtggctataccagtgataagagattatcaaccaggtcagcagcttcttaaactcaagaagaggccaggggaaaggctgtgagacttggatgaaaaatattttctatttttccctta

SEQ ID NO: 197701 - DNA, 434 bp, Homo sapiens
aggcaaaagtggttaaagagaaagaatgaagttgaaacctgaacaataagcacaggtgagcaaaggggaaagttaggcctgccctgggaatgaaaaccaagactacaacttggtgaatacaatgaataaaatgtttacaataaacctgtgacaaaagcaaattaaagttattcaggttagaaatgatccctggctatttacagaagcaaattcaaatctgtgccagaggacagttacaatttaggtcctcaagattctcacaaattaagttcaattaagtaagaacactcaatcctaaccaccaaacacacaaagaaacaagggattgtttggtgaaatgatcagaaaaagtaatacatataggcctccaagaccccagatatttagtaacaatatatgaaatatttaaggaaatagaacatgaaatttttaaa

SEQ ID NO: 197702 - DNA, 591 bp, Homo sapiens
agaacagcagaaaagctagtggcagtggcttggaacacacctttcctcaacacgaagccaagggtcaaatgaaagaaaaaatgtgaatacatttatatgtctggccagtgattaaaaaaatgttgctctttttaatatctcatcaacatcaatgattacattcttttctggtgcaaatgtagtaagtggttaatttgaaagtataaaaatgtgtaaggaagaaaaataaccaagagtgataccatttaaacgatattacttagcgctggtatatttctttctattttcttttccattaagatatttaccaagcacatttgaatgtataattttatattttgccatttatccttaacattataacagaggcacacaaggcgttttgcatcttgttttttttccatttattgtgatatctttgacatcttgtcacattggcatatgtagacttacctcattctttttaatagctgtatggtatgaacataacacagtttttttaatgaacacaatgttatttcatagtcttctttaccattgagatatttaccaagcatatttaaatatttaattttatatttttccatttat

SEQ ID NO: 197703 - DNA, 159 bp, Homo sapiens
tctgtctagtctcaccaggccaaaatcaaggtcaaagccatgggatcgactcttgagactgtgggggcagaattctcttctaagctcattcagattgttgtcagaattcatttctttctcctggtccccatattttcaaaatacagcatgtgaaattac

SEQ ID NO: 197704 - DNA, 448 bp, Homo sapiens
aaaaaaaaaaaaaaatctctgggctgtggcctgcctcagcctcccttcttccagagggaggcaaggaagatcagctagctggttctggaagaaaccgcgcacttcatatcggctcagactcagctgctggttttcctacaatgctgcttctttacaaagctgcttaattttccaaggggctgaaattgcaaagctagtttccatattgacttacgaaatgaaaggagaacttgggagaaaaggtgaaggaggtaacttaataataaccgtcaggtgcatgagaggtaattttatgcaggcaggaggccaaaattttttccatttatattgggaataggataaaaggaaacaggcacacacttctgcaggaggaatttaaataagacaggctctgcttatagggctgatagcagggctggccttgggcaaccctaggaatgaaatgaag

SEQ ID NO: 197705 - DNA, 122 bp, Homo sapiens
agttttaaactcctaacatcaaccaatctgtagattcttactaagagaagcatttggtactaaaagccatattatctctgttctctcacttacttctaagccaattaagcaaaagaggagtt

SEQ ID NO: 197706 - DNA, 146 bp, Homo sapiens
gtagatataggtacttagactgtgatgcaaatcatcttccttaccttgagtcatggtcaaaaaagtatgaaaaccactaaactaaactaacttttttccttcttttgacagtgtaagaaatatcaggtcaggagaagtttagtaat

SEQ ID NO: 197707 - DNA, 488 bp, Homo sapiens
cacccagtcctcttttgtctttttaaatctcaaatagtaactcagtctttccctgagtttcataactttgatacttctgaatattacaggtcagttattttgtagaatgacctcctatttggatttgcctgatgtttcgtcatgattaaaagcagttatgtttttagcaggagtatcacatacgtgattctgtgttttttgtttgcatcctatcaggtggtacatgatttcagtttttccttgaccacttggttaaggtgtgtcctttaggtttctccactgtgaggttaatctttttttctctttatagtcagtatggattttgtgggggaagtacttcgcctataaacatcttgttccttgcgccttttcctcactaattttagcattcattgatgtttcttggcctaatttatgaccaggattgatggcaagtagtgattttctaatttcaccttttctttcacattcatcagttgacgttccgc

SEQ ID NO: 197708 - DNA, 356 bp, Homo sapiens
tttatgaagctgccccttttgtgcagagtagtctggcattctataagaaagatacaagccagaaaacaataccatttcaattaaagctggtgtctatgaatggcagtctgcatactaccttcaaagggaacaccacaagaggtgagaaaagataacatgagtcactgggattgacgagactgacacggaagactgaacaaatacaatggatttagttaatgctaaagtagtttgctttcaagctttcctcttttagttcaatctgcgtcactttgactttccttaaagttgtgtgggagaaaaggaggaataaaatgttgccaaaaaaaaaaaaaaaacccccccaaaaaaaaacc

SEQ ID NO: 197709 - DNA, 212 bp, Homo sapiens
cagtggtattacagttgtgagccaccatgcttgggccagtattcttgatgaaacaatttaccaaatgataaaggcttgattctgtgtttctctggttagtcttgcaagagggaatacgcaaggcaaggtaggctaaaactgagtttgtggctgatttacaatttacacttatttcctcaaggttcttaccatattgccttctgaggagttcc

SEQ ID NO: 197710 - DNA, 639 bp, Homo sapiens
accgtttcttctgtgcccacaaggtggtcagcgccctgctcaatgagcacaatgagggacctcaaaagtcctgggcagctgatgcttctgatctctgctctctgggcctcagttccctggcagagagtcccatggaattaatcaccattccctgagcctgtttggcaggcactggactggtctctgaggtgagaggtgagttggccacagcctggaaagccaggaaactctggagctccaagaagccacctgagtgagccaaggactgggacagaggaaggggacgtgaaggggagcctgactcccacacttgcttcctcctgggtaaatcatcacacctcgcctggcttcagttcctcattttaaaaaggggctgatacaacctacctcgtaagattctagtaaaggttgagttaggtaatataaaatagcagagtacctgggacatagggacacaataaagtgacaccaatcagtgaaagctactatcataggtttaacttactactacagagtgatcatgttaggaccaaaaaaagcagaaggatgtgggagacgccaccccgcccctgccggcaaagacgatcagtggcacatgttggagaatggagggaggaatatagataactgtgttctaga

SEQ ID NO: 197711 - DNA, 384 bp, Homo sapiens
aaaatgagaatcttggtacatggagtggtgaattaagaatggaaacagagcagaaagacccaggagatcagaataggccaacaaggaaacagtatgtgtgcatggtaaggagttaatttggtttgagaagacatcagattcagtactaagaaaaagaggataggaaatatgggatgagaagataagggcttcttcttctaatgatcacaataatgaataatactgatcaggtgagaatgcaacattattgttgctttttgttatagctgaaagaagtgtgatatattaaatcaggagataagaaatatagggagatggagagtgtaattgagaatgattgcaggagaattctatctctttggaagaagaaaaataatgaagttt

SEQ ID NO: 197712 - DNA, 510 bp, Homo sapiens
aacatggcaatttaaaaatgctaagaattttaaaacaaaacttccaggaaaaatgtatcctgcaagttgctgaacttgtgccagaaagtggttaaacaattataaagcacagaacaataacaaaaaagtaaaacttctaaaacaataagcaaatttttaaaactcattaacttgtttttctttctgatgatatgcagacttaaaaatactgagacttttaagtaaaaatctgttagcataatgtaactttaaaaactgtaaaatctgtgtctgggttaggaacaaagtgaaaaaatgctaaaacaatagtaaaaacaaattcttaaaactggcattactttttcccaatgaaagtcctaaaagtaattatgcattatgtagtcttatgaaaagaggctatagatggaatatataaggcattagattcagttaaataaaattaggttaagataagttcagttgttagattatatggtaagatcaaatcagtaataaaagcgtgaataatct

SEQ ID NO: 197713 - DNA, 921 bp, Homo sapiens
ccaagaaggtgaaagatctccacaaggagagctacaaaacattgctaaaagaaatcagagatgacacaaccaaatggaaaaggatttcatgctcatagattggaagaattaatatcattaaaatggccatactgcccaaagcaatctacagattcagtgctattcatatcaaattatgatattcaatgctattcacatcaagtgctattcatatcaaaatgtcatttttcaccaaattagaaaaaaattctaaaattcattagaaccaaaaaagagtatgaacagccaagccaatcctaagcaaaaagaacaaagccaaaggtatcacattacctgacttcaaactatactacaaggctacagcaaccaaaacagcatggtactagtacaaaaatagacatgtagaccactggaagagaatagagaacttagagatacagctgcacacctccaaccaactgatctataggagactgatctataggagtggtgcaccactcctatagatcagtatttttttttcttttttgagacggagtcttgctctgttgcccaagctggactgcagtggtgcgatctcagctcaccacaacctccacctcccgggttcaagcaactctctgccttagcctccccagtaactgggatcacaggtgctcaccaccatgcccggctaattttcatatttttagtagagacagggtttcgccatgatggcgaggctgatcttgaattcctgaccttaggtgatccacctgaccttggcctaccagagttctggaattacaggcgtgaactactgcgcctggcctcaaattgttttttcctgatctctgttcttaataatgttgtgtctgagcacactgtgccccgccttttgtatggtcttgtgtgacggtcttagggaaaaccagctatttg

SEQ ID NO: 197714 - DNA, 251 bp, Homo sapiens
aaacttcattgatattgagggatttcaatccagttttgataatatagcagccaaatctatccacatcactaaagccaatcagccagactgtcattcttactctgatgctatttagaatgtgcaatgagccaccggattccacttcctaaaaactaatttccctagagcttctgctctcttattttatcaatgcccctgaggtcagaaactatgattttgtctctcctgaacagcacaatgtctcattaaaa

SEQ ID NO: 197715 - DNA, 231 bp, Homo sapiens
aaaacgtgaaggtggaaggaaaaacagaacagaccctaagaagaaagttcacaaacctagagaggagagagatgctagaggtggctatcaggaatatgagaaaatgagaggtaggggagggagaagcaggcagtgataacaaaaaaaaaaggatttttcaggttttgctggatgttaagaatgttcccctttacattttcttgagagactacaggaaagttttaatttgct

SEQ ID NO: 197716 - DNA, 445 bp, Homo sapiens
aagaagaacaacgttttcataataccaactttcaacttgctagaaagtgacagagtttatcatcggcaaaagaaaagtaatatggatcaaccgaatagaaatgagagtgcagaaacaggcccccacatatatggccaattgatttataaaaaattgacaaggcaactcaaatgaggaaaggaaaagttttcaacaaatggtgctggaaaaactggtgatctgcacataacttaaaaaaaactctcatttggaggatcagaaaatcaaaaaaggacattgattctaactatgtcctatataaatctaattcaaactggatcactaaaactagactgaaaaaaacataggatgtcaggtatggtggctcacatttataatcctacgagttcaagaccagcctgggcaatagagtgagacctcatctctgcaaaaaatttttaaaaat

SEQ ID NO: 197717 - DNA, 511 bp, Homo sapiens
tcaaggtcacacagctagtaggtggtagaaggtggtaaactccttggatgctattatgacataatagctgaaagaatgaagatttggtgtcagactagattttaatcacctatttgcaaggcgatgcagggaaacgtgacttaacaactctgaatctcaatttctttgtttataaaatggagataatatttcctacttggatgggttattgcaaggcttaaaagggagaaaacatatcaaatagccaacatcttgcccattacataaaaggggcttaaatgaaaacaaattcctttcgttatcattgacccatccttatgctacaggcatatgagtcaggaaaaatggaaggcacaattccttcacttaagcatctcagcatgctttttttttttttttttttttttaagacaagtttccctctgttgcccaggttggagtgcagtggtacaacctcggctcactgcaacctccaccacctgcgttcaagtgattctcctgcctcagcctc

SEQ ID NO: 197718 - DNA, 274 bp, Homo sapiens
gctttgtagtactttttttctttctttttttcttgttgccttcctttgtgatttgatcacttttgaaatgatatactttgattcctttctcttaatcttatctactacaggtttctacttagtggttactatgaggcttacataaaatattttatagctataccatcctattttaagccaacaacttcaaacacatacaaaactctacacttttacttctcccctccctcacatttcagtcaattgatgttacaatttacatactttttatatt

SEQ ID NO: 197719 - DNA, 488 bp, Homo sapiens
tgcatgggtactcaaagtatggttgctactgaatgcgtattgcttttgcatcgtcatgaagttgagaaagtctacgttggaatctacagcttgtgtaaaccagcttgtgcagcttgttgctgttctttgaacaataagatattagcaaaacttatcttgaaaacaagataaaccatcacaaattgggtattgtgtgtataaaattttacatttgtacatttaaaaaatatccggtgtttggctttttaaaaaaataaatggtacctaaatagttcttaatttccccttatgggtagtctcctagctgttaaatgtacatttatttactcattcatttttttatttgacagctatttgttttgaatttacttttggcacagcactgggctttgtaatgaatactgtacaacagatcaaaatcttatagaagattttaataaagattttataaagattttaataaagattaagtctttaagatttaaaaa

SEQ ID NO: 197720 - DNA, 453 bp, Homo sapiens
aaaagccagacagtcagtatttcaggctttggcccacgcagcccctattgcaaatactcagctctgccattgcagccaaaagcagctgtaaacaatacataaacaaatgggtgtaactatgttccaacagaacaaagccagtacccacagactgccaacccctgctccagaacactgaaaaccaacacgtgaagtctcctttcttgcttttcccagacaacttaaactatactcagacttagtcactaatctctggaagtttctgtgtatatggaatacaatatcctgcttcctcactcattccctcagagaatggattcttttacttataaaaccctaaatgatgttggatatgatggttttttgtctatctgtttacatttgtttcaaaatatttcagacatagcttcttggccttttggcttaagatcaagtgtagtaaaatatttcaga

SEQ ID NO: 197721 - DNA, 357 bp, Homo sapiens
gcaggtatacactgtccagtctgccacggcgcctgccactctctgctgtcctcacactgcagcagcacatccattgccgtaaatcttaagtgtggcccctgtggacaattgagtttgcaatctgtgttgtgtgatttttaaattgcagggaggaagatcatccaggctgtctgtggaaagttgagcaaatcaagtgtgaacgcagaccaataatttctgacagtcaaaccataaatatgaagagggaccacagagaagctggattagcagacttgtatactctgattttgtcaagcactggaagaccaatttagggtgaccatatcatttgtcatccaagctgatgggacgaatttg

SEQ ID NO: 197722 - DNA, 591 bp, Homo sapiens
atgtaactccttacattttctccagcatctttcttcattcagctgtatcatttagggatataaacatctcttgtggatgatatgtacactctgatattcagcactattcaaccatcttccatcttcctcacttgtacttaatctctttccaccctccattcagtctggacatcctgggatccctgctctgacccattttaagtccgtcgcattaatctttctctaacctcccattctgttgactccaccaattgcttcaaatccttttccaacaaagctttctgggcagcaccaaatactccagttcttatttgctatattcaactccatatttcatactcaaatttctcagtctagaaattgttcttttctttctttctctctctctcatgtcttcgtatccctctccaccatatcaaccccatcagcatacaatcattactgttatttatcccatttgatttaggcaaataaaaagaaaaaggggtccttaaaaggttttttgcagttccaagtaatttcttgtctagcataaaatccctggctcttaaacccaaactgacagtctttaatatgcaaatccaagccaag

SEQ ID NO: 197723 - DNA, 162 bp, Homo sapiens
cagagtcgagtgttagagtgcaggatccacagcggggagaggctgggcggagttgggggtagaattgataaaattttcttaaaatcaagtagcacaataaatgcctgaaaatagccaagaaagctatagaaaagaaagagtaatgaagaggttcttgcctta

SEQ ID NO: 197724 - DNA, 163 bp, Homo sapiens
ctctctcttctttgtttttccttttacctccttattgaggtattattgacatttacaatgcggtaagtttcaaacgatgtatgcaaaagatagttaatatgtccttcaccaccctctgtctcctcttgcccatttatcacccctctctgccacccttctctgc

SEQ ID NO: 197725 - DNA, 415 bp, Homo sapiens
ctagggctgctgaaggccaaattgaagtggtttctgagaccagaacttaagactcgtatgtggcatggtcttgcaaatgggaaacctagaagctggaggcttgaaaacaaaaaataaattaattgattaatttaaaaaaatcaaatggacaaacaagtaatgcctgggtttgtgagctgagggacctggggtctagcgaggtataaagtacaaatgttgtttcctggtgatccctcaccctcagcagccaggactctcaagcaggcttggttcacccagctctgctgcttgacaagctcattcctacctccgtgatgcatttcttctccccacattaaccataaggtccacaaacataagaatcacgactttcaattgcttttggcagcactcaggatgatactgtatgttatat

SEQ ID NO: 197726 - DNA, 436 bp, Homo sapiens
tttccccacaggatcctctagctagaatatccaagggtcatggagagaaatacccagttaaaatatcagacatgaaaaagcgataccattagagacactaaaaagaccattaggtaatagtactagcttttgtattctgagatccaacagcagcagtcacttccctccaccgctatgtgtatcccaggaccaccctgggcagggagggctgaggttagggagcagccatggatgctctgatgctggccctgggcctcgggggtgacagtgatgaggaactgggtgcacacatgagtggggcagccgggcctggccagagaagcagcacacacgtgcacagatgtgtttacccacatacacatgtgcacgcacgtgcacaaacacattgcaggcaggcatgttgacgcctcaggcagcggaggaccctgactctggg

SEQ ID NO: 197727 - DNA, 223 bp, Homo sapiens
atgactctccatatgaacatatatgtgaaagtttatatatgtttatatatgtgctgcattctatttgattagtctactttttcacattgatactcatgccaatttgttttaactctgtagctttgtaatgtgttttgaaatcaagaactgtaattcctccaacattgttccttttttaaagatcgttgggtactttgttgtctgtctcttgatatttcttata

SEQ ID NO: 197728 - DNA, 552 bp, Homo sapiens
tattagtgaagtttaacatttctatattggtcattcatatttctttgtgaattatctgttcatgtcctatgtcccatttacatgttcattttcttaatactgattcatataggcattgtttatacactaagaagatgcttaaccctctgttatgatgtgattattttcttcattttgttttttgtattttgcattaattttttgtaagtttcttacctccaatattcactcattttctgttctcttaggatgaaagacacattcacatttcaggtagagactacacttcattttatttcctttggattctgttttcatgattataaatcactgataacaatgatttacatcatacttccctctgctgctgctcctcttcattccagttaccacccctcgtgtattagtacctctgtgatttaggttctcctcaagagctgattatgttggtgcaactcatgccattgctttggaactgtttccctatctgtagaagggggaagatgggactaatatccagaatatacaaggagctcaaaggactcaacagta

SEQ ID NO: 197729 - DNA, 360 bp, Homo sapiens
tgcaaaccttctcatctactctcccccaaaccccactactcacaattttccttaaccccacccagaacagagagtttaaataaaggcccacacagctcctggcaagacctccattacccgcatccccagccacataaactcaatactgcccatttatcctctacaatggcctaacatgcaaagatatagtataacctattgttccccttccactcagatagcatcaagacaaattccatcaagcctcacatccctctgtcaccatgagaaagacaggtttccttattgtagacctttaattctggaaggctttgcacatcgatttgttaattttccaaaagttccccacccccttcactg

SEQ ID NO: 197730 - DNA, 384 bp, Homo sapiens
tgtcaaaggaggtggtcggactagatgatttctaagacctcttccagttctgatttcagctgtagaaaaagcatagtgggatcactgtatagggagagattcttccaatatccataaatttatatctttaaaaaattcaataaattatttgcagcatatttttcaaattgtacataacaagcatgtgttctttttataaaggaaaaagtaaacattttaaaattgaaaaaatttatactccaaatgcagccatatgcttcaactaaatgtgagaccacccaccccttcctacccaaagaaaggtgttttctttgtctcatgcaggacttacatttgaaaaagagtttctaatctggcaatacacatactttaaaaatcatcatt

SEQ ID NO: 197731 - DNA, 413 bp, Homo sapiens
cagttttgcctctaactagctgtgtgatcttgactaagtccttcatccctctgggtctcagtttccccatgtgtaaaatgagatgggtggacagataatttctaaggcccttttcagctccaatattcaaggtctgaacctctggctttcaggaagcgttttcctccatagagaactgttattctagtccactagatggcactctaacaccacatttcaaatatactatgaattaatgttttttaactctgccacattattcctaaattaccatcataagacaaccctcctcatctcttaccaagtggcttcttgaagaaccatgattcggccttcattagagctatttccatagtgaagctgattatcgtgaactctcttgtgttaaataaatgcaaactctgaataaatac

SEQ ID NO: 197732 - DNA, 197 bp, Homo sapiens
agcctttgaggaccagaagtcttgaggcgataggttctactcgtgaatcctttgaatgcaaggaacagaaatcctagaaactgggaactagaaaaatcagcagctggagctagtctggagatcctaagtgtcatatgatctgtctgacatctgcatctgacagagtgctctgatcttctgtgccggctggctcttta

SEQ ID NO: 197733 - DNA, 359 bp, Homo sapiens
actgtatgtcccttgaaaatttttaatattctgtagtattccacattttgcaaaccttttatctaggaacttaaaacttctaaaagacttccatcaatatcgtatctctaataaataccaggccctaggaatccaacatccaaaattcaaaggaaaagaaaaaacaaaagcactgatcatgagaatgaaatactcgaaaacattctgaggatcaagcatcactgagttttaatacttctgaatttcaggaagggacagttcaacacagacaactttacctgaatcgtgtgtggaagaaacctgaccacagtgaaagagaataactaaactcttctaacctaatgtgattcttaaagcag

SEQ ID NO: 197734 - DNA, 802 bp, Homo sapiens
accggcttagaggaccgggaatgggtaattggaggctggagccgctccactgtggttcgcctcgctgcaactggtggtgaccgcgaccgagatggcagtgcggcgggagcggcaccaaccccttcctcaggtcggtgcaccactgcgtgacctccaggcagccacagcctggaaaagcactcggttaccaccttgctcaacacctgtgcccagagcatccacaaggcctgcctctcggctgcttagccaggactgcagggatggcccgcagcctcatcggggccaaggacgcatgcctcctgtcagacacttctaggtgttggcatccatggagagcctggagttaggactcgtcactgtgtcccccactccatgaaactgggcctgctgtcctgttaggatgctgtaagcccccgggcctgggctgtcctttctgacacactgtcccattccttggcctggttcatccccagcttcctggcaaagttctgctccctgaagcaggaagaggctgagattaatgccaacgaagtggggcccgtgggcctgggaagactgtgtggctggctgagggtgggcagtaagctggccaccccacccccgacatggacatggctgtgctatggcggaaggggtggtgtgggcatggccacagcactcgagacagccctccgaggaggagggcgagcctggctggaccccctgtctgcggtgctgtgtcagggcaggagaggacagcctcttgcccccaggagtgtgcagtgtgggcaagagacagagtgatcatgtgtttggaacgcag

SEQ ID NO: 197735 - DNA, 743 bp, Homo sapiens
cctcacaaccagcccttgccatgccacaggtcatgaccagaaccagaaacaagagcgtaccaggctcagtggctcacacctataaccccagtactttggaaggccaacacaggaggatcacctgagcccagagttctagaccagtcttggcaacctagtaagacctcatctctacaaaaatcagaagacttagctcggcgtggtggcacatgcctgtggtcgcagcttctcaggaggctgaagcaggaagatcatttgtgcttgggagtttgaggtcacattgagccataatcatgccactgcactccagcctaggcaacagagtgagactctgtctcaaaaacaaacaaaaaaacagaacaacaagagctggataaagaatagaaataattgaaggatgtgtataataaaacaagcatgtacattttgaacctgatagtattttgaaatgtttaaatggaatctgaagtgagtacatggtccacaaatagaagcatgacccctaaaaataagaaatgttgcttctaaaatcaaactgggtccttgccaaaagggctatacttctgcacctcctgagcagatactgattgagggcctccgccatgccaggctcactgctggccatggggaccataagtgagagcaggaccctggtcttgttcctcatgacatttatattgttgagaaaactgttggtttggtggtgtgagtccctccagaaatcatttagtagatacagaata

SEQ ID NO: 197736 - DNA, 234 bp, Homo sapiens
agtttgcaggccagggggacaacaaggctcaactctgtggtggtgtgggaggactcacacaccttacacttttctatctccagcaccctgcaagacacctggaagtaacatgctggctagacacgtttgttgattgaccacgtgtttgctaatccaacaatccaataaatatgaagaagaaagctctggaataataagaataattttatttcaaaactagctctgcttcttgac

SEQ ID NO: 197737 - DNA, 749 bp, Homo sapiens
attccctcttctctctctctcataccccactccccagtacaatcaggacccaagtcctactgagccccctcaaatatgcactgccccactatcctcatttataagatgatggttctggcttcttgggcacagatctgagttcatcttttccaaggtcgcagattctaaacagcggtagcttctttctgctcatcacgccctctactgaatccccaccacaaatgtcaactttacacataacacttctttagtatatttcctttcttactcttcgaaatgactgtttcccacttctctttgtacaaacatcctacacacctcccccaacaactagcatctttgttcactattgatatccttgcctcagagttcacagagaaagagaagccaccagagaggaactgcctatgattcccaccacgaaatcatgaaatctaccaaattaccttcatttacacccccattctcagtgtctcctctgtactatggacagtgtcctagtcctgtcaaagactagttcctccccaccatgctttgaattccaccatctgagccttctcaaggttccctccttcctttatctcactccttcctgcaattttccctcttcagtacagcattcccataagcacacagacctgttgtattatctctcccattaaaagactctccttacactctattccttgttaggacaaaatttctcaaaagtcatattctcaacacctccacctcacattccctcccaa

SEQ ID NO: 197738 - DNA, 575 bp, Homo sapiens
cagggcgtatatatgctgtctcactctccaagtttatcacccttctactttttcacttgttttgtgttggtattgatacagtggagagtgagaaattgacatgtcagagagaaagagagagtgagagagtagaattgctggagcagtgttcttcagtaagctgtagcaaatgggaaacagtacagaagtgtagggcactggcaacaggtaacagcaaggatatatcttctctagtgtaagagaaaagagagagtatggagtacagaggctgataggtgttagatgtggaatgtggcatttctctttcagtggtttctgtcattgaaaaaggaaggaaggtcatcagttgagaccaaagataggagaagtgtcagagatttgtggggaatgcctaagaaaatggttagttttggaggagagtggctaagggaagggcttagggaagtgtgatttgatttctgcacgatgtcaagagcccacttgagttttggttattaaagtaagaccagtttgaatgggttagggtttttttctaaccatattcaacagcacaggttcaggcatagattaggttg

SEQ ID NO: 197739 - DNA, 242 bp, Homo sapiens
tggtcaaaaagctcaattgctcacccctgacaatttttccctttgctagaatagaaagcataacaattatttttctgaaatataaattacaatcaggtggtgtttagttctgctactttaaaaactttctactggtcaggaaagtagtcttatattattaattgaatacacatgaaaaaaaaataccctaacaccttcccatgctttttactggaatggaaatctagatcaaacttgggtgt

SEQ ID NO: 197740 - DNA, 286 bp, Homo sapiens
tttttactattgtttgacggttgttataataaagtcaattaagatttcaaaagacattatatgcatgggccaccttctcttttcatatgcaacaagaagtaaaatgggaaccctctttcaaaccagcaactgctcacaactaatagtggtatgagtaggtatttgtatttccactgagcatatgtgtataaatgttcattcattcatctcaccaacagttattgtgtacaattttcttctgtggatgtaagcaaagttcattaggctgatggtcaaacaataaata

SEQ ID NO: 197741 - DNA, 299 bp, Homo sapiens
tctctccagagctggggaacaaagcccaaaggagaggcttaggaggggctttcctagaagaagctggggttgtactgaggtctctagctgtgccctccaaaccaggcctccgtatggaaaatgcatacgaagttgtgatgtaaattttagtcctgccatcctgctagtcagaggggaaagtgtgtgccttaatctctggaatcatatcctgccattggcacacagttagggatttgctgacatgaatgaaggtctttagttaaacctgagttaataactggaaggtctaacgtgtagtc

SEQ ID NO: 197742 - DNA, 436 bp, Homo sapiens
cattaagtgctcattaattattaaatgctcattagtcttcccaatcctatgaatctgatattgtcttctctattttatagataataaaattgaaaatcagaaagtttaatgcgatgttagaattacacagtaaaggccaggcgtggtggctcacgcctgtaatctcagcactgtgggaggccaaggcaggtggatcacctgaggtcatgagtttgagaccagcctggccaacatggtgaaaccctgtctctactaaaaatacaaaaaaattagccgggtgtggtggcacatggcctgtagtcccagctactcgggaggctaaggcatgagaatcgcttgaacctgggaggcggaggttgcagtgagccgagattgtaccactgcacttcagcctgggcaaaagagtgagactccatctcaaaaaaataaaaaataa

SEQ ID NO: 197743 - DNA, 121 bp, Homo sapiens
aggatataaaaagaggccttgggtctgatgggtttgagaattactggcatggacagcctcattagttcctgtcttaagacagaggataataaaagttaaaggctcagacttaatcaaaggg

SEQ ID NO: 197744 - DNA, 234 bp, Homo sapiens
tcataccaaattcagaaaatctttggctgacagtctggtatcaagctcttctgtaagtatcctattatggtcggtaagtgtaaaaattgatattttcacatagatttcaactataattctgtagagctaaccatagatgcctaatgccaatgaataaacaatgttactactttacttggaatattactggttagaaacaacgatttaattctaattgtagatatcaataataat

SEQ ID NO: 197745 - DNA, 305 bp, Homo sapiens
gaatcgagctcgctaccaatgcttttaccgcaccctgccaattgaacatatttttaaactactgttattgacttttcccattaaattcagcctgttctcatttaacgtatgttcccagaaagatgaattttgtactgcacttttttagttgactcatcttcatccaaacttaccacccttataattacaaaggcaggcttcacctggaaatggtgtaataaaccattgaagaatcctaaaccttactattaaaagtattttgccctcatcaatccataatcgatgtgtttttagtttccccacat

SEQ ID NO: 197746 - DNA, 322 bp, Homo sapiens
ccttttccgaatctccagaattttgccctttctctaaaccacgcttttcttttctccctcctgtctcctttctaaactcccaggaataataagaactgatgaacactcacaattatttatgtattggcaggtgttttgttttctcaaagtaaagaggatgtgagttaaacatagtgtagttccccatgaagaagaaaaacaacaacaaaaccccctcccaaaccttaataaaactccttttttatgctagtacgttgttatcaaactgtgttctagtaggtcagtgattcttaatagagaaaaaaaagattctccactttgg

SEQ ID NO: 197747 - DNA, 540 bp, Homo sapiens
ctccgcagtccagctttaatatttcatgtttcccaaaatgtgtcatgtaccatgcagaatagaggggaattggtgtgtgctacgtaaggaaatggtttaagagatgtcctctgagcaggagccgtcatggcaggacttctgcaagccttgactgtctttctgcacatggtcactcccctcagagtggtcaccgttggcagctctttctaagtttatttgtgtggagctagatgttttggatcttagctctatagccaaaacaagaatctgggaaacttggcccggatagaaggcatctgctagttccctgactggactctggggactcttagatgagggatcattctttcattcttctccagggtgtctgaaagttgttgtgagggtagataagcagactttttactatagacagagtcccagctcctagaatgtccctcctggcctgccctaggcaactagctcagcctggggccattttgactcagagctgttaggctattcaaaatgaacagggctgagcaaaatcaacagggcaag

SEQ ID NO: 197748 - DNA, 556 bp, Homo sapiens
gctcttcactttcttgcttcagcctggctcttcctttcaggcactaactccctggcatcccctcaacgtgcgactatcttctctccatacacaacctcttccctggcctaaagagaagtcttccttgctccttactgccacttccagatcactttccctttatctgccttaaaaatgcacaatggctcacatctgtaatcccaacattttggggggccaagcgggaggatcacttgagcccaggagcctgggcaacaaggcaagactctgtctcagaaaaaaaaaaaacaaaaaaaacccacaacatttactaacttagccatttttaagtgttctgtgacattaagtacattcgcactgttggaaaacagatctgtgagtttttcatcttgcgtatctgaaactctatgcctgttggacaacagctccccttttccccctcctactagcccctggtaaccaccattatttctgtttctaccaatttgactactttagataacatcatgtaagtggaatcataccatgtctgttttttgtgacagacttatttcac

SEQ ID NO: 197749 - DNA, 622 bp, Homo sapiens
ggataaaacttcctgtactggtagggaaagtaataaagttacaaactccttgccttttttcttgcagtttgtcttttgtttgataaggtattgtactgttgacacttcttgggctctgtgcacctacatagataaaatgaatctactcgcttcatttgacacccctccaactgcttctgttgtttaacccaacagaaaaccaacaaccaaagaaacttttacaggtggaaaaggactttggagggttttcctcgtctcagcaaattaaccctattaactagggaggtaggagataaagatagattctcttacacattaacttcccaggtaagagagggaaggcacagaggagatgctagaaaccttaagtaaggtggtaactataaaaaagtgctttttcagtcactctctttttttgttgtgttatccaagagacttctaatcatttgcctcgcatcagtcttatgaaagatttacattgttgctgctttatggctacaatgagtcgataccaaaaattaattgcataataatagcatcacacgttgtaaagagctttgcagcatgtaaagcattcacctacctcatttcatttgatccatctaacaactgtattagggag

SEQ ID NO: 197750 - DNA, 671 bp, Homo sapiens
gacaataaaggaatcgatgtatttgttttgtaactcaaagttaaagtccaaatttagaaaatagatttgaaagcataacgggtcaatttctgttgtgcctctgaagaagaaagttgagaaagaacgaagagggcttagatgctggtgggtgtctgcaaaaaagcccagacaatgcctggaataataaagaagcagagaacttccagggaggaagggaacagtctctaagatggagcaggacctggggaagtcttgcttctccactgaagaacatggaccaagaccagggcagaagggatggcagcttccccgtagagcagtgaggacggatgacgacatgaagactggactgctcattctcaccttcccttcacagtccctggcactttttaagctccttggaaattagaggcaatctaggagaaagggggatagaagcagaccttatttctgttacaatgtgaatgggagcttcaaattgaagataaaatgttatggaaaaagtgaaattatatatatattttgcacatcgtagcttggtggctttaggtttctgtgcatcaaaggaaggaattgtgtcttcctcattgtcatactctggtattggagattgtgcaacatatatagtaggtatgcaataaacagctgttaacagaatgaatcaatacttt

SEQ ID NO: 197751 - DNA, 635 bp, Homo sapiens
gtagttaaggaggtgatcggggagtgtgttagaggctgagctgggtgctttggcacacaggtaggtctcctaattgacagggggtgagtgtccgctatgcgcctagctgtgctccagcacacctagcagtggacttccaaggagagagcttcagtagggcagtcacccaggagctgagggtgctacaacttctttttcaggaaatataacaagatattgagaattgtgtttatcagaacatgttttttgaaaaatggagtaggatcctagtaggacctctgagaagcctgctcctgtagcagccaatggtcctttaagctttaagctgctttcatttctgatggctgctttaagaaattatcacaaactggatggcttaacatggtggaaatttattctctctcagttctgaaggccagaagtctaaaatccaggtaacaccagcattggttccctctgggggctctcaaggggattctgttccacgcctctgcgagcttctggtggctcaggcgttctttggctcttgctagcaatgattctagtctctgcttctatctccacatgacctttttcttcgtgtgtgtgtgtctgttttctttttttatttttattttattggttttttttgagac

SEQ ID NO: 197752 - DNA, 730 bp, Homo sapiens
aatgggttctaaatactagttttctgaataatggatgaatgaatggatgaaagatgaatatgtaggtggagcaacagatggataaatagaagatgatagctaggtgtggtggcacatgactgtaatcccagcacattgggaggccaagataggaggagcacttgagaccagcctgggcaagatggtgagactcccgcctctacaaaaaatataaaaattagccaggcatggtggtgcatacctacagtcccagctacttggaaggctaaggcaagagattgcttgggcccagaagttcgaggctgcagtgagctatgactgtgccactgcactcagccttgatgacaaagtgagacctcatctcaaaaaaaaagaggggacagattaagggagaagagttgggaaatgaattcatacgaaaacggtggatactgacttaaaattcagggtttggtgtgatatttagttttaaattctcatacacaacatccttgtgggtgatttagactgagagtctcagtgaaatgagttttcagtcaggatgattaagttgggccacagaatcagtttcccagagaggtctaaaacctgacagaaaatatgtcttgtttttgtctctgctatttggcagaaaaatccctgatgttatgaaagtccaggtattaaattaataaatttttattaagatactgccattgtccccaatgagtatataaaccacaatttcaac

SEQ ID NO: 197753 - DNA, 676 bp, Homo sapiens
aatgggttctaaatactagttttctgaataatggatgaatgaatggatgaaagatgaatatgtaggtggagcaacagatggataaatagaagatgatagctaggtgtggtggcacatgactgtaatcccagcacattgggaggccaagataggaggagcacttgagaccagcctgggcaagatggtgagactcccgcctctacaaaaaatataaaaattagccaggcatggtggtgcatacctacagtcccagctacttggaaggctaaggcaagagattgcttgggcccagaagttcgaggctgcagtgagctatgactgtgccactgcactcagccttgatgacaaagtgagacctcatctcaaaaaaaaagaggggacagattaagggagaagagttgggaaatgaattcataaaattctcatacacaacatccttgtgggtgatttagactgagagtctcagtgaaatgagttttcagtcaggatgattaagttgggccacagaatcagtttcccagagaggtctaaaacctgacagaaaatatgtcttgtttttgtctctgctatttggcagaaaaatccctgatgttatgaaagtccaggtattaaattaataaatttttattaagatactgccattgtccccaatgagtatataaaccacaatttcaac

SEQ ID NO: 197754 - DNA, 361 bp, Homo sapiens
ctgacttgccatgttaaagtttattttattcccagtgaatacaagtatcaactgaagtaatgttttatcggaattttgataaaggtggtatctgacttgccatgttaaaataaagtttattttattcccactgaatacaagtatcaactgaagtactgttttatcaggattttgataaaggtggttaacttgtaaatttttaggtttagtttgtttgtgtgtatagtagtacataataagtaagatacgtggctgggcgcggtggctcacacctgtaatcccagcaccttgggagactgaggtgggtggatcacctgtggtcaggagtttgagaccagcctggtgaaaccccatctctact

SEQ ID NO: 197755 - DNA, 549 bp, Homo sapiens
aggactccagggtccagcttatctaccctggagtggccagaacagacacaggcccatgaaaaatttgacctttgacattccaccaacttctagagagatcaccatgaagatgaaaagttagccaccaacttggggactgcagttttgctcacctttatccaacattcattaccaggttaagcacggtttctaccaagaaatgatagaaaggaggttataaggcaagctccgctggagagcagcaggtgcccctagaaatgccacctgtagagagcgtgtcacacaccactgacacagggagacggaaccactgctggcatcggcaaaaatctctgtctctggccaccagcgctgcagggactgatgtgctctaggtccctgcgagaggagttctcccacctgccatgcctagggaagggtggggttcaagaaggctctagcaacatccacacaacatgcaccacctaaaagaaaacgttggtccaatggaacatgcaccaccactccataaggaggctgtggacaagctcagaatggaccaagattcca

SEQ ID NO: 197756 - DNA, 603 bp, Homo sapiens
tgtctaggagttcctcgatacttggaagcaagtaaaatcttttggctttaaaaacaatcgttctttttattactctatacttatttggcaggtaaagaaaatgttacagtgtttcacataacatctctatgagacccttaccaccataaatgataaaatcatgaatgcttgacaatattttacaacaatcctggcataaaatttttctgggagagtccaatgccactgggcaggggaaaatctataaaaagtacctattattaagaaaagttggaaaaacttccttttgatgcctttctctacaaaaagtaaagctgaggctgggcacagtggttcaagactatgatctcagcactttgggaggccgaggcgggcagatcacctgaggtcaggagttcaagaccagcctggccaacatggcgaaaccacctctctactaaaaatacaaaaattagctgggtctggtggcgcatgcctgtaatcccaggtactcgggaggctgaggtagtagaatcgcttgaaccagggaggcggaggttgcaatgagctgagatagcgccactgcactccagcctgggagataagagtgtgactccatctcaa

SEQ ID NO: 197757 - DNA, 602 bp, Homo sapiens
ccagatgatttagtgtcctgagtgggcctgtagcccttgaagggaagttgtcacttgagttgacttggtaagtagactctcagctccctgaatgcaagagctgagcagataaataggcatttaatatcctaaattgagtgaccttgaaattattcttcgattaagtgagaatcttggtaagcctgaatatagacacctaatggtctatgacacctttaggtggggaaaaactaaacaactctgaggataggttttttgttgctgtttttgtttttttaaatccatccccacatccttagcatccaaaggtgtgcatattaaaatgtcttcgttggccacgtgcagtggctcatgcctgtaatcccagcactttggaaggctgaggcaggaggatcgcttgagcccaggagtttgataccagcctgggcaacacaggaagaccatatctctacaaataactttttaaaaattagccatgtgtggtggtgtgtgcctgtggtcccagctacttaggaggctgaggcaggaggatcacctgagcccagaaggttaggccatgcataccagttgggtgacagagcgagaccttgtctttaaaaaaa

SEQ ID NO: 197758 - DNA, 467 bp, Homo sapiens
gcggggcagacactggcttagctcactgagacggcgtcagtgtgggggttgtatgtgatggtgcagctttgacatgggaaaagggaaaagtctgggctgagagcccgagacaggaaagaccatggtcaggtattttgggcaggtgtctaggcagctaggggggtgacacaacactaagactggagccacgggctggggccccatcacatggagccttccttgtaggccacatggaagatgttgtattttatctcgaaagcagtattaagacattaaaggatttttaacaggtcagtgctataatcagatttaaaaaatattttgtctgctgtatggagtagaaaagtgtatgctaagttattgaaatcacctaggagatgatgataacttggattttgatgatcacagttgaaagaacgttggaacttgagacagagtttctcactttttaatgtcatggcacacgc

SEQ ID NO: 197759 - DNA, 498 bp, Homo sapiens
gtgcaaggtaagtaccattataaggagtataagtaggaaataaagctaagaaagagatcaactgagagacacaagcaagatcaaaggcctctctcactttctacaacattcaaaacacatttgtacaacaggtactaaaccaactatatatgaggttttttccagggtagaggccagtacatatatagatgatactttattacaatgtactgaaggtgtccctcaatcttccactactacatatgtatatacatataagaaatataataagtgaaaagaaacaatcagtaggtaaacaatttaacttcgaaatttgagtaggtgttcatttaaatgggttttcatcggctgggcgaggtggctcgcacctgtaatcccagcactttaggaggctgaggtgggcggatcgcttgagcccaggagttctgggctgtagtgcgctatgccgatcgggtgtccgcactaagttcggcaccaacatggtgaaacccttgtctg

SEQ ID NO: 197760 - DNA, 208 bp, Homo sapiens
agagctgcagtaaacaaagcaacatggaactggtacaaaaacaaactcatagaccaatgcaacagaatagacagtccagaaataatgtcactcacctacaaccatctgatctttaacaaaggtgacaatagaaatgtggaaccaattccctatgtaataaatggtggtggaataactagcaagcactatgtagaagattgaaactgga

SEQ ID NO: 197761 - DNA, 363 bp, Homo sapiens
ggaacaagcaaagtttcaggagagtactgtgaatgtgggtcatgtcagtaaagtgtagggacttgggcaggagcggctggacttgaagagcaggttggtggagaccaggtcatttatcctaagaagtttgccctgtagcatgtagattaaatatcccacgttggctgctggcaactgaactgggcttcctgtttctgtgtttggtttgaccatcacagtgttgaagaactgttgaagtgaataccttgcagtttgctacagtttcccccggtctcccacattactctggcctccttacctcatgtaggttgcctgaccctctgagacctgtgtttgctgttcctgcggaccggctcgagtatg

SEQ ID NO: 197762 - DNA, 409 bp, Homo sapiens
ccgtgaaggtgatggatgtcactcctgtgattatgttacattatctaagaattgtcctagtgggccctaacaagagattcttttgctggccttgaagaagtaggctgacatatcatgagtggacctgggagagggccacatgcaaggaacagagggggcctgtagatgccgagagcagccctggctgacagccagcaagaaagcagggacctgcattctacagctgcaagaaactgaattctgccagcaaccccctgagctttgaagaggatctcaagacccagaaagaaatgcagccagccaacatcttgatagcacccttgtgagactccgagcagaggaccaagctaggccatcttcagactcctgccccgcagaaactgtgagataataaatgtgtgttgtttta

SEQ ID NO: 197763 - DNA, 336 bp, Homo sapiens
cgttaataaacatttattgagcacctactttgtgctaggcactggggctacagccatggacagaagagacaagacttatgtccgggggccaagtgtctgtctggtggggacacataaaccaggagagtgctaggtttcaagaagcatcaaggaggcgggaaagcaggagatggctcaggggtacctcagacctcaggccctcctgcccccatgtctccttgactcaggaatcttggtccctgcctggactatggggccaccagttgtctgactggtcacactactaagggtagcaactcccttctacaagtagggaaactgaggcccagagtagga

SEQ ID NO: 197764 - DNA, 363 bp, Homo sapiens
acgccatcacagttcctactctataactcagggaaaataggaattctatcattagtcaaaggtattatattgattagaattatagtagctgctattacaattgaaatccaaatatcattaccttaacacaatataagtttatttctcactcatataataatccattgctggtgttccttgatgactggggagctttcctccaaatagtggtttagggacacagagttctatctttcagctttgccattccatatgattaagattctacttccgtctggacagaacatccttttcttaaaaaccaagccctgagtgccatattgcttctattcacaccacactgaagaaaattcatctgataga

SEQ ID NO: 197765 - DNA, 409 bp, Homo sapiens
gttttgttataacagcctgcatggattaagacactgtttttctccctttttacgtccccctgaaagatctcctctacttctgtggctttaattcctctacatatgtggatgactcctaaacttacgtctccaacccagtccttcctcttaactctactattatgtgtctagctgcctgcctaacctgtctaattccatgtatcacaggcatctcaaattcaacttgaccaaacccagattcctgatctgccttttctagctctgattctcttcatcatatttcaagttgcagaaaaggggagcaccatttacccagttactgaagcctgaaacctggcatcctcttccttccccaaacatgccatttcagcacatttttctttttctttttcttttttttttttttttt

SEQ ID NO: 197766 - DNA, 403 bp, Homo sapiens
tgactggagagtgaattctgctggtgggaagacggaaattagaacaaaggattgtttctaaacagaatgcctgcacgcagatatgaagatgaggggagtaaatgccttcagcaaaatgaggtcctcatgatactatactgaacactattcatgcatccattccttagaactactctatcaagtaggtactgtttttcatctctcctctgcaagtgagaaaagtgagggactgtgaggttaggtagcaagttccaagtcacaagccacgctggtgttagagatggggcagaccccagccctggaagctgcactgattaaattgcctctttattcatcttagatccccttatgcttttcagtctctaggcaccagtgatggaattggggatcacaggaaagaaag

SEQ ID NO: 197767 - DNA, 308 bp, Homo sapiens
tagagagtttttaatcagacatctttgaatttataactggagttgaacttgagcttatgaacaatttttccaggtttacacaaaaaccagaaagcttaaaaaacagaatgaaatgaatcatttccatttttgatacacatgaacatttttgatgcacaaaaataagaaacatgtttaaatgtcatatgaactagcatttttaaagatcacttcttgtgtgccaggcactctgctcatcagtttatatgcattctttcatttgacttctcaataattattattgttatttataataaataacaaaactg

SEQ ID NO: 197768 - DNA, 461 bp, Homo sapiens
  misc_feature (454)..(454): n is a, c, g, or t
caaaatgtggattatttagtatccttttaaatgcaaattttgataccagtgcatgtaaaagctctacctttttatcaagtcagggtctcactatgttgcccagactagccttgaactcctgcactcaagcaattctcctgtaacagcctctcaagtagcaggcactgcaggtatgcaccaccacacctggctaagttttgtattttcagcagagacagggtttcaccatgttgcccaggctgttaatttaaatctgttttggtctgaactttcaggcttggtctatgtgactatgaataataatacctctcttcttttcttcattaggttcttttcccagccttttttggtctttaaagcaatgaagttatcagcaaggcaagaggaaaatgtatctaattctgtgcttctaggtgtttcgaatactgaatagagcttgcactagaagcattanatatcga

SEQ ID NO: 197769 - DNA, 636 bp, Homo sapiens
gtgaagtgattcatggaggtggggggaagctgatatctttctctgctttgactgctcccaccatctatggcagagcgtctgtatggatgtaccatcctcgcagaaggaacccaacagaagtcacttggagaatgaatccaatgatttcattgtttaataaatgagattacatgaggcaagctctgtaaagtgtctatcacagtccttttaattatagttaacatttccggagtgtcaggccctccatgtatggatgtgcaggttgggcactgcacaaggacactgtgtctaaggggctgcatttctagcacagacaccatatacttgtatttattataacaatttcccaataggtggcagtaaagtgtcttgttctaataaactcagaaaatatgacaactttctgacatggaagtaaagagtcttaagcacatttttctctaattgtcacaaagacaccacatgggctaatagtcctgttgaaggtttacatgaagctctaaaggttatacaggtattaacttcctcaaccctcaccctaacctttagaggttgacaacttttgctaaccattttatagatgaaaacattcagctataggaggtgaaataatttatttaacgtcatacatagtgg

SEQ ID NO: 197770 - DNA, 518 bp, Homo sapiens
aaaatcctatttactcacccttcacaattcagcccaaatgccaaagtccttgtgaagatttttctaatacccttcctcagtcctccaaagatttagagttgttcctctgttatagcctctgttgtattttcccatgtattatgactggatgtttacatgttagctccctgaaagcagaggccatttcattcaactctaacagcttctagcactgtgctatgaatacagtggatactcattcacgttgaaatgcagcaaggattttttaaaaacaacttttgaccagagaaggggctcctagacagacaggcttcctgaatcaaggcatctcccacctcattttcataggacagcgaagaatatggaatcccacatcagaaaatccaagttcattccccgtcatcagcataggaagcattggcaaatcatctaatttctctgtctcagtgccttcatctatgtccatggaaaatgggcataaaaatcaagccatgggcaggcgcagtggctcacacctg

SEQ ID NO: 197771 - DNA, 429 bp, Homo sapiens
tcattattgtgccaaacatccagtattatatctgggtaaccccaaacaattcgattgccttcataatattttctctagcttaaattgttttctatcttctatagcaggaatccccaacccctgggccatggactggtaccagtctatggcctgttaggaatggggctgcacagcaggagatgagcagcgagagaagcttcacctatacttatagcctctccccattgcttgcattactgcctgagccccacctcctgtcagatcagcagcagcattagattctcgcaggagtccaaaccctacggtgaactatacacgtgagggatctagtttgcacactccttataagaatctaggccaggcgtggtggctcacacctgtaatcccagcattttgggaggccgaggcgggtggatcatgaggtcagga

SEQ ID NO: 197772 - DNA, 327 bp, Homo sapiens
tcccagcatgatttgttgaagactatcctttccctatcttagtacccttgttgaaaatcatttgaccatatatgcaagggtttatttccaggctctctagtctgttccattggtctgtatgtctgtctttcttttttcaggaaagtacagtgttcaaactacacagtcttgattactgtggctttgttttaaattttgaaatcaggaagtgagaagcctctaagtttgttctttttcaagatggttttggctattaggagttcctacagattccatatgaattttaggatgggttttatcttcctttcttttttattttttttattt

SEQ ID NO: 197773 - DNA, 355 bp, Homo sapiens
gcaggtgtgtcttcagcactcaggcatagattttattgtgtttaaacaccatggtgaggactgaggactctggagcttctaggttcacagccctgctctgccaccttcaggtgtgtgaccctggacaagtcactgaacctctctgtgcctctgttacttcatctgtaacatttgcatgagagtagctcctatctggtagggttattacacaagttaaatgagacaatgcaggtatctggccccagctccctccctgacctctgctcctagacctctttcttgtttggttccatccaaccacaccagcttccttgctgtgggtcaaacacaccaagctcattcatgcctctgggcc

SEQ ID NO: 197774 - DNA, 305 bp, Homo sapiens
tgcaaagcagaaaaacttggaaatgtacaatatgcttcaagctcccaaattttcagagtaaaatgaaatttcctcctccgaataagaatgagactctgtgaaaagagtatgaactccatggttggacctcccctgccaagagaacctcaatccaagtctacaggattcagccaagcccttacttttagctacaggggaaaaaaatccacaaagtggaaacattttgtccacatctctaaattagcattagcaggcgccaacaaagccttagctatgcttcatttctgagagtgaaagaaggcact

SEQ ID NO: 197775 - DNA, 202 bp, Homo sapiens
gagtcttctaggtgctaaagcaaagaaaataattgtggttcataatgaaattcaaagtatacaaaagataaaaacaaaagcctgccacccggtaggttttgaaggcgatgaggcactcacagttcagctgacatccatccatacgatgagggccagtgtccactctagatccctaagctctgtaggttttgaaggcgacaag

SEQ ID NO: 197776 - DNA, 563 bp, Homo sapiens
agagaatcagtgttcttacagatgtgacccatctcagagagatgtttcaccttcctgctttttaagattcaggtagaaatataaatgcaggaaatcaacttgggtattgaatctactttttaaaaggtcaaatgccaaagccatcattttttatacccaattgccttgttggcttcatgagacacatacttgctcagtgactaccctaacctatgctacctctgtaggtacttactcactctttgcctaatgtcaaactcttcaatctacctggtatgccagcctgagacctagcctgctcccattctgacttctacccagtatggcctcagctcacttggtacttgtgtctggtcctttctctatattctgctattatctgtgaccttggtcctaattctttcaactgagtaacatctcagttgcaaatttcataaagcttaaaaatgtaaataaaagtcataccatccacacacttttcacccttaagacactgggaacacaaaagggcaaactaaacctaaagcaaacagaggaaagaaaataataaagattaagcagaa

SEQ ID NO: 197777 - DNA, 235 bp, Homo sapiens
gagaaggaaagaagctgcataacacagtgtttttctcaactgtgcccctagaggtgatagggcaagaacgagcagtagtcctggattcaacgtccgtaaaaatcagtcgactgaagaacaccatcaaatctttgaaacaacagaagaaacaagtggaacatcagctggaagaagtaacgtgatttcgtttcctcgcgacatgactgctgggtttggggggcactcagacatagag

SEQ ID NO: 197778 - DNA, 375 bp, Homo sapiens
acatcatacaccataaatatgtataatttttatttgtcgatgaaaaaaattaattaaaattaatggataaagacacatgcagaaaaaaaagaaactaaaaagagagagaactccctgggactcagacccaagagtacagtacaggctgtaattccttaacttctccaaaattctcctacctgccatggcaggtagacaccctatacaatgcgcatccaaagaagggagctgctgagtcaatggaaggtaacagatgagccccctttaaagattggtgtgggtgggaagactggcaagccaccgctacagctgcagaggctgccaaagcctctgaaaagggaatgtgaatcctgccccctcgatgtcactgttgct

SEQ ID NO: 197779 - DNA, 594 bp, Homo sapiens
tgtgtcagactaaagaaaagtagtagttaacaggaaactctgttgaactgttctttaaaatgttttcagaaagttctgattaatctgttataggttagctaccaggttgccaaaccatactaggtatattgtaccacaggccagttgagttttctgtagcaggtgaaatagaaaactgattccaacaaagaaattgctagaatattaaaccttcaaaggacttcagaggtcatgttcactgacctctttaatacctgaggaaattcttaagttaatgatatgaagtcagagagttatcaactaacagtgctcagaccaaaactgggatgcctgactccctatccaaatgtgctttacactcatcatgatacagatgtaaaaccaggtattttctattttcttctgctaacgaattgataggatgtttctaatataagtattgctacgatcgttctttttgaaaattattaattttacacagtgaaagcatgtttttccaagttaattatctgaagtaatggaccatttatttcaaatgattggtacataatatttaacatttccaatatccatatctccacaatagaaacttgg

SEQ ID NO: 197780 - DNA, 376 bp, Homo sapiens
tctatctcggctcactgcaacctctgcctcctgggttcaggtgattctcctgcctgaccctcccgagtagctgggattacaggcgccctccaccatgcctggctaattttttttatttttagtagagatgaggtttctccatgttggccaggctggtctcaaactcctgacctcaggtggtccacccgcatcggcctcccaaagtgctgggattataggcgtgagccactgcgcacagcccaacatcacaacttttaaccctggtcttcctctattgtgtcagtaagagcatttttaaaaatcagaagtttgagcatgaataagaattttgctccaagtgatactatcaagaaagtaaaaaagcctactcaaaagg

SEQ ID NO: 197781 - DNA, 541 bp, Homo sapiens
acagccctggagaaaagtctgtttacacttggaaagcttcaagtcaactcaaataaagacagccttgagaatgagatcttccagggaaccaacagaaaggtcaaatgctgacaactctctggaaataggcctttgaaggcactccatccctattctgccccctccagtggctgctggttttctctgtaattgaaggctgcatatcttcaagactaccatggagaccaggggataagggtatgtatggaaatagggcaaattaaaacatcataaaactcattgttcttatgaagattcagacatttttcttgagcaaacacttctcgagttgctgcaagcctttggttaacttccagagtcctgaaaagttgattctgacagtttttgccactgttctcattgcttgtacggaggtgggaatttttgaagatccttactccctcattttcacagatgtcactctcttattttatttaattttaattaatttagatttaaatttaaatagccacatgtgactagtggctactgtattggacag

SEQ ID NO: 197782 - DNA, 897 bp, Homo sapiens
ttttggacagagtctcaccctgtcacccaggctagagtgcaatggcacgatctcgcctcactgcaacctctgcctcctgggttcgagtgattctcctgcctcagtctcctgagtagctgattacaggtgcgtggcaccatgcctggttcgttgtttttttttgctacttttagtagacatgaggtttcaccatgttggccaggcttgtctcaaactgctgacctcaagtaatccacctgcttcggactcccaaagtgctgggattacaggcgtgagccaccatgccttgccaagtcttaatgtttctttacaagagagtgaggggaagctccctgtactcaatgagacgtgctagcctccacaggccatgttcactccaaggacactcatgggctactgaagccagcactgagtcgacagacccccttcctctgctaatgctccccacttctcagtccacctccaggggaaccgacctccatcaggacaaactcagcagggatctgcagcctaaggtcaccctggctaaaaaaagctcaaccatgacacatgcagttgttgaagctgccttaaatactgcagaggcagactgaaaagcccctttcaaaaggaagagaaagcatctgtgggcagggggagttcagcgtggctgctctgagccaactctgtaactgctgaagacaaacagcggcactttgctgttctaaggccctggaatgactcagccatgcagctggggcaaacacactcatccgctgcccgcctgcctggctccttagacctctgaataccagggaaaggttggaaccacctaggttgggatcaggaggtccaaagcccacctatgcagggaaacacgaactcctattctagggcagggcaggcagtctcacctcc

SEQ ID NO: 197783 - DNA, 157 bp, Homo sapiens
catgaggtgactggggaagggagacctctcctggcagcatttctaggacccaacaagatctggaggtgccggctctggttccatctctaatcccctgctgtggcctggccagtgtactgcccggagctggaaaccaataaacctgtgatttgccccc

SEQ ID NO: 197784 - DNA, 432 bp, Homo sapiens
gtaggtgggaagcttggacaagccccaaatgcctcagggacctttctgtattttttttttgagacaggctcttactctgtcgcctggactggcatgatctaggctcactgcaacctccacccccctggctcaagtgatcctcccacctcagcctcctgagtagctggggctataggcatgcgtcaccatgcccaactaatttttttgttttttggtagagacagggtttcaccatgttgcccaggctggtcttgaactcctggactcaagtgatccacctctcttggcctcccaaactgctgggattataaatatgagccaccatggccagctgatttttttgtttgtttgtttgagatggagtctcactctgtcactcaggctggagtgcagtggagtgatctcggctcactgcaacctccacctcctggg

SEQ ID NO: 197785 - DNA, 494 bp, Homo sapiens
cagcgtatgctgtcggtcgacctagcaggatcccccagcaagaatggcattcagcctgctttcaatgcctatggctgggcgattgtgtcccagacattctaggctcagtactttcataaaggcacacatgcagagaggggcgaggacctgccggtgagctttatgcatgtatgaggcattctcagtggatgtgggccatgctagaagatgtacacaggaagattatttgattctaattcatgccacttgatatactgtaagatgcacatagactttagttgccaataaaattggctggcaacctgggactgcttcaggtcagacaccaaggaggtggtacttctgttccattttatagtgttagccccagaccattgaagaaaaccaggactcagttgaataattactttgggggtcttaactgaacaactggttggagggcatgagggaaggtgagggcatttgagggtaggatggagacctgagcaagccag

SEQ ID NO: 197786 - DNA, 142 bp, Homo sapiens
tcagaacaaagaaaaacaaaaccaagttaagttacagctttctgccaggaccctggcactatggggggtgggaaaccaagcagaacaaggtagtttcactgaattgagatgacagaggtgggagttttcaggctgaggtggg

SEQ ID NO: 197787 - DNA, 449 bp, Homo sapiens
caggagctctgtgagcccgtgctcaggtgcacacaacagaagtactccgctgacgcccacccctttcactcagctctcggttcagtcatcgccaagcaactgagagcctttgtgaagaggcttcctgccctcttcatcttccacagacacgctcttcttccttaagcccaggcatacacagacacagtgaatgcacacacaaagacacacaccagtgtgcacactgctctggaatccacaggttctataaatatctagaaatgatatctgaaagtgcattgttatatgcgctggtctgtgatggttacggtgatggtgattcctccttccggaggatggcgcggctgcagccagagggagattaggtggcggaggcttcgatgaccatttacattttacgagtacttattttgagtgtgtatttggaaaaattaaatttgtatatcaag

SEQ ID NO: 197788 - DNA, 328 bp, Homo sapiens
ggaaggtccagttgctgccatctggccacctctgcatggagcccccaacagctgtgcctcagaacagatccgaagtgactttcaggggagctggacacatgtacgctggtgcctgctgtccccaccctttggcactgctgctctttctttttctgagatggagtctcgctctgtcgcccaggctggagcgcagtggtgtgatctcggctcaccgcaagctccgcctcccgggttcacgccattctcctgcctcagcctcccaagtagctggggctacaggcacccgccaccacacccggctaattttttttgtatttttagtagagac

SEQ ID NO: 197789 - DNA, 508 bp, Homo sapiens
tgtggcaccctgtctggctccttacgtgttcttcaggcttgaaggcctcttttcacgtgcaccggcatccactcaggtgcctgcttccagaagcttcccagcacccactctgctgacagccaagggcacaggactttgatctcttctgctgcccttgctgggttttgccttgcggcttaggtctttctatttctctctctatccctcactgtcggtaacgcctaagaaccaagtttacttaatggtgtgtgtgtgtgtgtgcgcgcgcgcgtccgtgtgcgtgctcatgtgtgcgtgtgcgtgtgtgtgtgcgtgtctttctttgtgtatgtgtgtgtgtcgtatctggcacacggacctgtgattaccagcccgcgtgaagccaacaaatgccctgagttagaatgcaaactttcaccaaagcttgcaggagctcgtaggaggtgaactcaaggtagttaacccggtcatctcatggtaattagaaactctgcttggcaggtttaga

SEQ ID NO: 197790 - DNA, 413 bp, Homo sapiens
ggagaacgagagttctttatttattgccatgaatctttgagacttgctgtgtgttttctaatgtatgctcaaagtgtaagttacaatagaaaatagaaaattggctgggtaccatggctcacagctgtaatcaatcccagcactttgggaggcggaggcgggtggatcgcttgagcccgggagtttgagacaagcctgggcaacatggcaagagaccatctctacaaaaaatacagaaagtagctgggcatgatggtgcatgcctgtagtcccagctacttgggaggctgaaatgggaggatcacctgagcccgggaggttgaggctacagtaagctgagaggctcactaccctccagcctgggtgacagagaccctgtctcaacaaataaaaaatagaaaaaaagaaacaga

SEQ ID NO: 197791 - DNA, 582 bp, Homo sapiens
attccttggagtttcttacatgtcccagtaataaactgggagccaggagtgtaacagaatacactgagagagagtagcttatatgtagcacactgaaaggaatagtccccaaatctctaaggatcaaactttactgatattgtatctcttagaaatggggtgttatatgggtaactaagtttttgctccattacgaaacccagaatcctttctgatcttgatctaatgaaattatttattcagcaaatgttaagtatttgctaatcctagattctgtaattggttctttggttaagacaaaacaaaaaccttgtacctcagaaactttaaatgcacccaggaagcaacacagagaatataggtgctatgagagatatacacctaggatggcgtggatgcaacccagcaagggaaagggaccaagtcacagtaggctgtgaagaaaaagtgcccaaactgagggctgaaggatgaaacgtagttagcagatgactgatacagggaagggaaagtgcttttctgctagaaaagcagcagcatatgtgagggtctaggtggagaaagagcatgaccctccaggac

SEQ ID NO: 197792 - DNA, 330 bp, Homo sapiens
gataaaatacagtgaccaaatagggtttattccaggtatccaaggttggtttaacatttgaaaaccaatgtcatgtaccacattagcaagagaaagcatatgatcagctcaatagatgcagaaaaaacatttaacaaagtttaacatgccttgctgatgaaaactcagcaaactaggaaaataagggaacttctcaatatgataaagggtatctgtgaaaaaccaatagctgaaatcatagttaatgctgaaagactgaatgctttccctatataatatttagaacaagtcaagatatctgctattcccaattgtgttcagcattgttct

SEQ ID NO: 197793 - DNA, 116 bp, Homo sapiens
tcttttaatttccagttttcatgcattaccaactcatgattttttttccacccttaaatatgaaacttgcactgcttttaacctaccacattaccaaggtcagaaacagaaccact

SEQ ID NO: 197794 - DNA, 719 bp, Homo sapiens
gggctgccctgtgccttgtaggatgtttagtaacatccccggtctccgttcattcactgatgccagcagcaccctccacacccctccccagctgggacaatccaaactgtccccagacatggccaagcttgtccagggggatgaagcctctctggatgagaagcactgacctggacagtgcggcacaggtttgtgctgtgtgcttgttcgccatggcctgcatatcccagctctgtcccgatggcatggagcacggcggtgtaccctccacccggagttgtcaggatgattaggacgccccatgctcccaaggctttccgcgaggctgtcatgactacacaaacatcctgcaaagatgcagctttcagcccctgcagcaccccgatccattgcccctcagaccctgctcaggggcaatccacccctagtgagggcggaggaggtgggggaggcgctggatatgaagccactgtgtaacacacaaagcactattcagaaatcagtgttactatctctccctggatggcacagagtggattaaggagcaaagacaaattgctgggctcttgcgactctgacctctgggtcatatttgcttctctgcgaacaatgcagattgtcctcctgcaagctgtttacagctgagaataagcagacggcgaagcagttagtctccttcaaccttggctgttgcatccttaaccaatggtaacaccttc

SEQ ID NO: 197795 - DNA, 562 bp, Homo sapiens
cttttgtttttgctcatcctgttttactaccaccttgcctgctgctggtgagcgtataataaatatttttttgaatgaacaaatgatttagctctatcagatgggtagaacttctatcctagagactgaagtaaaagcagcctttcggcgagagaggatggctttgttttcagcattaatccagtgcctggagattattacccagctcaagtgtctgttctctgcaaagcgactggtggcctgtcttccttttccctctagggacatagtactctttgaaatggccctttccccctggtttctttgctttctgacatattagtataacttctaatgggcgccttctaaaacacaagtcagattgtcccactctcctttaaatttgcagtggctccttaagaacacagccttaagggcatggtgtctcacgcctgtaatcccagcattttgggaggctgaggcaggaggatagcttaagcccaggagttcaagaccagcctgggcaaagtggcaagacccacccgttcctacaaaaaaaaaaaaaaaaaaaagcaaaaaaccc

SEQ ID NO: 197796 - DNA, 359 bp, Homo sapiens
ccgaagtatcgtgaaaggcatacacttattgctattattcatatacaaacatacgttgacatctagtgggcaccatccttccctttggacaaggtggaactacttatgatgctatcaaacaataggagaaaacaaatgaagcagtagatggccacaattgctaatagcccgaaccagttcataacagcaaccataggagtgaggccaactctcctccagtccatggtttcttcctggtagcagtggttataagtaggacattacagatcgtgaaatcttggtttatttttattggctatggtgactccatttggaggagcagctggtcctgggctcccagagttttccagctgggggac

SEQ ID NO: 197797 - DNA, 485 bp, Homo sapiens
ttatagagaattttatgattctgggttttattgttgttattggtaattggatgatataaaaatttttcagtgattttgtcttcttgctaattagaaatagtgatgaaagtatctttttgtattacaaggcttttttttcctttaaacaattgtacacattttgtattttttttttttgcttttctccatacagacctttatgagaatggattcattgtatcccgtaatttgctattatagtatgtaatgaaaatgagatattcatcattgaaaatcacagcaaaaggcaatgtattcctcattgatagatagcagttgttgataaatgctaaatatgaatacattttacttcatctaaggatttatgtagagaaaataaataatatttagccactgaagaaagtttccactgtaatgtaagggactcatcactccaagtctcagaggaaaagcaggcctgtgagatgatttattataaatataaa

SEQ ID NO: 197798 - DNA, 256 bp, Homo sapiens
ccccaggcttattcatgcatctcccccgttctgtgacaatggtggactgctaaccaccactacagccctcgcagtcaaatgcaagctttagagtcaaacgtagggatagtctgttatcacagcttcatgagaacttcttggacagtccagaaattaatatgaaggaaaatgaccttcccatgattcctccatagggtgaggggtggtggggagtctcctccccatcctttcacagcacatggcttgagcttctggt

SEQ ID NO: 197799 - DNA, 122 bp, Homo sapiens
tagaaatattcatctctatgaaagcatattatggttataactgaaaaccttgttattaaatataatattagttaaaatattaaacataatgttattctgaatgtatttgtaaaatatttcct

SEQ ID NO: 197800 - DNA, 613 bp, Homo sapiens
cccaggcggctttcccagggccaccacaaggacagtcatctaacttgcccccaagtgatttgggccaacccatggccactgcagaagtgactgacagcgtgttgtagaaatcccaccacaccaaaagcgggggcggaagagttccccactccctgatagtgggctgctggctagagaaggctgtggccctgacagcctgacattctgctgcccccaaagcatgggggcaagacactgtcccctgagcctgtgacctgctgcatcctcacctcctgggtgggggtccaagccacgttccctctctgaagataacaacaattgcccacagcctggaccgcatgtttgcagtgggtcatggagtttctgaacagcatggcctagtggacagaatcggaacacaaggtgtcttgaggtgaagtctgtggagcctccactatgtgtgcaggagaaaaaaaaacaatcagtatggacaagactttcatgacttgccctggaccaaagattaaaaacaacctggacagaggtctttgttgaagccagcctgaacaatggcagaaatgtcctttctaatgacatcactatgaagagcaccacctgtgtgagtaccagggtg

SEQ ID NO: 197801 - DNA, 1020 bp, Homo sapiens
tgtgaatctccgcataaaggtggagcctgcatgacctaaacacctcccattaggcctcacctttcaaccctgttgcattgggattaagtttctaaaacttgctttttggaagacacgttcagaccatagcaatattgaactaatttcttcctttgaaaaatctgcctttttggttctagctctatcctctgtggtttcaaggatatgtttaaatatttcatatgttatcaaggctaattatttataaagatttatgcaggagcatttaccatgggaatggttttaatttagatcataatgaaatagttatttcaagccagtttcctttctgtatttatatatgtttaggtgtgttaagactggattgaaagtctcatttggtgtatatatacacgtacaaattcatatgtatgtaactatgtttttttaaacattgattgcagtttacagcatttattcatatattcattcattatgtttgctgagtattttctgtttccctccattagaatgcaagagacaggtgcctagaacagtggctcatagtaaatatttgttaaatgaataaaattgatttaatatcttgagaacttttctgtgtgatgtattggctaccagaattatcactgagaggttaggttgtattaaagattgattacacagctgattagtagacgaattattactagaatccaattattctcaatattgctctgctgaattcattgctgcagaatgtaatctttgaaaaattctaacatatacttaatatttttggtgaaaattaaaaattgaagtatatcatacaaacagaaatgtgcacacatcttgaaagtacagcttgatgaacttttccagagtattggtccatgtaattatcacactgatcaatatcgataaagaacatttcctccctcatgtgaccttcctgtctttacccagatgacttttgtctccataggttagatttgccagaagtgtgtattaatcaaaagcgtacttatagtaagtactcttttg

SEQ ID NO: 197802 - DNA, 435 bp, Homo sapiens
tcggtgacatggtttcctgagcatgtgcgtcagcccttggagatgtccagcgtaagtcaaagcctttgttccctacgataaccttgagagatgactcagtagagaagaaggcaggctgtggggtgggggaaatggtcagtgcagctacaaatgagagcctgttcctggctcaaggggaggacaaggcagaaaaacaacaacagtaattaccattccctgttgtttccctggaccgacctcccctcgtcctccacccggatgatcctgaggcctaactctcctctctgtcctcaccctgcacccattcttccccaccatctgttttattatttttttaattccactttatggagaaatataacttacataaaataaaacacaccaattttgagtgtagagttcaataaattttgataaaatgcttatcaaatccta

SEQ ID NO: 197803 - DNA, 1058 bp, Homo sapiens
gacggaattctcctaaattcgaagcttggaattctcctaaattcgaagcctgaggcagaatggttgaagcaaaaagaggagatttgttgtcttatgggtctgaagggtcctgaatagtgtggtgtcaggcacagtatctctttatcaaacaatatctctttaatctctgagcttggccgggcacagtggctcacgtctgtaatcccagcactttgggaggccgaggcgggcggatcattaggtcaagagctggagaccatcctggccaacatggtgaaaccccgtctctactaaaaatacaaaaattagccgggtgtggtggcgcgtgcctgtagtcccagctactcaggaggctgaggcaggagaattgcttgaacctgggaggcagaggttgcagtgagccaagatcacaccactgcactccagcctggcgacagcgagactccatctaaaaaataaaatatctgagcttggctttcctctgagctggcttcattcgcggaaggctgttccctcctgatgggtgcagggatggctgccagtagctctagaaatgggatgcagtcttaaccaccctagtgggaagagagctcctctttcctgagagttccatctcagggcgtaggaccggctgtggctggctctgtaaccttcctgtccctgaccgatcattgtaacagaggttgtgggacggggcacctatccactcctagaacctttggggaggacagcggggagtcaaggtaaagtgaagaggcctatccaggctcctggggtgagagagattgggtgaccaaggctggtccacccaggggaagacaggaagagaagtgggccattctggcctcagacctcttcgtcctttcccagaccccacgccaaggcagagctccctgtgggatgagtttctcacttgacctgaaatctctacttgtggggctgctgcaagtgcacaggcttcaggaaaggtggaccacaccccctgtgccccaggctccttcccgagggtgtgcagcccaccatccagataggggtggatggtgcccaagtcgtggggg

SEQ ID NO: 197804 - DNA, 435 bp, Homo sapiens
caggagaatcgcttgaacctcggaggcagaggttgtggtgagctgagatcacgccactgcactccagcctgggctacgagagtgaaaattcttctcaaaacaaacaaacacacaagcacactaaagttccacactttcagttaactatatgtgggcatggtctttgggccccgcagagtgcagttgtgcacacagctatctatctgtttggctccacgtcttacctttctgatggatgaacctaagtctagagtttaatggagataaagcatcaagatggcacacagtatcaagaaacagtatgcagagactgtgtaaggaaatactcctttttacaaataaagtatactatatttggatgattatgtaactttaccattcaaagatggagttacaagaaaccttttgtgttatggcaacacgaaactggctttt

SEQ ID NO: 197805 - DNA, 589 bp, Homo sapiens
atggtgcacaaggagcaacatgagaacacttcgaatgaggaattacaaaccaggacggtggaaacaccgcacacacgcacacacactacaaaacgcaccgtgtttacccacttaggaagtgaggaaacagtgtagcgggaagtcagggaccccgaacggagggaccggctgaagccaaggcagaggttgtggtgagctgagatcacgccactgcactccagcctgggctacgagagtgaaaattcttctcaaaacaaacaaacacacaagcacactaaagttccacactttcagttaactatatgtgggcatggtctttgggccccgcagagtgcagttgtgcacacagctatctatctgtttggctccacgtcttacctttctgatggatgaacctaagtctagagtttaatggagataaagcatcaagatggcacacagtatcaagaaacagtatgcagagactgtgtaaggaaatactcctttttacaaataaagtatactatatttggatgattatgtaactttaccattcaaagatggagttacaagaaaccttttgtgttatggcaacacgaaactggctttt

SEQ ID NO: 197806 - DNA, 458 bp, Homo sapiens
tacaataacttggagagcaggatgctgtcagccccatttcacagaaaagccaactgaagctcagagacatttaagttgtttgcctaagcccacacacctagtaccagctgcctgactccaagcttcagctcttttgagtcaactctgctgagaaaggagtgggaataaagccatctcctgggggaagggagggtgtttctggaatgcgaagtattttaagctccttcctagctcttttctacagactcctacctctatctttgtctgaaaatagtcaggagtttattcctggatttcagaggacaatttctacaaattaggtttgcctctgaataatgcacctaagggatcacactcccaactcaggacatagacaatacggggtgacccagaagccacacttggtgtagcaaagagagaaggacatcatctctgttagacaataaaaggctaaagtg

SEQ ID NO: 197807 - DNA, 317 bp, Homo sapiens
tctgttccctccctactaatgtcccacctgcaagtctagaagagtgtcacttgctgtctattttactacctacaggggcttccctaccttggctctactgtgatatagtaatgtgccaggccgtgttgtaagcgcttgatgagtattaatcttgatcttaactctgttttgactttctccttgccttctctaaatggcctttcctgttatcagtcagttggggtccagcagataaacgtgaatgttatttcaagccagatgaaatttgaaagtcaaatcaatcccaaggccactctaatgactatgaaagaattaca

SEQ ID NO: 197808 - DNA, 547 bp, Homo sapiens
gccttccctttgtgggtaactcgacctttctctctggctgcccttaacactttttccttcatttcaaccttggtgaatctgccaattatgtgtcttggggttgctcttctcaaggagtatctttgtggtgttctctgtattttctgaatttgaatgttgggcctctcctactattctaagtcaccatcacctgtgcatatcctttctagcacccataggttgtaattatgtgcttccttgcttacttgtttattgtctgtattttccactagacggtaagctccccaagggcaggcactgtgtttccattcaccactgtaagtttaattgcaagcacggatcttgacatatactgtgcactcaataaataatgtgccaaatgaagtgaaaggtggcaagacacatgggtctctgcctgacacacagctgctgtggggatgctcaggtgcacacctcattggtatcttctcatgcaaagctgcgtgcacatctgagaagggtatctgagaacactgctggtgcaggttctaaatgccacaggctggat

SEQ ID NO: 197809 - DNA, 435 bp, Homo sapiens
gcgctatgccggtcgcttccagtcaaccccggtcgcttccagtcaaccccgcaccagttggcccagctgggaaatgcggtcaccgtgaggattaagttagtaaaatggtacacagtgccttaaacagtgaccggctggccgtgtcaaattaccaggccgagaccagcctggagccgcggcctccactcccgcctagtgcagtcccgggccctcccacaaggaggtccggcccccggggttgccttccagccagttggggcttttgcccattttcctatcgcctgccaccaagctgctgctacgtatcccggctggaatctgactacccctccagcaaagtggtggggggcgggcccgggtcagggaggccacatcaccagcttcctgcaggaacttctagaaggcgagcagcccggaaaatggcatgggcggccg

SEQ ID NO: 197810 - DNA, 659 bp, Homo sapiens
acagcatagagatagatataagaataacaggcctgatgcagtgtctcttgcctataatcccagcaatttggggggctgagacagaaggattcctttaggccaagagtttgagaccagcctgggcaacatagcaagacttaatctctacaaaaaattaaaacataagccaggtgtggtgatgggcatctgtagtcccacctcctgagtagctgggattacagtggcgcaccaccacgcctggctaatttttgtatttttagtagagaaggggtttcaccatgttggctaggctactctcgaactcctgaccttaggtgatccacctgccttggcctcccaaagtgctgggattataagcatgagccaccatgcccacctgtaaatatttttattattttctaaaaatctgctcatagtatctcacaaattatctgttcctatgtaagggcagatcaaacaaaaactttaaagagtcatttttttttttttactcctaagccatataaaatactcataaaattatgattatagagtactattttattttaccttgatttattattacatagagtctgtgaaattcttcattacttttgaaatactatttaattaaactttagtgttctgacaaagaaagaatgagggggagttcttttctg

SEQ ID NO: 197811 - DNA, 525 bp, Homo sapiens
tcacaaccagaatgaatataaagtaagccaatgtacaaagaagagtgacttaaagcaggatctcacatgagacaagagagagtccaagacagaaaattccccatttgcagttatgtgttccagactggagaacaggctgaagtttcataagaagacctggtgagccaaggactagattgagtcatatgaaatcactgatagtagacaacttctggaatacaagaatggcaatgtcatatggtttaacctaatagttggctgggaatggtcaagacaagcttcttgaagaacataaagaaggtggggcttgcactagcttgggcttggataagtaagaatatataagtaggcttgggagaggaagtatggaggcaggaagcaggtgacagggttgggtggagctggggaggcacaagtggtgggtcaggaccacccatcatagttccaaaggggcgttttggggtggagaagacagatgctgcttccctgctgcccatttcgtattaaaatgttttcctcattatg

SEQ ID NO: 197812 - DNA, 689 bp, Homo sapiens
cgacccctgcaagactgagaactggccagaattgcccacttgctagactagcaagagagcgaagtcccagtgggtacccccgacgaaggacacccgttccttaccccccacccagaggcacccttcctcctccaaacacaagatgctgctccagcaggggcagggaccatgtcagcctcccacaagacacacacgggaaagccctgcttgtgagggcgccacacccagggcaggaatcagaatgaagacacgactccacagtgagcacggggctcgggacaggacccagcgtggcagaccagccagagaagctttcacactgcaaacagcccgctccacctacaccccgactgggctccacgactccccgcaagtgccctgccacctcaggcacctgcccccacgcccactcagcgtcaccccctcggcggttcatctccagaaggcttggaattgatgacgtttccgcaccacgaggggcttttgcgattctgcgtcactgaacttgcatctcatccccacgatccgacataagcttgccaaggacaggacctcgtggcacccgggacaggggccaccccatcctacatgtgacaaagctgtccctccgtggagctggcgtctctgatttcctcggcctgagggaggcagtgaagatgaaggaaggagggagggcgccttggtggtgg

SEQ ID NO: 197813 - DNA, 856 bp, Homo sapiens
ttgaaccccaagtttttaggtgaatctctccagggccccaccccgtgcccccagaccttcctccggttcccagagattctggcgccaagccatccgtggctctcatgagattatcctggggaaatttagaagaattttgtggcccgtccccagctgtgctgataatttttaacaccctaaatgctactacccataccttttggtaaatacccggaaagactggctgggcccggtggctcactccctagtctctactataaaaaaaaaaaaaaatacaaaaaattagccgggcgtggtggtgcatggctgtaatctcagctacttgggcagggaccatgtcagcctcccacaagacacacacgggaaagccctgcttgtgagggcgccacacccagggcaggaatcagaatgaagacacgactccacagtgagcacggggctcgggacaggacccagcgtggcagaccagccagagaagctttcacactgcaaacagcccgctccacctacaccccgactgggctccacgactccccgcaagtgccctgccacctcaggcacctgcccccacgcccactcagcgtcaccccctcggcggttcatctccagaaggcttggaattgatgacgtttccgcaccacgaggggcttttgcgattctgcgtcactgaacttgcatctcatccccacgatccgacataagcttgccaaggacaggacctcgtggcacccgggacaggggccaccccatcctacatgtgacaaagctgtccctccgtggagctggcgtctctgatttcctcggcctgagggaggcagtgaagatgaaggaaggagggagggcgccttggtggtgg

SEQ ID NO: 197814 - DNA, 576 bp, Homo sapiens
ggtggagccaggcagggaggcattgggaggatttagccccttgtaatacctatcatctttgcccttccttctcttttacggactactgatgatgcagtcagtgacagtgctgtgagtggggtgcagtgcctcacacctgtaatctcagcattttgggaggccaaggtgggaggattgcttgaggccaggaattcaagcccactctgggcaataagcaagaccccatctctataagaagtttaaaaatcagcctggcatagtgttgtgttcctgtaatcccatatactcaggaggcctaggtgggaggatatccggagcccacgaggttgaggctgcagtgagctgttatcatgtcactgcactccagcctggatgacagagtgagaccttgtctcacaaaaaacaaacaaacaaacaaagaaacggccgtgtaaacacagcctcaatcacccattctttccaccagcttgcacccttagctcagaccaggggtccacacagaaggcagggattctagtgatgaggaggttggaatgatagagctggagaaagggcaatatctggcagagagggaaa

SEQ ID NO: 197815 - DNA, 742 bp, Homo sapiens
tacaagtgggtgttgctggaggctggagtttggtctgatgttggcctgaaatacttttctctcagagagcaagttagccttatatctgactacaagtaggacaaggagtgaatagagcaagcaagcacaccagcgttccactactttccttgagtttttcagcgctctgctttttttattttggtatttttttttctattttaatttattctttctttcttcttttcttccttcctccctccctcccttccttccgagtttcactcttggttgcccaggctggagtgcagtggtgtgatctcagctcactgcatcctctgcctcccaggttcaagcgattctccttcctcaacctcccgagtagctgggattacaagcacccgccaccatgcccagctaatttttgtatttttggtagataatggatttttgccatgttagccaggcttgtcttggactcctggcctcaagtgatttactcaccccggcctcccaaagtccttggattacaggcatgagccaccttgcctggctggatttttcatctttcttttagctctttatttgggagtgtaaatttgaaaaataaaagaggtttatgcaaaacaggcaatgaaacaagaagaattgggtttggagttttatatctacttctattgttaaattacagtataagccaacacaagttatttccactgtaggttttggtatccttgtgtgtaaaataaaataaaaagctgat

SEQ ID NO: 197816 - DNA, 132 bp, Homo sapiens
cctcagtggatatagaagtgctaatatctctttgagattgtgatggtgattcttaggataaatactcagaagggagattgctgaatcatacggtagttttgtttttaattttttcaggaacccacatatttt

SEQ ID NO: 197817 - DNA, 389 bp, Homo sapiens
tggaaacctctgcatcatgagagccaagtggaggaagaagcgaatgcgcaggctgaagcgcaaaagaagaaagatgaggcagaggtccaagtaaaccgctagcttgttgcaccgtggaggccacaggagcagaaacatggaatgccagacgctggggatgctggtacaagttgtgggactgcatgctactgtctagagcttgtctcaatggatctagaacttcatcgccctctgatcgccgatcacctctgagacccaccttgctcataaacaaaatgcccatgttggtcctctgccctggacctgtgacattctggactatttctgtgtttatttgtggccgagtgtaacaaccatataataaatcacctcttccgctgttttagctg

SEQ ID NO: 197818 - DNA, 366 bp, Homo sapiens
actagcctatcgctgcaggggcgccacgccggagttctacggagcatatagaagtaacatggactgccaattccggggattagggtatgtaagtgtgctgtgtggtcagcagtgtgcaagggcatgctgaatcttagagcgaaagcgtatgatcactgcgcccgcatcgataaagggatggccatggctagggtttctagatagttgggtggttgttgaaatggtcgccaatccgcggattggcgcccatttcaagggaaacaagcagggtacagcagcaataggataaggaggcagaggagcatatatttacacaggtggtttgggaaggcctctctgagtaggtgacttttaaatggaaatcta

SEQ ID NO: 197819 - DNA, 599 bp, Homo sapiens
ttggtctagaaagtttttaggtacaattctgtgtggctaacaaggcaccagttagcatattttgagcttgaaattgtcctaataaattctctaaaaacagcaaataagcataatagcgttaaggtaggtgtcagtgagtttctatgccaaggtaggaataatgttttaggtaccaaagccttttgtccccattttccatcatatgaacaggattccctgttatttaggcaatgatctattatattacccttttcctataggtgtgagtggtggtccagatggagaagttcaatagttctgattgcagatcctatgcaggagagataataatctttgtctcctgggttaagctaaggctggcaaagagacaaatgtcccaagccttctaacaaccagtggcatagtttatgttgtcctggatgctggtctggttgccaaatatggggaaggaaatgaggggctatataggaggcaagccagaggcttatatcctacgtggtaatggtcatgaagggaaaagaaaaaagaagcaaaaagcagcccaagaaatcacttattttctaacaaagagcagcctgaaagatcgagctgcagacata

SEQ ID NO: 197820 - DNA, 481 bp, Homo sapiens
acagctgctgcttcttgaagtaagcgtcagcaggatgttttgggatttttacattgctgattatcaattttggttgaggtggcagtgacagatttctggcgtgttctttgtagaggatcttggttgaagaccggaggtccagtcacaagtaacaagccactagccagcagcttcaggaaaaccacccttttgcctctgtggtgctcagtgagggtgatcagaatggtcccaggggtgatgctggctcacagttttctcatgtgctgactgaacggtttttttgccgtggctcaacagcttttgaggcacatcttcagtaggataatatctaggcattttgcgatgtttaaccacctgggtaccaccgttcttgtcaccaccaactggttttgtaatagttgcaagaacttctttttcttttcaaccttggattcagcagctgagtgcttcctcttgtacatggcctttctggaatacatgg

SEQ ID NO: 197821 - DNA, 702 bp, Homo sapiens
cgaatatttttgactgaaaaattaatagcttttgaattcatacacagcaggttttcttttgcaaagaagtccaatatcgctgcacagcacttctataaccatttatttagagtccaagtcaaacctttgacagctagagcagcgctacaagccaatataaagaactccaagatgtaaaccaacaataggccgtctgtgtgaggtttgccattgtcaaatacatagattgtttggattagtttatgtaaatgtactgttgtattaccctttgaaaaaaaaaaagatcacatttgtgtatgaaaagtggttcccttcacaggcagcattataaattccttatcctttaacttacatgtaagaagtaaaaattggtgcctgacaagcagatattgtgtgacactctgttgtcggagtgaacctgccttcttttcatttattggaaaatagaaaattttattaaagataccatcttataaatcaggaattattaaaatatgtataggtgaggcattgggaaattaattataaaaggtagacgtgtaatgttttgcataaattttcacttctttgccaaaaagaaaaaaaaaagggcacacacatacagcaaacccttgatgctttcaactttaagggcccagagctatctggtgactgattctcatgtgcaaaatattccctgcagtctgtaattaatttattccg

SEQ ID NO: 197822 - DNA, 416 bp, Homo sapiens
gtgctgtttcccagagttctaggagagaccagagatggctcttagcaactgctgctgctctgaattgttattgaacacttctgcctcatacttcctgccagctgaagagatgggggagggaatgttgaggaataaacaagacagagccttccagctcttgcctgttcccttgcctttagtttgattgatggattgttaagttagggatggaaggggaggtagggaggagggcaggcgcctgtctgagtgtcctgagcttagtgcttatgtcgccactctgacaggcaagaaaaaaggaatttacaaaccacagatggcaacgatctatctgtgctgactttgtcagggcttacgaccaggagtttaaggtgagactccttcttttcccccaaatcatataaaataaccaagcaacc

SEQ ID NO: 197823 - DNA, 421 bp, Homo sapiens
ttggatgaaatcaaataatttagtaacagtttgaatgaatttcataatctgttttcagagtctactgctcatttaaattcagcctcccacccccatcagttagggctcatacccacagtgtatcataactacatcaattattatagagtacagtgtttccagagcttttaaagcacaggtagtaggtttccagtaaattattttgtgctgctgaatgaaatatggccttaagagtacataaattgctgattgtctttttaaatgacattttcttcaactcactgaggttaagaccagtgatggacactgatctttttcataaccttttcaaaaatgtagccagacaagataggctgttctgtttggaaagggggcggggaccttgattctgtttgaaactattaaaaaggcctcttgtgca

SEQ ID NO: 197824 - DNA, 1264 bp, Homo sapiens
atatatatatatatatatcttcccttttcattgcaatttgcttattatattatttgcttattatatcaacttgcttattatattgatttgtttattatatcatttgcttattatatctgcatcgccatttacatgggataaaggttgtttatccctaaaggcattgtgtatgtgtcttttcttctccccttgcacgtttcctgcacagaacaggaggaatagaaaaaaaaaaaggagaggggaggggaggaaaagggaggggagaggaggggaggggaaaagagaaaatcaaaatggaccaatgactagtgtttggaacactaaaccccaaattaagtcttaaaatgactgaacattctgagataaaagtgacacacacccatccccaccccaaaagcaaaaaggacaatgtaagtgacagacagaaaagaatgtggagactgtgacatggaatcccttaatttctaagatcgctcattgttctgttggaaacagagggttaggtaagtgtctaagacagagccagtgcacaagtgagtggtagagagagtgataaagcatctcctattttgaatgagatcttctgtctcttctcatacatatcccaatccacaacagcgaaaaagtaatacgtagattcattcattcagtgactcagcaaatagtaagtgccatgcattttccaaaacattaataatacaattgggagcaaagcagacaaatgtcccttgccctgatgggagaacacaggcattaaataaaataagtagatcaaaatatagtatatactaagtgatgagaattgttatgggaataagtaaagcaggtaaaaaggaatgaaggccctctgtgaaggaggatgctgtttaaaataaggcgaaggcaggcatcttgagacagttgcatttcaacaatggcctgaaggaagtgaagggcacctgagagaaacatgttccaagtagaggaatcaagcacaaagctcctgaggcaaggcttgtggacttgtagcaaaaaaggccaatatggatggaccacaacagggaggagagcctgcaggtaaaattggagacatagtgggagctggccattttaagaatttagacttttatcatgagtgaaaggaaaagaactgaaggagttgggtgtggtgtttataggatgtacacaacaaagtcatcgcttagctgctgtgttagaagtaaaccataagtgagccaaaggcagaagcagagagaccaggtatcaggctgtcaaaaagaaaaaa

SEQ ID NO: 197825 - DNA, 569 bp, Homo sapiens
gaaaacttcacactgcagcatatgggaccaggatcctggacacagcaaatgtcagccccaacccccatgtcccccagatctgtatttccagcataaacacaggctggttggaggaaacaggctgcatttagacacatcaaaggaacttgaatgccagaaagaaaatagagtcctatggctattagagagggaagacatccaagaaaattgtcatcagagactgtatccagttgagcaaactcgtctttcaacttagtaagggactggaagttccatgaaggacagcgattgtctaattcttttcctttgcacccaaaagagcctggcacatgcagctggtcaatgtgctgaagagaaggaaagatagtctttcaggactatacggagaatttcgtcaagggtcatccaggaatgaaaggcttccggcttcaggaaagaattttctatggtagtttcatcacacactttttactaccaaatcctcagatactcataaacagtaaacattaaagctcactctatttttttttatttttctaaaattaaaaacactatgcagtgcccttaat

SEQ ID NO: 197826 - DNA, 253 bp, Homo sapiens
caccgtgttggccaggctggtctcaaactcctgacttcaagtgatccacccgcctcggcctcccaaagtgctgggattacaagcatgagccaccgtgcctggcctctttcccctttttattagtcatcttggaaatgtattcctggacctgcagcagattatatgaaaaagtaacagccaaataatattgataatgatgggacttgccatcaagctttaaaatcttctaattaattctttttttttttttttt

SEQ ID NO: 197827 - DNA, 405 bp, Homo sapiens
ctctgtatatacatttcacaacttttacctatttcacaacttaagtgcctgagatgatagtttcattctctaagtctacttaaatatgaagcatgcatttacaattagcaattacaaatcattttctacttttcttttttcacaaaaataaaaccaattataggtaaataaattacctttcctaccacaacccatagtgattatatatgtaaaccaatcacgcttctgaaacaggagacgcaagaaacattttcccaaacactacaagactaataaaaaaaagtcacagcaattccttatcactgaatttcaagattaaatacagaaagacaaagccttaaactatgaatatgcctgtaccattgttgcttcacatttctttttcttaagaatgatatacaaatt

SEQ ID NO: 197828 - DNA, 501 bp, Homo sapiens
atgccagagtcttacttcaaggagcccacagacagtaagaaaggcagacaagtcaatcagcaatcaccatgtagtgtgctgagtgtaataataggaagtacataggtacaaggagctgtgggtgcacttgacctagcctggaactgagaggagagaagggaagaggtattgaatgaccaacagttgatagttttacccaaaccttgaaggacaaatagaaatcaagccaagtgaagacaatggagaagatgctgcagagagaaagaaaagcatgtgcaggcgggtcacagtggttcatgcttataatcctaaatttttgggaggccaaggaaggaggatcacttgagctcaggagtttgaggctgcagtgagctatgatggcaccactgcactccagtatggacaacagagcaagactctgtctctgaaaaagaaagaaagaaggaaagaaagaaaagaaaagaaagaaagagtgaaagaaagaaaaagaagaagaaaaac

SEQ ID NO: 197829 - DNA, 238 bp, Homo sapiens
cagaaataagaggtagagttgactggtaacacccttttctgaatgctctgatggcattgctgagaatccccagacagccccagggatcctgttcagggcgcccatggtggagcaagctcagtgaatgcccagtcacagctgggcctggacagggtgggattcctggctcctttatttaaaagggcccccaacttagaggtaaagaaagaagtcgatgaagtcccttttgcattttgca

SEQ ID NO: 197830 - DNA, 518 bp, Homo sapiens
cagccttgctttagacttctgttgtggtggcaaagcaagacattaggacctgtacaaacccaaaaggatcctggggaaaacttaacctcaagaaaccagagttggttacatgatccaacactcctcacttacagactttttagccaatctcggaggctcagcgttttgacttcctgtacagggatagcaggtttcccatacagaagtgaactaagatgaaagcagtgctatgaccagtaccccagataaagacagtgtggtactatgcactctgctagaggtggccccacctcattcgcctggtcaacagacagataatttaattcaccactgtaaaaagcagtggttctcaaaatggggtccccagatcagcaacactagcatctcctggaagcttgttagaaattcaaattctcaggccccacccaagacctactaaatcagaatctctgggagtggagtccagcaatctatattttaacaagctctctaggtgattcttgcgtaaagtttgactc

SEQ ID NO: 197831 - DNA, 416 bp, Homo sapiens
gggaaatgttggtcctcaaaccacacgctgtcacatatttaatttgttagatagttaacatagtagctgtctgacttaagagaagttgtgaaagttgacagagtaaacagagtcttgtacctaatgaatttctatggcatcttcttcatcccctcagtgaccctcacaaccttccagagatagttgtcagtggagaagcattcagagtaggaaattaaaatgaactttgctgttcttcttttagttgctgtgtatttgattatccctaaaaatgtcagaccactctcagaaagtcattatacttttctaaccatttaaattaatatattaaagaggtcttttttgttaatatttgtggtcactattgcaatgcataccattattctgaaggtcctactcaattcagtaaggcaaaa

SEQ ID NO: 197832 - DNA, 139 bp, Homo sapiens
tagaaataaaggctgaatacagacttaaaaccaggaatccagactaaacactcaaacatggagtccatcgtggccccagggcctttgcgcttggcattctctccatctggaacactctgcccattgtgttagttgttct

SEQ ID NO: 197833 - DNA, 496 bp, Homo sapiens
atattatgcaatacttgccatagttttctaaaagctgaactcagaatgttaatgaaattaaaatgggaaagctattttgcttagaagatattttgttataaacatttcttaaatgaagaggctctagaaatatttattttatagaatttaaaatatagccatcactaataaaggcaggcataattccaacgatttcataacacatcagttattaaatctaattaatatataaatgtaactaatatgtaatttaatataaccctaattcaatgtttaaccaactgaagctggttaaactatgaagaagaatcttcaaattgaccatttctttccaagcggtaaaggtgatacgggattttgtctatacatatagagcaaaggagaattaagccaagatttagaattttaggcaaaaagtgtttatagtatcattaagtggttacatatgtaattttactgttataaatatgactgagtcaatttttttttcaaagat

SEQ ID NO: 197834 - DNA, 412 bp, Homo sapiens
gagacagcttgctttctctctctttgctctctgccatgtgagggagcaacaggaagacagccatctgcaaaccagcaagctgactttcagcagatgctgcttctcctggcaccttgatcttggacttcctggcctctagaactatgagaaagaaatgtttaagatttccagtctgcaaaccagcaaatgggccctcaccagacactgcctgtcctggcaccttgatcttggacttctcagcctccagaaatgtgagaaagaaatgttttaagtttcccagtctatgagaatttgttagaacagaacaaactgactaagacactcactaacatggtatattaccaatctcttaaattttgccagtctgataggtgaagttactcatctttatacagccatttcttcttcaaaa

SEQ ID NO: 197835 - DNA, 160 bp, Homo sapiens
cagctactattgctgcacaggaaacaccccaaaacttagtggcacaaaatagacatttatgatactcttggatatagaattctctgctggtcaagaattcagacgggacatagtaaggatagtttgtctctttgcacaacgtctgggacctcagctaggg

SEQ ID NO: 197836 - DNA, 332 bp, Homo sapiens
aaacatgacagagtggaaggaagatctgcttcggagtgagtctggactccacatatactcattgtgtagcctttggtaagacacttaacttctttacaactttcccatgactgttcatttgtaaatgcgaatggaaatttacacactgcggagttggtatgaagattgtgactaatccaggtgaaattttctggcatatagtgagttctcaataaacattagccatcagaattagttgttcttgttaatgtggcggccacctgcttctcttgcatccctaggcttgggtacttttgagaacagattaggtactaaataaaggctggctgact

SEQ ID NO: 197837 - DNA, 659 bp, Homo sapiens
aacagcttttgccagagagacttgatccaaggaaacagcaaagcagataggaccagtttgttgaagtgagtttggttcctataacttcattaattggatgtgtcagcattttgaagtcttccaggaagaatctacatggtttaaaatgcaaatgtactttaattcacaggcttaaagaggttctgtatttggagacatttctgatgatcgtttgacatctttctattgaaatagctctagtcaactggataaggagatcagggcctgaactgtaagcccatgaaatgtttatttacagacaaaccaaatacagcttatatatccttttagaggcaacatgaaaaatgcaatccagtaagaatcactgtcttgttttaggaattttgaggtaaagattgttgtgtcatgttaattaattgccagttgagccaggagttttgaaataatgctttcacaggctttggactcaataatttaaattttgggctgtaagtcagccgcttgcatggactgtttaatgtcctttacacacaaccagtggggtatgtattatatctattatggagatttagatcttctgactgttgaagctagaaaacaacaaagcatttttagtctggtcagcgtaattttttagggaatatttactgcattgcgtc

SEQ ID NO: 197838 - DNA, 443 bp, Homo sapiens
ccagcccctctccacaagccggtgaccccatgactgcaggggctgccgccgccagcaagtgagctcagctcagcccgggcgtcccctccgcaacgaggcccggatccctgcttggctcccggagcccggactgtgccttccgcaaaacggctgcgctctagaaagtggcctccacagtgcacttcccggcagcatggagtcggcagtggcagcgtttctatccggctctgcggggctgggtgtgaacgggactctcccatcccgctgtcctccaggagccggacctctcaccccgaagactttgccgaagacgcggccccctggtcaggggcagaaaacagatccaggccgccccgctcctgctgggtggtggagaaggtggagggcgggcaggtgctaagtgctactgtgaaaataaaaatcatcataataaagaacgaatg

SEQ ID NO: 197839 - DNA, 1052 bp, Homo sapiens
cctcacagccctgagtgagggtgtgcagcctccttgggcaagaggatgcgggctctgggaggctgcgtcgcacatctccagtccccactgcagggcctctcaccggctggggcagtgacccctggtcggaagcacctcagtgctgctcatgattgcagaggtggcctcaccagatagagggtcctggagggcgtgggggcttggtctctgactgccagcaaaagaagccgacatagaggcagcaggcgacaaacactgaggcaactgacttgcccgaatttaaccctcaggttttttaaataaaatgcaagtgcaggggcttgggctcgggactcctggagccccgtggggctgagcgtggatggtgctcggtgtccagctacactcccaaaccgcatcccgagcgtttgcggggcggaggggcccagggcgacggttccagaacagacccaggcggctccggtcagcagcagccccgctgctttccaacagcgcggggacccccatccccgccagccccatctcactgtccctctcaggtcagaggagaccgtagaggaccgcgtggcaccaggagctgccaggaaccagggcgacctagaagaaaccgggaacctggcgtcccgcggggacgcagccccaggaaaggggctgccgccgccagcaagtgagctcagctcagcccgggcgtcccctccgcaacgaggcccggatccctgcttggctcccggagcccggactgtgccttccgcaaaacggctgcgctctagaaagtggcctccacagtgcacttcccggcagcatggagtcggcagtggcagcgtttctatccggctctgcggggctgggtgtgaacgggactctcccatcccgctgtcctccaggagccggacctctcaccccgaagactttgccgaagacgcggccccctggtcaggggcagaaaacagatccaggccgccccgctcctgctgggtggtggagaaggtggagggcgggcaggtgctaagtgctactgtgaaaataaaaatcatcataataaagaacgaatg

SEQ ID NO: 197840 - DNA, 135 bp, Homo sapiens
gacagagtgagactccgcctccaaaaaaaaaagaaaactcaaaaaaatttttaagaaagaaaaaatcacccataatcatagtaaaatgttcctacaattttgatatttttggaaagaaacgtttttaacgctttg

SEQ ID NO: 197841 - DNA, 648 bp, Homo sapiens
catatgttcctgattcttataactgtatgtgtagtcaaccgtttttgctccaaaaggaaatttaatctggttaacaccaaaatgtgactccaactgccttttcttagttctcactctcaatgacctccatgcagcacttgatagcatcaacccttatgtacttttggaagcgcttttgtccgtaaatgcagaaactacatgattcttcctcttatcttcccggctctcttggatttgctttgccctacactgatcttcccttctccctcttggtcttccgcaggagctcaaataccaagcctcactcctacctttctgtaagtttttctttcttataatgatgattttcattacaaagctcttcttacacgatttaaaagcatattgttcatttaataagcaaaacagcttccttgtgtgttaggtattttgtcctgtctttcctctacaccatgaagcctctgttgaggtgtttatttccacaaaggcaggtgagagacaagcagagttaagaatatggtttgggctgggcgtggtagctcaaacatgtaatcccagcaccgtgggaggccgaggcaggcggatcacctgaggtcaggagttcgagaccagcatggccaaaatggtgaaagcctgtctctactgaaa

SEQ ID NO: 197842 - DNA, 478 bp, Homo sapiens
cttcaagaagtcttagatagtcctgccattagtagggatctcagatgggagggcaccaatgaatcagtgtagttgagtaccacttttgggagaaaatagaaacttggacactctaaatgatagtttaaggacgttgtttgttttgttttgttttttgtatgggaaaagttggcttagactctttagttcagcccttcaagttgatgtgtaatttaagattgtttaggaagttaaaaaatctaaagccctgtggatatagttcattcagtgcagtaattatctttcagatgccaagtacagcattaattctttagctttagcatggcactgattttcttaacacttcatgatcacgtggagcagactgtgctttacagcacaacagagcgtcagccatgtgctgaagattcttcgtggtagtggtttagatccaccctgaatagattatcttcatttatttaattattaagtagcttgc

SEQ ID NO: 197843 - DNA, 295 bp, Homo sapiens
ccccaggcctggtggggaaatgggagggagcttgccactggagggccctggggtgggggctgagcagcgagtctctcccagcccccaggtcctcacgcaggaggcagctgggaaccacccacgctcatctggtgtctctcacgcctccactgggggtcccaacatcagagccaaggcacacagtgaagccggtgttccggagagcccagctgtccccaccccaccccggctcctcagttcctccagccgagacctccccacctgcctccaagcaggagggactaaggctagactc

SEQ ID NO: 197844 - DNA, 541 bp, Homo sapiens
cgccaaaggagaatcactcagtattgatttattggttcctatagtacatccacatctaaaacatcttggggtcaaatgtgttttagaattcagaagtttttaaattttagaaatacagtacatgtactgtatattatgaaacatctcaccagagtgtgaggaaacaccctgcagtcaaatccgttaatgtttctgtagcaaaatataaaaaattcataccaagcagaatttgaaaacaaccccacaaaactacgaatatctgctatattcttacaccagtttaggtcaggttttgctaaaaaattaccttgcactaaacataagaaaatgtttcagtttttgaaactacccggatttcagaagtacatataaaagactatgaagttgtactcaaagattatttgtggccaggtgtggtggcttgtgcctgtaatcctaggtacttgggaggctgaggtgggaagacagctcagggccaggagtttgagaccagcctgggcaacatagcaagaccccatctcaaaaaataaatttaaaagta

SEQ ID NO: 197845 - DNA, 265 bp, Homo sapiens
tcagtgttgatgtatgtgttgtagtttatactgtgaaggcacttgagagaaacgctcaagaactgtgtaaggtgagcagtgggctgtgatgggagtgtgggcaactccagtgttaagggatgggtgaaataggaggagcccaggaggagtctgcctaggaaagatcagggaataacattataggcatccataggcatagcagtgggaaagcagcaaagaggcctggtattttaaatactgaaaaggacctatggttaagggaaag

SEQ ID NO: 197846 - DNA, 788 bp, Homo sapiens
gacagtacactccttggcaaaaactggaagaaaaagattgttatcaagcctcaaatccaaaactgacaatatcatagtgtttaaaactggaggtggggggagaaagacacacacaggcctccatactagacagcacacttcggagttgttttcaaaggaaacataacctcctcctcttgcctctcccacccctggttcctatcagcaaatgactcctaagtcacctgtcagtgtacccctgcaatccctctttcatcccagccactgcgactgagaattttaaagaagggggagaaatcagagagtccccagtcggtcacgttggttactcgggcacacacccccacggcttccctgtccagggcaacaccttcagaactgcaaggtcgccagaaatgtcaccataaatgctacttacttgggatcggccactctctatttaggccaaatactaagtcctgaattttgaaactgcatactcaatgcctcagaagcatttgaaactgaacgtttacaactatgtaggtgcaaaagttgcacatggagcgttcatcactaatctctccacatgacccaatttggcctccaaagcggaaactgtccacaaggatggctgtcatggctaccttagatcagttcacctttaggaacaaaggcccgtattccacaggtagagaggacacgaatactcctaggagcagtgctcagggatgtgaaaggcacagccaggagagatgcacctgaaggctgctgtggttcccaggtggcagcacgcggccatgccatca

SEQ ID NO: 197847 - DNA, 1038 bp, Homo sapiens
attacatagtgcattctgttagttgcttcctttgtgtagaagggaatttgcttgtgtggaaataatccagatttaagtaaggcaaaataatataccaattaagatcacaggttttagcatcagacctgggtttcaggaataagactattcaataactggatgaccttggacagcctactcactctattaataatctattaaacagtgccttgccaggtgtggctcacacctataatcccagcactttgggaggccgaggcaggtgtatcacttgaagtctggagtttgagatcagcctggccaacatggcaaaaccccatctctaccaaaaatgcagaaattggccaggtttggtcatgcacacctgtagtcccagctactcaagaggctgaggcaccagaatcacttgagcctgggagacagaggttgcagtgagctgagattgcagcactgcactccagactgggcaacagagcgagaccctgtctcaaaaaaagaaaaaaaaaattaaaacgagccttaaaactgttagggattgtgttacagaattaattcaaatatatataaagtgctttacctcggtttatagcacatggagtgcagtcagtttatggtagttaataacttctaaagcaatccagttaggggacgtattgaattcaggcacatattgacattgattatttagtgagtgaaggaatgaatctatgacagtagttctcttaagtttaatgtgggggacttaattaaaagttagggtccggctgctgtggctcatgcctgtaatcctaacaatttgggaggcttgggtgggcagatcacttgagcccaggagtttgagaccagcctgggcaatacggcaaaaccctgtctcaaaaaataaaaatattagctgggtggggtagcatgttcctgtagtcgcagctacctgggaggctaaggttggaagatcacttgagcccagaaggtcaaggctgtggtgagccatgatcgcacgactgcactctagcctgagcaacagagcgagaccctgtctta

SEQ ID NO: 197848 - DNA, 316 bp, Homo sapiens
tggcatctccatggggacaatgcccgcaggcacccccatttcacagataaggaaagcgaggcccaggggtgaaatcagttgcccagggtgacacagccaggaagcagaggagctgggatttgaatggaagcttaattcaggagcccgtgagcctccccagcccctcccaatggtgacagctccttttctgcttcactctgagcacctcatgtgtgcccagccctgggctgggacacagcagtgaccgagacagcccattcctgccctcatgggggtcccaggtcaggcacagtggctcacacctgtaatcccagca

SEQ ID NO: 197849 - DNA, 832 bp, Homo sapiens
agcaatggtatatgcaacatgagagtgtgcagtagtatagagagtgacactggaggatataggtcctgtcacatctattgcataaagatgcagtgtggtgagaatgtctgggaactcgctgtttgtgaatcgccacaaaaaaagcacaaactaccaatgacagtatatattatgttcatttacttacacgcatgcaaaaggccataatgttggtagatgaattaatagaaaacaagccccccccaaaaaataagcaagtaatttctgtaacatcgagttctgtcccaacagtatctgctctgaatttggactgatgtagctactttccctctctgcctccttctctcccctgttcctgccctctcagacaccactgctacgagaagagtcttcctgcagcatgattcccatcaccacacctttcccctcccctccttcctccagcacttcagtggctccctattacctgtgggataatggccaagttccttgttcttcccttcctctgtgttctcaaagctttttctcctcctttccaatcagttttcttcactgtccataaggattcacgagcattttctcttcccgctagacataagctcctcaaggacaagacctaagtcttgcccagttctgccttctctgcagtgccttggtcttgtactcactagtccctgctaagcatctactatgggctgggtgcttaggatacagtattatggcagagctagtccctgctgtcctggagcttatagtctagtgcttaaaaatgttcatccaataaatactaaaacttggccaggcgcagtggctcacacctgtaatcctagca

SEQ ID NO: 197850 - DNA, 625 bp, Homo sapiens
tgggggagcctccctgtggagtgacgtctccatgccatgaaattgccagccctgggaagtcatgaggaagaacactccaggcagagggcacagtcaccgcacagctctcaggcaggaacaggtttgccttgtggaaggctgctggggaggagaggggagcgggattggagaagggtgctccaagagccagaaaagctagtcaggaggccacagtgaggggtgcaaactcagttccaggagtgacaacaagccctctggaaacctcccagatgtcccaaggtccacccctggcccactctcactctcctctctccttgtcgcccagcctcactctgggaaggctggggaggattcctaaatctggtctgaactcctgaggctgaagccagagctggtgtggcccccaagtcatatctcagggtgggagagagtccttccatcaaggaggcaacgctatgagggcagctcagtgctcagcccacccctctaaccctcatgggcgggccctcaatcagaaaccacaaattccaggctcagtcagggaaggcctggatcctccacttccggctcctcccggaagtcagcttaaagaaatgatgcggaggaatgatcactgaagagactc

SEQ ID NO: 197851 - DNA, 598 bp, Homo sapiens
tgtaatactctgcaactactaaaatcctatagtatcatggttattgacatgtaactcttttaatggctttctttcctaagctaagaaaaatacaaacatgattccacataatgtatttcaaatatttgtatacatttttctacttttctatattttccacacatctatatataatttgtgtgtgtgtgtgtgtatgcatgcatgtaaataaaatatacctctaagtcttgtaaccttaagatggtggggcaaaatatttttattttctgttgttgattatttaaaatttagctacattaaattttttctgatttagtaaacatacataaggcctatttatagttgaatggcagtcttacaaaacctaagcaaccttagtttacattatctgtgggaaaagcatttttagtagaatgcttgcacatcttcctacattcctgtaatcaaacagtatttatcatcaactatgttggtgactctcactttgacataggctgaaccagaaatcctaggaaaaactgatgatagaaagctaaggggaaggacaggaagccgggaaacccttccagtagggagagtggatcctctagaggcagcc

SEQ ID NO: 197852 - DNA, 847 bp, Homo sapiens
tgtaatactctgcaactactaaaatcctatagtatcatggttattgacatgtaactcttttaatggctttctttcctaagctaagaaaaatacaaacatgattccacataatgtatttcaaatatttgtatacatttttctacttttctatattttccacacatctatatataatttgtgtgtgtgtgtgtgtatgcatgcatgtaaataaaatatacctctaagtcttgtaaccttaagatggtggggcaaaatatttttattttctgttgttgattatttaaaatttagctacattaaattttttctgatttagtaaacatacataaggcctatttatagttgaatggcagtcttacaaaacctaagcaaccttagtttacattatctgtgggaaaagcatttttagtagaatgcttgcacatcttcctacattcctgtaatcaaacagtatttatcatcaactatgttggtgactctcactttgacataggctgaaccagaaatcctaggaaaaactgatgatagaaagctaaggggaaggacaggaagccgggaaacccttagacagacatgttgaacgccgacgttccaggtctccaaggagatctctgagtccacggaggtccccaagaaggtcaagcagtagaagtcatcactcgggagggccatgggtcttctagttttgacacgagacttacgacagacgacgaaagaacgccagcgactagagcgtgaagccacagaaagggagaaagaacggcgaagatcccgaagtattgcccgggggttagaacgcaggcgcagcgaagtagggaaacggcctacgacacgtcgccgctccgac

SEQ ID NO: 197853 - DNA, 1092 bp, Homo sapiens
tgtaatactctgcaactactaaaatcctatagtatcatggttattgacatgtaactcttttaatggctttctttcctaagctaagaaaaatacaaacatgattccacataatgtatttcaaatatttgtatacatttttctacttttctatattttccacacatctatatataatttgtgtgtgtgtgtgtgtatgcatgcatgtaaataaaatatacctctaagtcttgtaaccttaagatggtggggcaaaatatttttattttctgttgttgattatttaaaatttagctacattaaattttttctgatttagtaaacatacataaggcctatttatagttgaatggcagtcttacaaaacctaagcaaccttagtttacattatctgtgggaaaagcatttttagtagaatgcttgcacatcttcctacattcctgtaatcaaacagtatttatcatcaactatgttggtgactctcactttgacataggctgaaccagaaatcctaggaaaaactgatgatagaaagctaaggggaaggacaggaagccgggaaaccctgggaaaggagggattatattacacatgttatgggaactagtttgtatatgcggggcacagagcatacacttagataagaagggggtcataaaaccagaaaggcaataaatagaatgttatgagcatgaactctagatgcagactgtttaggttcaatcccacctctgcttcttactacatttattaccttaagcaagtcacttaacttctccctgccgtttctgccccatctgtataatggggataacagaccctaccttagagggttgtcacactaatgaattctgagaatagtgcctggtactacagttaagtgctcattagttgtccacactcatcatcgtcattactcctattactatgacgtgaagagttgtgctgctaggacaggagcagcaacttttcaacaccaatcacttttttagatggcctcctttctagccttgttagttgcccaaattctgaaaaaaaaaacaagaactaagactctagaaggagatccgagaggcagacatgtgtgtctgtgtg

SEQ ID NO: 197854 - DNA, 376 bp, Homo sapiens
ctgatatttatacgaagaaacaaatgaaagtgttccacagtgaggcctcctactctactctgccagattggtgactggaatttggaattttgtttacaaataaaacttaagttgcaatattctttagagggcttctgttggattactctgtagtgaaatgttacacggtatcttgtgagagcagcagtagaaagaggtcctgagatcaaggacagcctgtgatgctttatttccgtgggaaccaccattcttggttacttatagtatcagtaaattaagagtatttgctttctagcgtcctttgtcagtgacacgatttccaactgaataattaattgacttcaccgttgctttgaaagtgaggtctttggtgcat

SEQ ID NO: 197855 - DNA, 431 bp, Homo sapiens
gctgtctgtcgtcactatcatcatctgcttcacctgctcctgctgctgcctttacaagacgtgccgccgaccacgtccggttgtcaccaccaccacatccaccactgtggtgcatgccccttatcctcagcctccaagtgtgccgcccagctaccctggaccaagctaccagggctaccacaatttcttggtggaaagatgggaaggaattgcttggggcacatcatgcaattacacagttttatccagatgatgaagttacagcaataatcgcttccttcagcataaccagtgtgcagcgttcagacaatgggtcgtatatctgtaagatgaaaataaacaatgaagagatcgtgtctgatcccatctacatcgaagtacaaggacttcctcactttactaagcagcagcagcagtacgggtcgggagat

SEQ ID NO: 197856 - DNA, 94 bp, Homo sapiens
ctgggattacaggcgtgagccaccgagtccaccctattgtcattcttaaatagttttattatttccaataaattttgttctgctgaagcaagag

SEQ ID NO: 197857 - DNA, 287 bp, Homo sapiens
acatttcaaaagtaaaggcggaattagacaatgctgtaatcatagttggtgatcaacagagtttataagcatacctctttcagcaattgatagaacatccacacagaaaatcagtaaaaacgtaggtaaagagctaaacaactctaccaactatcttgacctaactgatacttctagaaacaccacactcattggccaggcacggtggctcatgcctataatgataacactttgggaggccgaggtagtaggatcatttgagcccaggagtttgagaccagcctggg

SEQ ID NO: 197858 - DNA, 521 bp, Homo sapiens
tgaattaggaggtggttctagttttaatttttgaggcacctccatactgttttccgtaatggctacaccaatttacattccaatcaacagtatatgtgagttcccttttctctatccccaacatttgttatctttctttttttgataatagccatcttaacaggtgtaaggtaatatctcattgtagtttgttttgccttcctctgatgattagtgatgttgagcacctttttatatatctgttggtcactgtatgtcttctttgaaaaaagtgaatattcagagctttttgccgattttaattgggttatttgttttttaattttttttcataataaaagctctcaacaaaataggcataggagaaatgtatctcaacataataaaggtcattaattaaaagtccacagataacttcatactcaatggtgaaaagctaaaagtttttcctctaaggttaagaactcttgccagttttatttaacatagtgctagaagtcctagccagagcaatcaggcaa

SEQ ID NO: 197859 - DNA, 312 bp, Homo sapiens
taaggagtctatacaggtaggattagaaatagagatgggaggccaggtgcggtggctcacgcttgtcatcctagcactttgggagtccaaggcgggtggatcagctgaggtgggagaatcgcttgagcccatgaggcagaggttgcggtgagcagagatcttgccactgcactccagcttttgtgccagagtgagaccccgtctcaaaaaaacaaaccaacaaaactcccaggtaggtcttttgtaactcttcctctgtccccaattcaacatgctgccctccacccctaagcctgtctagatctactaact

SEQ ID NO: 197860 - DNA, 494 bp, Homo sapiens
tgcatatgctgtctcaggggtagcagaggcagaagaaaatccacatataagtagaccaatgcagtttaaacccttgttcaaaggtcagctgtgtaatgtttagtaacacctttgtgaactaaaattcgaaagtcaatggttagaagagacaaatgactccaaatattggtgtggcatgattgattaaaagttattttgcaagatgtgttctggagagaattgccccagagctaaaataaattctaagctatcttcactctcaggactaaggcatgaaatgaaacactataaaatctgtatcaaaaaaatgttttgttcttaatatactacttaagtcttctagttaacgaaaatcacaattttaaagagtggaattgtcagtatgattctggtttataacttggtttttgttaatttgtttatttttataaaattcaattgttaggttcatagaaatattggactacaatttatttatagtgagacagcctcaa

SEQ ID NO: 197861 - DNA, 538 bp, Homo sapiens
tgcctcccagccttgccctcgtcggcccctggagcgcagcgccgcagctgcagccgcagtcccggggagccttgcgtcctctgcctggtcctgggatcctgcagaccccaataaacagatggcaaagtagaggatggttagagattttcagagacagtaagagtggaagaagaagccgagaaagtagcagggagagaaaagtaactagacacatttcgagaaaaagcacagtatccagagagatgaaggacagccaggtagggagaggggcagcaaaggaggaggctcctcagacagagagtgggggagagcagaagggatttggagccagggcagacagggcagtgtggtaccgggacagcaagagggggcagccgatgacaaggagaagcagagggagaaccacagcacggggaggcctgggatctgggggtgccaaagagtggggacaacggtgtgtaacagggaagagggaatttaacagggagtgctgaaatggggaagaaagagccagaaatatgtggagactgggacaatg

SEQ ID NO: 197862 - DNA, 623 bp, Homo sapiens
gtttctgtaaagctgtcactctgataagaataagtgactatttaaaatctttttaagattttaagatcggtggtctatgtaaagccaattatacttgatctttatttattgtttttcaaattatccatcagtaacaatctgaaaaatatagacttcacacagctaacccaggttaaagaaacttgaggagctgtatctagtgtagttggaaatgaaaatctggaaatttaggatgaatagttgtaacattgttaaggataagagcccctttgaaaatctgttgaaagctacagaccttgtgcccaggaaaattacacactactcccaatgctgcatacaatttcagagaacaaagggacccccagaagcccatccatgaatcatggagcctaagttaagaacctctgattcagacaacagttaaagccactaaaacagatgtgaccatgcagagaacatgtgttgggactagcggagatggattatagagcccaaggaaaccccaacagtgaaagagcaggcagaggagctggcagacaaggaagatctgggcagttgtgagacagccaagcaaggggcaaagacaagagatgagctgttgagtgaggcctgttcgaaagagg

SEQ ID NO: 197863 - DNA, 765 bp, Homo sapiens
tatggctcagctataatactacgcgatattctctcccatcttcagaatgtttgcttcacttcaagtaaaagacagtaactaaaaattctctttccatcatctgttaccttaaaacagcctaactcacaaaacttcacaacgcaagcccaggtattatggaacccaccaagaatagcaagttcagtgttggctgccatttctaagtggacagtgttaattccctccacttagttgaggggcggagagaggtgttgaaggaaagagatgagatgacaagtctgaagtggcttcatcacaaagcatccatggctgtgatatgtagctgtgtcatccatggcaacattcgcctgaatggagattgtattatggacattgttctgggatgcctgaggctgatgacatgggacatgccggaaatttatgtatttcctacataaatatgcagctgaacatatttatgtaggaaaattaaagaccagactggtcaatcactggtaagccgtcaatgccccctcaatgattacccttgtcattcgtgccagccaaaacacacccagtccacaatagagacgcaagtaacttttcaaactgcaactgaccgctagaaattgattttagtagttgcctctatcctgtgatattttagaaatcaggttatcatgcataattagctctcctgccccaatcatctgtgccacattctattatcactatcggagaggtctatgacaatcaagaaaaggaaaaaaacacaggcatctgtct

SEQ ID NO: 197864 - DNA, 232 bp, Homo sapiens
tacttgggagaaatgtatttgagaacatttaattaccagactcttttaagcttaattagcacatatcacacatatcccaaatacttgtgtgttttttttctttctctctctctctctttttttttttttttaaagagacagagtctcattctgttgcccaggttagagtgcagtggcacgatcatagctcacttgaactcctgggctcaagtgatcctcccacctcagcctc

SEQ ID NO: 197865 - DNA, 529 bp, Homo sapiens
acatgtcctgtagaggattaaatctctatgtagaaaataaaaaaacccaagctttacttcttttagaaactatttcagtagtaagggagagtaaaatgaggaaaaattttatgttttaattttggtggccatatattggtgatgggttttatatttgcagttctgtatgctaagtgtacctagaaaaaaatagatgaaacgcattcacaaaaaatagcaacactttttctatggggaccaagagaaatgctatgctgggagggcctgagggatccagtctggagcccagagctagtgtatctgtatctgtattccagaaataatatctttttattactctttctttttttttccaaatggctacatcttctccctttatcagcagtagcaagatttgagaacatagggatggcaacagtattttcagaacagaaaattaaaacaagctgtatttttgttcccaatttatgagtctattttgatgggaagttgaacaaataaaaaggaaatcatcaaagttacgtttatt

SEQ ID NO: 197866 - DNA, 872 bp, Homo sapiens
actttggaagctgatcttggagcaccagtcaagcccttagctggctgcagccacagccaacaacaagactgcaacctcctgggggatcctgagccagaatcccctggctaaattgctccttgattcttaacccacagaaattgtgcttaacaccatgcagaagctgccaaggcttatggtttgcacactctggagcagtggccctagctgtacctgggctccagttagccaaggctgaagctggaacaccctgtatgtcaggagcaatgtcccaaggctgcacagaactatgttgactcctgacatggtggaaacaacaacaacagcaacaacaacaacagcaacaacaacaacaacttaaatgctgaggagtgaaagtgcctggtagaagtagcctcttaccctatgctaatggatttcttcaacagggggaaataaaactctcttaaatgttacatctttttgtttctaagaatagacagaaacaatactgctctgaattacacttcggatgactaagccaagtgcttactctcttcagtaatattatctctgtggtttgcagcaacactcttacattgtatgtaaagaggggtagcagccatggcattctcaaaagaaagaaaatgcaatatgaagatcatcagtcttggtgccaataccataacaggttgttggggactggagctggtctgagagcctttggatagcaccaaggtgtggccttggccagataccttcagttgtcctaggaccttattctgatcccatgtgacagctagacctccatgaatggaaactgaattgaaacaaagccaacattcccaacacccaagggtgatgggggattgacaaagtcctccccagcaaac

SEQ ID NO: 197867 - DNA, 580 bp, Homo sapiens
aaggaaaagaaaatgcgtcatcccaggactgcagaagcctgtgatgaattatccacagggctgctcccaagagcccgagcagagggctttttcggcagagttcctgcatccagcctaccgatgccctggaagaggaattcttaccccccttccccaaattaataaaatccaccaagccagagagcaggaatgcagcattgcaggacagcagtagctgccgggtgttccctcagcctgccctcgggcttccctataccggtctatttttatcctccctgagaattatggctctctgtgagtctgatttaaaatgaaaatgtgtcactcaatttgaaatgctgtgcagcggctaagaaatatgtccattgttatgcacataaagccctgtgataaatgcactgcccaggaagagaggcttttccacccgtcacccagctcctaggtctcatgcctgtgcagtcatctgtctccctctccagagagtcagcagctttgtgtcctggagaaattgtgaagcaaatactgcttaccccgaaaagtgtgtgtgtggtggggggaatgtacaaatgttgatattata

SEQ ID NO: 197868 - DNA, 487 bp, Homo sapiens
aagccgccagcagaaccagcaccattattgttaaatgtaacagaccagatacttccaggagccactccaagtgctgaaggaaaacggaagaggaataaatcagtgagcaacatggagaaagccagtatagagcctcctgaggaggaagaggaagagaggcctgtggtcaatggaaatggagtagtagtaacaccagaatccagtgaacatgaagacaaaagtgcaggtgcctcaggggagatgccctcccagccttatcctgcaccagtgtacagtcagcctgaggagctgaaggagcagatggatgacacaaagccaactaaacctgaagacaatgaggaaccagacccattgcctgataactgggaaatggcctatacagagaagggcgaagtctacttcattgaccataacacaaagacaacatcatggctggatccacgacttgcgaaaaaggctaaacctccagaagagtgcaaagaaaatg

SEQ ID NO: 197869 - DNA, 729 bp, Homo sapiens
gtatttttagtagagagaaggtttcgccctgttggccaggctggtctcaaactcctgtgctcaagcagtcctcctgcctcagccacccaaagtgctgggatcataggcacgagccaccgcaccgcacccagcattgtttttctttatgttatggagccaacatgttgttgttctctcagaggcagtggaagcctgtcagactttctgtgagaagtggcatttattactgtctggtagattcctatttctgtataaaaagaagaaaaacatgtgaatacgatacaggaccaggccccacatcctgataacatgcagtgcctcttcaccagccatgccttttgcctcaccctttctgttgctatgttctctatcctgcgttggacaaagagtgtcaggcgaggttttctaggcatctccatcaaaatgagaaggaaaaacctccatctctcagcacttattaacctaaaagataaagttgcactttctacttttcttaggtggggattacatgagccccaccagtcatcacggacacatcgtttgtacctatcagatgtatcagtagagatggggacattaatttgtgtaggggtgtcagcagtgctctggggagaaagagatattggcatacacagtggtctggagcatgtcttcacaaaatagtgtttgtggggagccagagattcctaaaagaacagtgaatagcacagtctcattaaaaaaaaaaaa

SEQ ID NO: 197870 - DNA, 535 bp, Homo sapiens
ataaaaagaaaaatccagctcaaattttggaaatgcaaaagactccagtaagtttatttcatatatgaatatactttcttggtgaggatatgttgaatagaagacattttataggccacagagttgttaaacccttgggcagttcagaaaaaaaaaacaccaaaaatattaaaacatgtgagtgtgttatagactttattttttagagcagttttaggttcataataaaattaagcagaagctgtagaaatttgctatatatccacctaactcttgctcccctccccttgacagcctttctcattgtcagcatcatgaaccacagtggtacctttgttaatagtgatgaacctacattgacacatcataactcaaagtccagagtttatattagggttcattcttagtggtatacattctatgggtttggacaaatatataatgacatatatctaccattgtagtatcgtacggggatgttcattgccctaaatatcctctgtgctccacctgttcatctctacctcctcccagt

SEQ ID NO: 197871 - DNA, 146 bp, Homo sapiens
ctttcagataaacagcctagctgacaggaattctaagtgaactcagctaccttcctgggtagcaaaaatagtttttataatagttttataatacattgaagtggttgatctaacggcatctgaccctgagctgcatccttgggtca

SEQ ID NO: 197872 - DNA, 399 bp, Homo sapiens
agagctggagtagaagggactctggttgtggggtaacagcttagatgccagtgtggagacaggaaggatgataacgtgtggtccactaagagcagccatatcccttgaatgtactccatgtgttagttactatttacagagttattcaggctcctaacatcagatttttctagatcaaagtagaaataagaggaacgtcaagaagataatcaacacgtagcatgcagaatcattattttaaaaggactaagacagttgtgtggtgtgattgttgtaccaccttctctttggctgttagaaagaactgagtagcgttacacatgaaaatgtgaaatctgattttcttatttctaaacttttaaaagctccatatctactgatacaaaccagagaatgtgg

SEQ ID NO: 197873 - DNA, 166 bp, Homo sapiens
ttgattatctgtttctacccttcatcattttttttccttcccttcatctcacccctgcagatgggtaaggagattcaggactcttatctctttttactgatgtgtcgatatcggtcgcatagtaaaatgcacagagaagaaaagaggagcccttttttgtgtggta

SEQ ID NO: 197874 - DNA, 398 bp, Homo sapiens
agtcatcttaattatattatcattggttacactattctttttaatttattttagtttttctttttagagacagagtctccctctgttacctaggctggagtgcagtggtgtgatcataactcactgtaccctccaactgttggactcaagcagtcctcccacctcagcctcccaagtattggcactacaggcacatgccaccatgcccatttaatttttaaaaattttttgtagagatggggtcttgttatgttgcccaggtgggggtctctaactcctagccccgagtgatcctcctgccttggcctctccaaatgttgggattacaagtgtgaactactgtccctggcctggttatattattctataatagatggttagcctggcccctgaggtgt

SEQ ID NO: 197875 - DNA, 521 bp, Homo sapiens
ttactgactgctgtgtcttgcatgtagaccctgcaggaaggctctcgtaggccaattattctctttgggtggcttgaagaagttacttaccttgcctgctgttgagcagagcaccaaggtgccattagacacgtgagcctggtctaagcagccatggccagggtaggggatggttacatggaacaagtcatggcgactttcgcacaggaagggcctatgactgctttactcagaaggggatagctcaatttgcaagcatcttgagattttacagcctgaccagtatacgtggaatttagaaacaaacaaacaaaaaaacctgagctgttttcctcctgtggatggctttgggtttcatctgtttggattgcttccagacactgagcaaatactgtgctcgattggaaacgtctgttgtggtggcaaaatgggagagttgttgcagtgccacacatacctgttacagctgggttagggagggagactggtttctacttctttttagtgctttgcttacaggg

SEQ ID NO: 197876 - DNA, 260 bp, Homo sapiens
ttattggctgtttatctacttttgcaaagcgcgtgttcaaatcctttttttttccaacggctaatacgtatttttgaggttaatctaggctaatcactgctgatttgtgtttatgtatttatatgcctttaacagactaccgccctaagcagtgaaagaaacccaaagggagccgaatggcttgcatacagaaaggctgggcagttgctgggcgcggctcgcgggtaggctctaagcctcgagcagtgattggctgaaga

SEQ ID NO: 197877 - DNA, 728 bp, Homo sapiens
ctgaggtcaggagttcgagaccagtctagccaacataatgaaaccctgtctctactaaaaatacaaaaacaattagctgggcatggtgacgcgtgcctgtaatcccagctactcaggaggctgaggcaggagaatcgcttgaacccaggaggtggactccagcctgggcaacaagagcaaaaactctgtctcagtaaaaaaaacaaaaacaaaataagattatcattaactcagtattagataacaaagatatcttcattgtattttcctggaaattaaatcaaattaacaaatgaacattatcataacccagacttcctttgtgcaagcgcctgatttactttaggcatcataactctgttaaaggtttaagtagatagtcttccttgattctgactcttcccccacgcaactgctgggagtttaccctgcctttgggagaaaaataaggccatgggaataactatattccatagagagtttatatcataaatccttctaataaactcatttattatttcaataaaggggtaattacaatcctcctaaacaatggcaaatctaagaacaggacctaaagaaataatataaacctctattacctaggtttatgtcacagattttataataccatggattaaagttctttatgagaatacatgtgtaatctcttttcatatggtgggaaggctataatataggttttattcctgtgatgatcatgttat

SEQ ID NO: 197878 - DNA, 603 bp, Homo sapiens
aatagatgttggagaatggtaaatgaagagctggcagtctcttgagtgaggcatgcagctctagagtacgattgggaagccactggccatacgtggctggagagcactcggaatggagcgagtccaaattgagacgtgctgtgaaagtacaatacacactagattccaaggacttagtgtaaaacatatcaattatcacgttaacaattttaaatttagaggataaatcaaaacgataatacgtatatgttgagttatatcaaatatatatatatttgtttgttttgagagggagtctctctgtcacccaggctggagtgcagtggcatgatcttggctcactgcaacctccatctcctgggttcaagtgattctcctgcctcagtctcctcagtagctgggattacatgcgcctgccatcacgccaggctaacttttggattttagtggagacgaggtttcaccatgttgggcaggctggtcatgaactcctgacctcaagtgatccaccagcctcggcctcccaaagtgttgggattacaggcgtgagccaccatgcctggccaagttatatcaagtatattaataaaattaagttcacct

SEQ ID NO: 197879 - DNA, 344 bp, Homo sapiens
agcaatccaaagggaaatatgagggccaagaacccaagacatgagagatgctagaaaacacattgaatcgcaagcaaattagtgggaagaggaaaataatggtgcagagcaatagcattttaaaactgcaatttgtgttttgcttttataagatgtctgggtcatggtacacaggaagactactgtaaaatcaagagttgattgaacaggcactaacagataacctcgtaatatttatctctactacccttatctatactgatctgtgaaaaggagacctgcggtaataggagaggcaaagaatggatccattgttggcattgctgtactcattaacgctaaat

SEQ ID NO: 197880 - DNA, 497 bp, Homo sapiens
tgaatgttgtgtctccctcacattcatattgaagtcctaaccccttaactcctaatgtgatggtgggattattgagaggtgattagatcatgagagtagagccctcatgaatgagattagtgcccttaagaagaggtacaaaagagatattctctccctctaccatgtaaggacacagcgagaaggcatctgtctgcaaaccaggaagtgggctctcactcagaccttggacttcccagcctctagaactgtgagaaataaatatttatcatttaagcaaatccagtttctggtattctgttatagcaacccatattgactacagtagaatttacatttatattgtgtgagactacatcttctttcaaatggatagccagggccatttattaaaattttaaaaagtaagaagtttttatgctactagaaacataatatatgctcatggtagaaaaacacaagaaaaagaacagaaaaaaattcacctatatttctac

SEQ ID NO: 197881 - DNA, 197 bp, Homo sapiens
ccatattcttttttctttctcttctttagactgaataattccaactgtttatcttcgagttcactatttcttctgcttctgcctactcaaatctgttgaacttctctggtcaattttaaattttatctattgtacttttcaactccagaatttctatttgtttcctttttataatttctgtctctgttgatatactc

SEQ ID NO: 197882 - DNA, 244 bp, Homo sapiens
tgagaagggcgggcagagcaggggattttgaagacagagaaactgaaaaggtgaagcagcaatgatgtgttagagtccaaaccagagctcaggcctcctgattccagcaagctttttctacctcccataccaacctccagtccaagtgaacatctgggtggagtgacagttgacacgtaagagattagtaaaggccgggcacgatggcctacacctgtcatcccagcactttgggaggccaagg

SEQ ID NO: 197883 - DNA, 343 bp, Homo sapiens
catacatgagaagctccgagaaggcaggacaagcattatcatccccatttatacatggggaaactggggttctgaaagatgtgaataacttgcctgagttctcacagctaataaatgagtccatctggactagacctgtttaggttcattcattcattcattctttcagccatccagcaaatgtttatcaaagggcatagttctctccagtatagccttctggttcttattttgataatcagaaatgattgaaggcaggccggatcaaaagaactccgcagcccatccctgcctcaaaataatgtgattccacatgttccattcctttctgtgtgagagaact

SEQ ID NO: 197884 - DNA, 2604 bp, Homo sapiens
  misc_feature (155)..(155): n is a, c, g, or t
  misc_feature (1937)..(1937): n is a, c, g, or t
aatacccagctagttgcaaaaccttcttttattgctgcaataggaccttttcatgtgtctaaagcataatttattcagtgagtaccctgctgttggccatggaagatagtagtctttttcactattgcaaacaatgtttcaataaataacaaaanttttttcacacctaaaacagcaggtattttatatagcatttataattgtaaataagatcactattttcttctctctttctctctttttcctccttctctcactaattattgctgatattaaaagattaattcttgtagtctgcctgtgaatagccactgcactccagcctgggcaacatagcaagctatgcctctgtttaaaaacaaaactaaaaactactcataatcttactcaaaatgactagtttacattttggtctttatttgcatatatacctacatttttagaataagattctactttacacagtattcctgttgtgaattctgtcattgccaaccttcttgaagattcttactagtttccattttcttccactgattctcttgagttttctagatctatattcttatcatctgataacgaggatgatcttgcctctttcttttaagtagtcttactttttatttctttttcttgtttaactgcactggctgacccgaaatgaggctaaatgatactgaggacagttggtatcagtgtctcacttctttctagagtggaaatggttctttgtgtggtttatttttgcctgatggtgactgttggtttgtaattgatcttaactgaggagtaacaaacatggtaaaacatttaacacagaatctttcaaataataaatacacaacaaatgtttttgttattattatatttttgtcatggtaaagaggtatactttaatttcctgtcattaagatttatttttaaattgagaatggatgttgaattttgactcctgcctttcttaaggggatatctatttaaataattacttatatttttcttaaactgttaatagaatgatatattagcattgatatagttgtctttcttggactgcaaaaccaattttgtcaaaagtttgttacccttttgaaataatgctaggttttattttctagtattttattagagtatgtgcatctattttcatgagttaaactgtcctctatcatgatttttcagagatagctttgttaagatttgaaatcaaggttatgctagctttgcaaaatgaattggaagttttctttttccatcctccatctcccttaccaccccttccccagtatgttctgttccaagaaattttgaaggagcttacatgtgaaattgccctggaaaagaatctttaaaatataaatatacatacaaatatatatatatgtatatatatatacacacacacacaatattttccatttattctataattagtacaacttttagactttcttctcagtttgaattaattttggcaattgtactttcaaagaaaatcattctgattccattgagtttattggcatagagctgcaaacagcctctgattctgaaatagctcttctggatcagtgattatataccttttttgttttgtatcactgagtgcttgtgctctctctcttatttctgactgaagttgctaaaaatttaattagttgatagaaccagttagtgtacaaattagtgttggattactaattattttaatttattatttccttttaaatataaaagaacttgcagctgtaagttcttctctaacagtaggtataactgaatcctagatgtgttcatatgtaatatttttgttactggtgtgttctaaatatctgtggtggttgttttgaattatgcttttgcccaaaggttactcggtgaagactgtttcttaaatttcaattggattggctctttgttcatattttgttattaangtctaattttattgcattttaggtagattttgtgacctaaattatacccaattttggaaatttgtagtttttgtgtgtgtatgcatggcatatgtacaactaatttttgtaactattatatgggcacttaagagtatcttcacaatgtataattaatatatcatgattaggagaaagtgtgtttatgatgttattcaaatattttctttctttttttttttttttgagatggaatctcactctgttgcccaggctggagtgcagtggcgcaatctcggctcaccacaacctccgcctcctgggttcatgccattctcctgcctcagcctcccaagtagctgggactacaggcgcccgccaccacacctggctaagtttttgtgtttttagtagagacggggtttcaccgtgttagccaggatggtctggatctcctgacctcgtgatatgcctgcctcggcctcctaaagtgctgggattacaggcgtgaaccactgtgccgggcctcaaatattttctctctctatatatttatttttgttctcttgattaaagttgttaggaatgtgttaatttcttccactgtgattgtgttttgtattttcttgcattatgccatggaaattgctggtttcctaggtcaaaacaattaaatattgtcagttac

SEQ ID NO: 197885 - DNA, 406 bp, Homo sapiens
cgacaaggagttcgagtgtaacaacagcgagagcggctacctgtactgctgcggtacctgctcagcctcccaagtagctgggactacaggcgcccgccaccacacctggctaagtttttgtgtttttagtagagacggggtttcaccgtgttagccaggatggtctggatctcctgacctcgtgatatgcctgcctcggcctcctaaagtgctgggattacaggcgtgaaccactgtgccgggcctcaaatattttctctctctatatatttatttttgttctcttgattaaagttgttaggaatgtgttaatttcttccactgtgattgtgttttgtattttcttgcattatgccatggaaattgctggtttcctaggtcaaaacaattaaatattgtcagttac

SEQ ID NO: 197886 - DNA, 449 bp, Homo sapiens
cataggctccagccaaagaagctcctccacccaaaataagggagagatccaaagggaggcgatacaatgacgtgaaaccatagaggtaagaagcaaggactcctaatacttgactctatgctaaactgttctgatgggctccagtttcttcaattctcaccaacacttgtttttgtccatttaaaaaattacagccatcctagtggttgtgatgtggtatctcattcctggttcctatacctgaaacatcctttctttccttgcctatattcacctattgaaaaactatttttcaaatagtacctcctctatgaagccttttcttgatcaccctaactaaaagtgattgcttcttttttaaattctgcaaacattgcatatatatttctggtggtgtgtgtatttcccttatatcacatttctttgtatatttgttttacaattacact

SEQ ID NO: 197887 - DNA, 551 bp, Homo sapiens
gtcatttggatctctttacttttgaatggaagtttacaaaaagcttacccagagcttcaagtcacagagcagtctgggtcagttattacccttacacataatcacctttcaaagcatgaagtaatacaagggtaatgttcatttgtctgaaagctctggttataagaaacattcagacagggcttaacttctgctactattgccagtgagggacagcccaataccagtgcgcatgtgcccaaggccctgaacactagtttggaagccaggaggacacatctgtagcttgtaagatgaggcgtgcatagtagataccatctgctaacaacagcttggttgatgtaggatggcgatacagcggtgaggtctatgtgactgtttgacatgctgaggttgctgaaagtgaactggctgtgagggctgggagactgtctagaacacacttagttgtgccatttgaggtcctgcttgtcctctctttgcttctttcacatcattatcatgagcagtcaatagctgttcagtacacggcactaagaaataccaggagt

SEQ ID NO: 197888 - DNA, 464 bp, Homo sapiens
tgaacactatgcaagtactcattaaaaacatcccaaaatgctggaggaaatgccgtggaattaaggaatgactcttttgtggtagaaaatttttatttcagagtatagacactgcttgtgctgggtctcttaattttactggatattataattttcttggactgttagattttctcagtgcaacatttctgagagcaaatatgttctgctcaattaaatactttctaaagctagataaatgccttccagtaagcacattaacattcaatatgttatattttaccagaggtaaaacatttatattctaaaacattatattctaaatttttttaccccagggaaaataaaatgccaaaaatctcaactaccacacatagctttgtaataagatcaatgggcaaatggaatcagcttcagtttgcactaatcctacatatatgtattaaggatatgtgtaatgaact

SEQ ID NO: 197889 - DNA, 581 bp, Homo sapiens
gggaatgctgaccttcccgtgcgctgtccttggtacttccctctcatcagctccctcggtaccagctgttgtagagaatttcctcagctctcttggagactcccagaatgtgcttttgagcagtcaccccacacacctgctttccttatccgcagatacctcccgccatgttttcctgcctttcttccctccaggttcaccctctcttgcttaaagccttctgcttccagccactcaggggcagttcttccccatcctctgcaccaccacagggctccgtctcaaggtttggggcccttttccattaccacaaattccaccaactcttccctgccctcaagagttcaattttgattctggctttgtgcttttacccacaccctctgttccagaaaccttggccagtctccccatgggttcctctctctgtcaccctagtctccatccctgaaccagtatgctttcttccagctgtcacccactgccagccacaccctggtgggccaccttgccactgtcagcctgcatcactttatgtcaccaactcagctcacagcccaccagcctcttctattacccag

SEQ ID NO: 197890 - DNA, 130 bp, Homo sapiens
tcacacacagtaactgcatccatggcccagagaacaattgtagcacacaaggagcagggctgtggctaaagtgttggcatctggagctaatagttctaaaaatgatataaggtagaggtagaaaaacaac

SEQ ID NO: 197891 - DNA, 673 bp, Homo sapiens
ttgtgcccaaacttagctgccgcacactacagtgataggaaactgccaacagttttttgtcaaacccactacagtggatcccacaatgggctgagacctcgtctagagtcatcaggttttccaggatgtgcagatggcctggaaacttggccaagaggtagggatcagcactctttagtaagctgtatatccaccaaatgctgtgacacaaggaatgggcctcaaaatgtttcaggccagcacagctttgtctttgcaagtcatttttcagtggcagttaaatattgtggcaaagccaaggtacagactcacgtgcattaaaatatgcttatgagtaataataccataagtatttccatgtgcattaggtgtcaagaacttcacacacatcatttcattcccttatcatggcactcagtctggtgggtattactgtatctgtttcacaataggaaacccagtatctgagatgttcagtgcctttcccagttacccagttggtaagtgggaaagtcaggacatgaattttcagtgattttattaaaaaggcaggatgatacagtgatttaaaggcctaattctagacccaggttgcttagattcaagtcccagctctgccatactctgttagtataactttggccaagtcactatgcctcagtttcctcatctg

SEQ ID NO: 197892 - DNA, 189 bp, Homo sapiens
cggtgctggcaagttgttgaaaatgtacacccacaccctgctggtagcagtgtaaattggtacaatcctttaccagagcaatttgatactgcactcaagaaccttaaaatgttcacaccccttgatccagtaacttaaaggaaatatattttaagaaaataagtcaaggccgggtgtggtggctcatgc

SEQ ID NO: 197893 - DNA, 250 bp, Homo sapiens
ccttgctgtgtggttttgggcaagtttcttaacctctctgtgctgtagtttcctcatttgcaaaatgtgtataataacaattgtaatgcttattagggttgttatgagtatttcatagcatctggtataaagtaaaagcactaaattgatgctagttataaataataatagctattattattatgtaatattgggaaaccagatgattataccaggactttgtggttgacgtctgggttgagacctatat

SEQ ID NO: 197894 - DNA, 193 bp, Homo sapiens
ctcagtccttgcaatccggattgaaactaaggagtctctcctagtgattggccaagagaaaattccctagtctggtgttcactgttatctcctttccaggctactgaaccaaaccatccttggttcccaaaaagtgaaataaaagcacaaatattttctttttaggtaataaagggcatcatagatttgaaca

SEQ ID NO: 197895 - DNA, 377 bp, Homo sapiens
tgtttctgagaacttatccatttcctctagattttctaatttgtttgcacagaggtgttcataatagtctctgaatatcttttgtatttctgtgggattgggtgtaatgtcatttgtcatttttgattgtgcttatttgggtcttctctttttttgttaatctaactagtagtctatcaatcttatttattctttcaaaaaacaaactctgtttcatttatctttgtatggacttttgcatctcaatttctttcagttgttctctgattttagtaatctcttttcttctgctagcttttaaagccatacttatgttggggttccccctcccatatagacactttaacatttgtcctcctctcaaggccccaggaata

SEQ ID NO: 197896 - DNA, 355 bp, Homo sapiens
caaaattcaaaattttgacattatcaaatgtcagtgagtttcaaaggttttaaattggagcagtcaatttgaagaacaacctcacagtaacattaaagaaaaaaaagaaaaaaaaaaggaaaaaaagaagtaccaggcttcaatacctgccccagggaaatgtgataatgtgcataatgaggcatacaaaaagacgttaaatgtctcattccattattgaaccattaaaaaaaaaactcacttccaatacataaagtgccacatagactatattatatattgtatatatttactatactttattatgcacctgtcaaaaagacaaagagacattctcatgagtactgacataaaa

SEQ ID NO: 197897 - DNA, 1546 bp, Homo sapiens
ctgacgtcagcgggagagtattatggtctgtcgtgcgctggctgctgcttttctgctcctggaagcggccaaggggggaagcggcgagtcaacatggagctttcagcggtgggggagcgggtgttcgcggccgaagccctcctgaagcggcgcatacggaaaggacgcatggaatacctcgtgaaatggaagggatggtcgcagaagtacagcacatgggaaccggaggaaaacatcctggatgctcgcttgctcgcagcctttgaggaaagggaaagagagatggagctctatggccccaaaaagcgtggacccaagcccaaaaccttcctcctcaaagcgcaggccaaggcaaaggccaaaacttacgagtttcgaagtgactcagccaggggcatccggatcccctaccctggccgctcgccccaggacctggcctccacttcccgggcccgggagggccttcgaaacatgggtttgtccccgccagcgagcagcaccagcaccagcagcacctgccgcgcagaggcccctcgggaccgggaccgagaccgggatagggaccgggagcgggatcgagaaagggagagggagcgagagagggagcgggaacgtgagagggaacgagagcggggtaccagcagagtggatgacaagcccagctcaccgggggacagctcgaagaagcgaggccccaagccccggaaggagctcccggacccctcacagaggcccttaggcgaacccagcgccggcctcggagagtacctcaagggcaggaagctggacgacaccccttccggggcaggaaagtttccagccggccacagtgtgatccagctggcccgaagacaggactcggacctggtgcagtgtggtgtgaccagccctagctcagctgaggccacgggcaaactggctgtggacaccttcccggccagggtgataaagcacagggctgccttcctggaggccaaaggccagggtgccctagatcccaatggcacccgggtccgacatggctcaggcccccccagctctgtggggggcctgtaccgggacatgggggcccaggggggaaggccctccctcatcgccaggatccctgtggccagaatcctgggggacccggaggaagagtcctggagcccctccctgactaacctggagaaggtggtggtcacggacgtgacctcaaactttttgaccgtcaccattaaggaaagtaacacggaccaaggcttttttaaagagaaaagatgaatgctgggtgggtgtgtccaggaggagagcaggggagagagtgagcgtgagcttggcatagtgatttttatttctgggtgggatgtggccttttggctggtcccgtccctgatgtcacccccaccccaccagcccctttcatccctccttcctccccctcagtttttgttggaaagattatctctagagttatattttctattagatgtaaatatgttatttaagaaaaatatctaaatatatatatttcaactcgaagttgttttatttaaaggagagagac

SEQ ID NO: 197898 - DNA, 572 bp, Homo sapiens
gacccacgcgtcggggcaggaggggccccatctcattgtgctttagttggggcagcccgaatgagctggggcaggaggggcccccttgccccagagctctagggaagttgggccctgggtacaggtttctgagagtgtctggaggggcttggcctgcccacctcacccctcctcccttctcccacagcccaatgccagactcctggcaccaaggcccggcccagatttgctctctcttcccattggccaggcaggccaacaaaaggttggctccccaatcagaaaaaagggggggtggggtcagtctgttttccttttttctattttttttttttttaaggtaaagaagtctattagggaaaaaagtattaacttgaataagcttttcgtgtgtgatgttgaaggttaaaacgtccccagcaggcagggacaggaggtttctccccaggaccacaccaggaaatgcactttagggaggggtgtgtgtgtggtacacgcagatcgtgtgtatgtcatgtggataaaatctccccgttccctcgttcctttccttactccgcagaaagaaaaga

SEQ ID NO: 197899 - DNA, 1517 bp, Homo sapiens
ggccttgggaccagtttccagaatgtcgggtcaccctgcggcattcccgcagcaggcggcaggcgcccagccctagctcggcgtctaggaagcagcgctgcgggacgcccgcccggctccgggaccgcgggagggacgcatggaatacctcgtgaaatggaagggatggtcgcagaagtacagcacatgggaaccggaggaaaacatcctggatgctcgcttgctcgcagcctttgaggaaagggaaagagagatggagctctatggccccaaaaagcgtggacccaagcccaaaaccttcctcctcaaagcgcaggccaaggcaaaggccaaaacttacgagtttcgaagtgactcagccaggggcatccggatcccctaccctggccgctcgccccaggacctggcctccacttcccgggcccgggagggccttcgaaacatgggtttgtccccgccagcgagcagcaccagcaccagcagcacctgccgcgcagaggcccctcgggaccgggaccgagaccgggatagggaccgggagcgggatcgagaaagggagagggagcgagagagggagcgggaacgtgagagggaacgagagcggggtaccagcagagtggatgacaagcccagctcaccgggggacagctcgaagaagcgaggccccaagccccggaaggagctcccggacccctcacagaggcccttaggcgaacccagcgccggcctcggagagtacctcaagggcaggaagctggacgacaccccttccggggcaggaaagtttccagccggccacagtgtgatccagctggcccgaagacaggactcggacctggtgcagtgtggtgtgaccagccctagctcagctgaggccacgggcaaactggctgtggacaccttcccggccagggtgataaagcacagggctgccttcctggaggccaaaggccagggtgccctagatcccaatggcacccgggtccgacatggctcaggcccccccagctctgtggggggcctgtaccgggacatgggggcccaggggggaaggccctccctcatcgccaggatccctgtggccagaatcctgggggacccggaggaagagtcctggagcccctccctgactaacctggagaaggtggtggtcacggacgtgacctcaaactttttgaccgtcaccattaaggaaagtaacacggaccaaggcttttttaaagagaaaagatgaatgctgggtgggtgtgtccaggaggagagcaggggagagagtgagcgtgagcttggcatagtgatttttatttctgggtgggatgtggccttttggctggtcccgtccctgatgtcacccccaccccaccagcccctttcatccctccttcctccccctcagtttttgttggaaagattatctctagagttatattttctattagatgtaaatatgttatttaagaaaaatatctaaatatatatatttcaactcgaagttgttttatttaaaggagagagac

SEQ ID NO: 197900 - DNA, 2088 bp, Homo sapiens
ctgacgtcagcgggagagtattatggtctgtcgtgcgctggctgctgcttttctgctcctggaagcggccaaggggggaagcggcgagtcaacatggagctttcagcggtgggggagcgggtgttcgcggccgaagccctcctgaagcggcgcatacggaaaggacgcatggaatacctcgtgaaatggaagggatggtcgcagaagtacagcacatgggaaccggaggaaaacatcctggatgctcgcttgctcgcagcctttgaggaaagggaaagagagatggagctctatggccccaaaaagcgtggacccaagcccaaaaccttcctcctcaaagcgcaggccaaggcaaaggccaaaacttacgagtttcgaagtgactcagccaggggcatccggatcccctaccctggccgctcgccccaggacctggcctccacttcccgggcccgggagggccttcgaaacatgggtttgtccccgccagcgagcagcaccagcaccagcagcacctgccgcgcagaggcccctcgggaccgggaccgagaccgggatagggaccgggagcgggatcgagaaagggagagggagcgagagagggagcgggaacgtgagagggaacgagagcggggtaccagcagagtggatgacaagcccagctcaccgggggacagctcgaagaagcgaggccccaagccccggaaggagctcccggacccctcacagaggcccttaggcgaacccagcgccggcctcggagagtacctcaagggcaggaagctggacgacaccccttccggggcaggaaagtttccagccggccacagtgtgatccagctggcccgaagacaggactcggacctggtgcagtgtggtgtgaccagccctagctcagctgaggccacgggcaaactggctgtggacaccttcccggccagggtgataaagcacagggctgccttcctggaggccaaaggccagggtgccctagatcccaatggcacccgggtccgacatggctcaggcccccccagctctgtggggggcctgtaccgggacatgggggcccaggggggaaggccctccctcatcgccaggatccctgtggccagaatcctgggggacccggaggaagagtcctggagcccctccctgactaacctggagaaggtggtggtcacggacgtgacctcaaactttttgaccgtcaccattaaggaaagtaacacggaccaaggcttttttaaagagaaaagatgaatgctgggtgggtgtgtccaggaggagagcaggggagagagtgagcgtgagcttggcatagtgatttttatttctgggtgggatgtggccttttggctggtcccgtccctgatgtcacccccaccccaccagcccctttcatccctccttcctccccctcagtttttgttggaaagattatctctagagttatattttctattagatgtaaatatgttatttaagaaaaatatctaaatatatatatttcaactcgaagttgttttatttaaaggagagagactctcattgtgctttagttggggcagcccgaatgagctggggcaggaggggcccccttgccccagagctctagggaagttgggccctgggtacaggtttctgagagtgtctggaggggcttggcctgcccacctcacccctcctcccttctcccacagcccaatgccagactcctggcaccaaggcccggcccagatttgctctctcttcccattggccaggcaggccaacaaaaggttggctccccaatcagaaaaaagggggggtggggtcagtctgttttccttttttctattttttttttttttaaggtaaagaagtctattagggaaaaaagtattaacttgaataagcttttcgtgtgtgatgttgaaggttaaaacgtccccagcaggcagggacaggaggtttctccccaggaccacaccaggaaatgcactttagggaggggtgtgtgtgtggtacacgcagatcgtgtgtatgtcatgtggataaaatctccccgttccctcgttcctttccttactccgcagaaagaaaaga

SEQ ID NO: 197901 - DNA, 1474 bp, Homo sapiens
cactggacccggcgacgtcccccagcttcccgcgctggcgtttctcgcaggatgtccgccgcccacgttgggaagagcggtggacaggaaggacgcatggaatacctcgtgaaatggaagggatggtcgcagaagtacagcacatgggaaccggaggaaaacatcctggatgctcgcttgctcgcagcctttgaggaaagggaaagagagatggagctctatggccccaaaaagcgtggacccaagcccaaaaccttcctcctcaaagcgcaggccaaggcaaaggccaaaacttacgagtttcgaagtgactcagccaggggcatccggatcccctaccctggccgctcgccccaggacctggcctccacttcccgggcccgggagggccttcgaaacatgggtttgtccccgccagcgagcagcaccagcaccagcagcacctgccgcgcagaggcccctcgggaccgggaccgagaccgggatagggaccgggagcgggatcgagaaagggagagggagcgagagagggagcgggaacgtgagagggaacgagagcggggtaccagcagagtggatgacaagcccagctcaccgggggacagctcgaagaagcgaggccccaagccccggaaggagctcccggacccctcacagaggcccttaggcgaacccagcgccggcctcggagagtacctcaagggcaggaagctggacgacaccccttccggggcaggaaagtttccagccggccacagtgtgatccagctggcccgaagacaggactcggacctggtgcagtgtggtgtgaccagccctagctcagctgaggccacgggcaaactggctgtggacaccttcccggccagggtgataaagcacagggctgccttcctggaggccaaaggccagggtgccctagatcccaatggcacccgggtccgacatggctcaggcccccccagctctgtggggggcctgtaccgggacatgggggcccaggggggaaggccctccctcatcgccaggatccctgtggccagaatcctgggggacccggaggaagagtcctggagcccctccctgactaacctggagaaggtggtggtcacggacgtgacctcaaactttttgaccgtcaccattaaggaaagtaacacggaccaaggcttttttaaagagaaaagatgaatgctgggtgggtgtgtccaggaggagagcaggggagagagtgagcgtgagcttggcatagtgatttttatttctgggtgggatgtggccttttggctggtcccgtccctgatgtcacccccaccccaccagcccctttcatccctccttcctccccctcagtttttgttggaaagattatctctagagttatattttctattagatgtaaatatgttatttaagaaaaatatctaaatatatatatttcaactcgaagttgttttatttaaaggagagagac

SEQ ID NO: 197902 - DNA, 659 bp, Homo sapiens
ggaagggcggggctttaactgtttatttgggttgagagatcctagattggtaccttaataatcatcttaagttaatttacatgttgtggaatcccaagtgactagaaggcatatagtaggtattcaataaatgttcatttactgggaattaaagaagacagcccatccaaatatagtgattaataatgtaggcttggaattcttggaaaatctgtcaaataagggagtggacataggatgaaatggaaaatatgttaacattccttctctccaaacatttattaatatattagattcacagaaatctaatgaaaataatacagatgacaggagtcaggtaaacctgatttcaagtcctgtctcttctacttacaagctctgtgatcactgggaaatttcttaaattctcagtcatacaattatagggttgcttgaagattaaataattttcagtgaatattagcttttaccattgccatcatcatcatgactgttcatcgtgataattgttaaagttctaaaatgtctttataacaggcttatcacatgctttgtgtaatattcttcctttctatgcctgactttggtatgtatctcagtgacaaaaggaattttttgtttattccctggcagtaactgggccatgtttaggactaaag

SEQ ID NO: 197903 - DNA, 622 bp, Homo sapiens
cagcgttgtccatttcacaatgtgaggatacagcaagaagtgtcatcttggaagcagagagcaaacactcatcagacattaaatctgacagcaccttgatcctggacttcccagcctctagaaatcgtatgcaatggtatgaggaactgttccacattaaaggagactaagaagaccataacaactcgatgcaatgtgtgattctggactggatcttgcattggaggagaaacatgctataaaaggtttactgccatatttagaagagatagatagcatttccagcttccactcctctcattttaatgggcaacaagaaaaggaactaccaggagtaaggttcaaattttaatacacagaagaggtgtatctaaaggtttaatgaaaattgaagggtcagaagtacattcatgtccagggatcaccaatgaggaaatgtgcagcagagctgataatattgtgtaggagaacagacaaggaactcttctactgatgaccaaggtgcttcccaaccactgccactgtctgcattcgagtttcgttttacctctggacatttgctttggctgctgccacttggaatgactgccacagctaaatcgagtgatatttttaaccctat

SEQ ID NO: 197904 - DNA, 554 bp, Homo sapiens
ggttatagcacactggagaaatagtaccaatagtccgtgaaatttgtggctactttttttcccctaacctttaaaaaataatcattgagttcagaggtacaagccactgtggcagcctctgaaattccaagagagaatatagctacctctagggcagttgttcttcagtaagtttgaggggagaagtcctggcagtcagcatattctctgaggaaggtaatgatacactattagattttttacttatattttatgaatagtgatttctagataaagctatctatttaattactctaagtttaggttgattagaaacattaactctgctttatgtcataaaatcattaagtgtaagtatacatacatgttcatgggggtgaaagtaaataatctccaagcatcgtctgttaacattaacactaaaatcactaattcaataatgtttatctttttttccccaaagcccaggtatcaggcttaattaatatttatctttttttttttttgagacggatcactccagcctgggcaacaaagcaagacccagaatcttg

SEQ ID NO: 197905 - DNA, 632 bp, Homo sapiens
ttgcctaatagcatccatgtgtatgtttaacccacattgcttattatacaataaaggtatatctagtaaaaactacagactttgaaacatgttgtgcaccatggttatgaaacgtctggcttacaaaaaatatataaactgcttactatgtgaccgacacttgttaattaaaaatataatccttaaatgacaattatttttattcttctgtatgtgtttacttatcctgtttcctactttgttctacttaatttaaaataacatttaatttggggatagtttatcccagaaaaaaaaaagtgttacacagtttatactccacgatttaaatataaacacaaaatcttagacatctccagcaatataaaccccttatctgagacagttaatttgaatagttgatgtttctttcattatactttgataaacctgtgaaaacaaaatgctacagtaattactgttactactccctttaaaaatgtaaagtagttaaattttcctagacaacaagcaaggacaagttacagagaacttgaataaaagtagcaacgtggtcatgttgaatgtcaatctaaaaaaagaggtgtctaatctggagactgctctctctcgcctttttaaattccaagagt

SEQ ID NO: 197906 - DNA, 644 bp, Homo sapiens
acctcacctccaccatctcctcacctggaggctcactccactctctcaattcctctacctgctgcctcaagccccctgagactgatcattctccgcaccgcagctggggtcacctcccaaaagcatagatcacacctgttgcttccctgctcaactctctcccaggatttcctgttctcacccaaagtccaaacgtctcactgggacttccaggacctctcttcgtctcttcctgtgcccttgcttacccctgacccagctttcctgggcccctcattgtctcaaactggccaagctctgccgggggtggggttcatgatcaaaagcaatggagccggcagcgcatactgggccaatggtcttgcatttgctgtcgggtgagtcacctgacaactcatcacccaagtcctgacctgcacaagggggagagtaacggttcctccccagagaagcgtctggaggagcaaatgagtggatgatgtcaccgggcacagtggctcacgcctgtaatctcagcattttgggaggctgaggtgggcggatcacctaaggccaggagttcaagtttgcttcggcctctcagaaagtgctgagattacaggtgtgagccactgtgcccagcctctgtgaatatatcaaaatca

SEQ ID NO: 197907 - DNA, 747 bp, Homo sapiens
acctcacctccaccatctcctcacctggaggctcactccactctctcaattcctctacctgctgcctcaagccccctgagactgatcattctccgcaccgcagctggggtcacctcccaaaagcatagatcacacctgttgcttccctgctcaactctctcccaggatttcctgttctcacccaaagtccaaacgtctcactgggacttccaggacctctcttcgtctcttcctgtgcccttgcttacccctgacccagctttcctgggcccctcattgtctcaaactggccaagctctgccgggggtggggttcatgatcaaaagcaatggagccggcagcgcatactgggccaatggtcttgcatttgctgtcgggtgagtcacctgacaactcatcacccaagtcctgacctgcacaagggggagagtaacggttcctccccagagaagcgtctggaggagcaaatgagtggatgatgtcaccgggcacagtggctcacgcctgtaatctcagcattttgggaggctgaggtgggcggatcacctaaggccaggagttcaagaccagcctggccaacatggtgaaaccccatctctactaaaaatacaaaaattaggctgggcgcggtggctcatgcctgtaatcccagcattttgggaggccgaggcgggcggatcacctgaggtcgggagttcgagaccagcctgaccaacatggagaaagcctatctctactaaaaataca

SEQ ID NO: 197908 - DNA, 606 bp, Homo sapiens
ttgtttactgcagtgatctagaggatccgaaatagcgcagaacttcacatttatcgattgaggacttctggagtgctttccagctcttccatgattgccccggttcactcctgaccagctttcctgggcccctcattgtctcaaactggccaagctctgccgggggtggggttcatgatcaaaagcaatggagccggcagcgcatactgggccaatggtcttgcatttgctgtcgggtgagtcacctgacaactcatcacccaagtcctgacctgcacaagggggagagtaacggttcctccccagagaagcgtctggaggagcaaatgagtggatgatgtcaccgggcacagtggctcacgcctgtaatctcagcattttgggaggctgaggtgggcggatcacctaaggccaggagttcaagaccagcctggccaacatggtgaaaccccatctctactaaaaatacaaaaattaggctgggcgcggtggctcatgcctgtaatcccagcattttgggaggccgaggcgggcggatcacctgaggtcgggagttcgagaccagcctgaccaacatggagaaagcctatctctactaaaaataca

SEQ ID NO: 197909 - DNA, 322 bp, Homo sapiens
aatccaggaggcggagacttcagtgcaccgagatcacgccattgcactccagcctaagcaacaagagcaaaactccctctcatatataaataaataaaattcaaaaaattgtttcagtcagtaagggaaatgtctctttctggaagtattccagctaataatgaagagggaatgagacaggcacagtggcactcacgcctgtaatcctagcactttgagaggctgaggcacgagagtcgcttgaacccggaagtggagggtgcagtgagcctagatcgtgccatcacactccagcctgagacagagtgaaactctgtctcag

SEQ ID NO: 197910 - DNA, 262 bp, Homo sapiens
ttgtcagcgatggtgaactaggtaggtaattatgacaagtgaaaaaagtgaggtttcagacaaattgatgtagctttctttaaattacttaagtcctctaacataaatgaactagttcttttctcatgttgaataattcttttaattactttaagaatagcttgaaaagcagtattataagtttcagtgtgtttagtaagtttcttagctatttctttagcctttctccttcccattaaggtacctacctatttcacaatcg

SEQ ID NO: 197911 - DNA, 297 bp, Homo sapiens
cccagggaaagcccaagaggaaatgtattgaaatagtgataaggagcaagtaattttttctaacattgatgacagtcataaaaagccaaagtctgacaaggagacatgactagcaactgcaatggctggacagaccaaaaagaatttatgaggaagaaaaccaaaatgaatcattttccaaatccagagataaagagaaaaaagaagaactttgatgattaggtatagccagaatgtcccgtcaaaaaaaataagcattcctttggggaaaagctgctgccactatgagatacactt

SEQ ID NO: 197912 - DNA, 203 bp, Homo sapiens
tgttaggattataggcatcagccaccacccatgacctagatcacaattgcagatagagacacatgtcctctgtgttgccagcattagttgtgtctgggtgtaccctgacttatatgcacttgcacgggaactccgttagcaagcagcaggctgcctggataggatggtctgaaccaggagatgccccccacccatcagccagg

SEQ ID NO: 197913 - DNA, 678 bp, Homo sapiens
gagtttgaatctggacatgactccttaattgtgtggggttaggcaaatgactcaatttctttaagatttggttttcccatttctaaagatggagatactacagtttattctacacagaattgtgacagaaaccaactgagagaatgcctgtaaagctttttgcactatgactggctaccaaaaatacttaggttaagctattattattagaattattagcaagtcctttttattaagactaaactgcctcatttagctaaaacctattaatcttattgggccctcagaattcacaaaggacaaactgactctactgtatggcaacaaagtctaacacactaatcaggtctaggtctctcaacaattcctcatatgacaaagttttctaatataatattattcatggtaccctactcttctgtgcattaatggctattgtcattttttaaaatgtgattctgtaaataaaattcagcacttttgataaggtgcaacaatgccagagtacagtggaactatcaatttgtaggattcatatgccatatctttgttactgacaaataagtttactttaaaagttagccatgagagatctattgcatctgggaagatggagtagatatatttccaaattcctcccactatatgtactaagtacaattaacgaccctggacatt

SEQ ID NO: 197914 - DNA, 648 bp, Homo sapiens
ccgcagtggcaagacttgcaggaactcaagttgcaacgaccagaatgggcaattcccctctggctagggctggtctaaatgctccctccatgggtgccacctgagttctgcctggtattgctttctgctgcaacaaggcagcactgagtttcaatgcaaagttcttcagtcactgtgttctccctctcctaagctcagattctctctccacaccacatggtcgttgccaggggatggaggaggggtggtgttggcaattcaagactgtctttcctaccctcttcagtgcctctttcactgatatgaagttataaccagatattttgattgctcgtctgatttttggttcttatgaaggtgctttattgtgtggatagttgttcaatttggtgttcctgcagggaggatgatcagtgaaggcttctattcagccatcttgctctgcttcctcttctcatttactgaataactttcttacagagtttgacctaaagatgcaattaatgattagttcagattgtgaagctgaaagctgatgctggtgtcaccttctaaaattaagcttctggttataattaagagctgcagccttggagcattgagtattatctgtggcttggttgctaacagggagaacttcaggatgct

SEQ ID NO: 197915 - DNA, 200 bp, Homo sapiens
tttattttatttttcatttatttacatattttttgagataaggtcttgctctgtcacccaggcaacagctaaagaatgaacagcaccccacttgccaacagattgaaaagaatgggtacagtaggcaactgacatttactatcaaataaaatattgttgaccattaatggtcatgaaatatggagaagtagaaaaaaaaa

SEQ ID NO: 197916 - DNA, 484 bp, Homo sapiens
ccatgctaatcgtggatcatgtgttatttcatttattccttacagtcaccttattttatgcatgaggaaactgagagctcagggagagacgagggaaactgcaacccaagtctatggttgtttggatcatggatatgtctccagattaaataaaacttccaaatgatcgatgccctatctgctttattatttctgggatcctgagtacttttatgcttggaaatatgtcctgctgtcgagcaggccacaccccaatctaagccagctgccagcaaactgagcaggaatgctcctgtagaatcaacagtctgaaaaccctcacctgagactaaacatgtgcttggcaatatcatcatgaagagaggtaaatgctggcaggctggtgataactatcatttctttccccagaggagaggtagttttggtctcttggagagatgacactgatagagagggaatttaatgttgaaaatgtctgaagagg

SEQ ID NO: 197917 - DNA, 604 bp, Homo sapiens
gctttttccttccgaaacatttcttaaatgtatattctttcctctgctttggctcagtattaccttttgcttggacaacttggttttcgacctccacttttgaaccattctcaatcccatcatctaatcattcagctgccatcctataatcattcagtttttatcaacaactattcttacaaaatgtcaatatgactctgtcagtctcaagggtcatttatttcttcatgacttcctactacttatgagtagtagatgtaagcttcttaacagtatatatgtttccttgtcagcactcttgctactaaaccagtttaactgggcctcatctccaccttgtatttcatgtccagcagcaataccgtgcttgctgggtgccggaacacgctactctgtgtccccacttcttgccttagctcatgctaacttaatgtgagttcagcttaggagtccttccctcaggagcctttgctttctcagtgaggtgcgttgagaagcccgctttctgagtctccatggtcccctcacctctaggcgctcatcgctattgctgccttcactacattgtatatgctaagtactcatttatttgcctttctctccc

SEQ ID NO: 197918 - DNA, 455 bp, Homo sapiens
aactagagttgagttgggtcgattattaacaatacagaaaagttactttatctctaaggtcgttcaccacatggttctttcataggcagctcctggttaggttttaatttaccaaaagttaatttatgtaaaacttgtacagaaacatttttttcaccatcaaaaaccccagtccttgacccacctgcccctcttacatcctggcatacagagggttaggtccaaacaagttgtaacaatagacactgaacccagccaagctgtcagcatcaggaacggctgggcatgttatgactgttattctaacagaaccctgtataggcttgaaaataacatggaagtggatgattttaggcatggaattctttccaggcagcattgccaggtgaacagataagtcatatgcatccacaaataacagccatttaagaccctgtataatccccccacccagc

SEQ ID NO: 197919 - DNA, 369 bp, Homo sapiens
tctttcctgagcactgtatcccaaatatttatcgtaagttcccccttcttccctacctacttggaatttccatttggatgtcagtcatctcacactcaacatgtttaaaactagattcttattttcctttcctaaacctattcctcaaatcatttctcctttcagctgatggaaattcaaatttccatttacttattccccaaaagttggtgtcatcttcaacttctctctctctgttggaccttatatccagtccatcgatgagtcttatcccttctaccatcaaaatatattcagaatctgaccactttcaccctctccactgctgccacccttatctattccgccatcttatcccaccttgattgc

SEQ ID NO: 197920 - DNA, 534 bp, Homo sapiens
tgaatacttctctatggcagtatcttttagagttattatggaccctgtaattctgttctcaaagacgtttaaccactagaggtagacaccaaaaatgttttatttgtctcatttgggactctaattcagtgaagttggctgtttggagtctgagactggatctgtttttttattttgttttgttgttgttttgtttgttttcagcctgggcaacagagtgagatcctatctcaaaaacaaacaaacaaaaaaggaacttgtttcctagcaagaagcagatgaggctggtgaataagcataccacataagtaagtaatccactaacttagggaatttcgtgaccagtcactcagcacgccctgttgcgaaggggacggctgaccaataggatcatctcagagtcaccctcacacaacttggcttagcctagttggcaaaagtgtctcttcagagacctaccctcctggaattgaaataaaatgaaaatttgtgatgacgatcagctactgtcagtgtgacttaggtgtagaaatt

SEQ ID NO: 197921 - DNA, 378 bp, Homo sapiens
cgtcttactctccccttacccacctatccattcctgatctttgcttgtgacaagataacctgtgtagggactgcttcctacgtgaagtggtccccagaaggaagcagattggaaggtcctagaaataggaggtgcagacatgcactgagcaggagccgctggcatctttgctggtgactttgagaccccttcctcaggcacttgtctttgaatggtggtcttacctgcaattttgctgtgagctctggagtgcagagagccccccatcttggtctatctcatatgtatgacggtgaccctcaaacttcagcatggtgagtccccccaaggaaaagtgattgcctctggggtgtagtgggggacagaactggacaactg

SEQ ID NO: 197922 - DNA, 614 bp, Homo sapiens
cagggacctgtcttcaggtgttggctagagtgaacagtaaattcttttggcagtctggagtttgtttttcaggcagacgctttaaggggtcagacgccttaataatcccttttttaagggtcatcctagggatgtggtcttgaactgttataaattatgttcatgtttgtttaagtcttttaatggagaagtgggtggacagggatggacaaaatgatttgtgctgaaaatttgcagcttttataggccaaggcttcagtagacaacagagcttacaggaggccaactcaaatttggtcaaggagagaatccttgtcagtaatttcagctctgatagtgtatcagagtatacccagaaagataagattgtggacttcctgctactctccctttaggaggaagaatgtgtgagaatgaacaaggaaacgaataaatggggttgttatacattgcagtaagtgcctttaaggaaatgaatggataatgagatagaatgattagaagagacattttagataaagaaatcagtaaggtttgtctgagttgacatttgagttgagaccaaagtttgagaaagattcagccctgtaaagaactagtagaagcatgtttca

SEQ ID NO: 197923 - DNA, 596 bp, Homo sapiens
cagagacaactgatgcaagtttatcactatcatgagacctcttccatagaaaaaccatcatcacattaactgcttgatttctttcatccaattcatggaatcaaaataaagcttttgaaagttaactctgttcaaagtaaaacatctcatattactgtgtatgttgtgaattgtttaaaaacatgtaacactgaagataaaatttttgttttagtgatgatgagaatacaaatattggttaagtagactgtcatggtaaaaacaatattcccactaagctaaaacaaaaaaaggataaaacaaaaaatatacttgaaatgattatggtgtatacattactcataactatatgcaaaaagactataatattttaccaactgaaagatacgctgtagatgtggaaatgtacaaatatacatagtaactgaactataaaatctgtgatcaagatgacaatttacatattaaatacatataaatgacagcatgtgatttctgttacatgtcaatgatatttttggaaatgtttgagcctttgaagaactacttcataaatcaacttatgtgtcctacaatggtatcaagttttataaatg

SEQ ID NO: 197924 - DNA, 266 bp, Homo sapiens
ggaggattaaaggagcaaagacttatttcttggttgcactaaaagtctgttatgcgttggctgtgagtctgtttcacgctgtctgcgatctggaacccaggctgctgtggtggttccatatggaaagttcccggtgaccaccgaggaggaagagagtgtggcaaaatgaagttacttccctgacgtcctcagtccacgaaagtcatgtggccacaccacattcaagtgggcaagaaatcaaaccacatgatctgaaagagaccttt

SEQ ID NO: 197925 - DNA, 411 bp, Homo sapiens
atcgctatttgtgcatgtaaacacacacacacacatctccaataaaactccactgaattgtaacatgcaactgtaataaagtgattaaaagagaatgacatagcaatataaagagcaaaaactatgtgaaagtcaatgaaaaaaattaatccttcagagcttccattagtcatcagaatcatcttaaaataaatctttaaatttgtgatagatttgaacatttgaagcagccagaaatcagacttatcagacttgaatgatatataatttcatgctctttgccccataacctcctacaactactgtatgatacataattctttctaataaattaaacataagtttatctgataaatctgaaatatccttaaaattaaagtggagattctagatcaaagcgtggcggggatc

SEQ ID NO: 197926 - DNA, 602 bp, Homo sapiens
aattttatatgcctgttacatttgtggtaggagtttagctagattttgctggaaaactacagcttatttataaagtacacacattattttaatcgtacaaaaatgtgtaaaatatcttactcaccatgtaacatgggcaccccaaagtacatgagtttcttaagaagacatatgaaatcttcaaggctataaagaggacaggaaatgactcacttcccaatgactccaggtagattaaatacgcccccccttttttttaagacagtgtctcactctgtcatccaggctggagtgcagtggcacgatgttggcccattgcaacctccacctcctgggttcaaccaattctcctgcctcagcctcctcagtagctgggattcctggtgcatgccaccatgcctagctaatttttgtatttttagtagagactgggtttcaccatgttggccaggctagtctcgaactcctggcctcaagtgaggccaggcctcccaaagtgcctgggattacaggcgtgagccaccatgcctggcctgaacgtcttattatttaaaagtgtgttggggtggtggtggggccttattcctaatacttaaaatcat

SEQ ID NO: 197927 - DNA, 498 bp, Homo sapiens
tatacacatagctctctttttatgaagtggaatggcttagtgattaatatttctgtctgaggtgggggtgctttcttaaggttattagtagaaatggtgtttggagttgtttagtttctgccatgggtataagtgagttgtctcttaaactgactttgcacactggaaaaataaaatgaaaggcaggcctggctgagagaccagagcttctgtgccctttgatgtatcatttgagccctttggactaagaaaatgaacttcaacttccccgtcctctgcttcacaatttagttatatctagcccttctgccaaagagagtagtgtgtccttctgcctttttgctctatattctctcaagactcctgaaagctttttctagtatttctcccttcttttcggctcttcagattccttttacccactgtttctttccctggcctgctagtgggctcttttccccactcacctcctctctgccttgttttcccctcagcttc

SEQ ID NO: 197928 - DNA, 595 bp, Homo sapiens
aatttatccagaccaggtgctgtggctcactcctgtaatctcagcactttgggaggctgaggtggcagcatcacttgaggcctggagtttgaaatcagcctggagaacacagtgagaccttttccctataaacaatagtaacaaagggttaagaaatatatagcctttctgtggtggtgtcacaggtagggtagctgtgttagctcagtctgctcttgtgtggattcactgaaagacacgcccagctccgagcccctgtggtccctccgaggctgctgggccagccccctggcggctccccttcccttgtggctggaggatggactgtgggtgcctgctgctctcccaggcctcatcaccccatggccttgggctcagtttctggggctgcccttgtggacgggctcctgttttggcccccagttcttcattcagccatgacagtgagtgccggctgcacacgcagcagttgtgagccccaaggcccagacgggagcacagtggacacagccccagcctctgggaccgtggcccggtggggagatggaggaggcaggagagccgtctgataggggtgaacagctgagaaaatagg

SEQ ID NO: 197929 - DNA, 191 bp, Homo sapiens
cccaaccctcccacctccatctctagtcaaatgctggtgtgctttctagcactaaataatagtttgcatttcctggaattttatcttggtgaactcacatggcatatactctttttggtaaggcttcttatacttcgcatgtttattttgagactcatgcatgttttggcgtgtatcaagactacgtttct

SEQ ID NO: 197930 - DNA, 521 bp, Homo sapiens
atatcatttctattttctagctgaggaaatggaggctcaaaaggttatacagtttgcaccactaagctaatagatttgaattcagcctgaactacacagcctgggtactgactgccttccgatcccacagagtgaggacatcccaattcacagcatccttgaagaagaagatgaagatggtaaagacaaaaataatcatgatagtaaaacactagctaacatttggtgagtacttattataagccaggctctgtaccaagtcccttatatagattaacccagttcatccatacaactcacaactctagtagtaggcaccaacattatcctccttttgaataaggaaccagaggcacagaaaaatcaattaacttgtccaagttgcaagagcccaagtttcaacacagggagcttgccctcttcagcggcctctcctgtcttctcgggatggggagttcactgtcttacaccgtcagaaggctgcattcagaaagctgctctttccattgaactgaaatgag

SEQ ID NO: 197931 - DNA, 275 bp, Homo sapiens
tagggaagaaagtgctcagcaccctttggagaaggcccaggcaccagagcagaatttacaatccaccacaggaagcaagaccctcatctcatctcctgtgtttgcaacttcctccaactccaccccagctgggacagcctcaaagaccccagtcctcctgacgccagaactctgaggagttctattgtttaggtggttttcggttttgattatttaatacagtcatttctggttttatattcacagctttggtcagctgggatagggtttttctt

SEQ ID NO: 197932 - DNA, 378 bp, Homo sapiens
ccacctcacatttctagttctccagagcaaaaggactagctctgcctctcatttcttgactgtggcagacagcccctgctccctactggcgtggccagatttccgggggcctctctgtagactgcggtgtggggtgcatttcaaccgtgaccttgccctcgttctatctccttccaacctctttggttatagccatagtactcctcactctgtcttttactcttctttccttcctttcctttcttcaactttctttcttcccattgcctccctccctcctttcccttcttctctaccttttgagcttcattgattatcctttaaattaatcaaatttaaattaatcaaaattaaatgatgcttgttgcaagtaactta

SEQ ID NO: 197933 - DNA, 540 bp, Homo sapiens
cttctttttattccctagcttatgtttcattccctcttgtcttgatgactttattatagctatttaaaaaaataatgcgtgttagaaccttttatatgttgagtataaataataaattagtagaataaaatcattgtagattaataaattttattaattttgctagggattcattgagctttcttaatttgaagttttatagcgttgtttcttttaatattgcctttcccttattctctctcatctccatctaggactctgatgagatatttgtagacccctcattctgttctccatgtctgtgaagttctttcatattgtccttccctttgtctttctcagccacattctggatagtttttttcagatctatcttccagttcactggttttctcttcagctttgtcatatcctgtccatttggattataatttagttactatagttttcatttctaggtgttttatttgattattttcaaaacctgctttttcatattcactttttccttagtcatattttaaaatatttcttataaac

SEQ ID NO: 197934 - DNA, 424 bp, Homo sapiens
attcccaaagcctctgtggatatattttaacactgtagacataggtgtgagcctctcgaaaccaaggtagattacatcactagcctactaaaacccccccaccaaatttctaacagcaaaaattctgaaccaataataagaagcacttcataacatggcccagaatgattttctcagtcttagctttttctgcctcccagcaacacaaggccccattttaaacaggccttgcacttccacttcaccttacagggcttgttatctgggtctcctcctccccctataagaccctttaaaatacatctcatccttccaaggccaaactcaatgttgccatctccagcaatgtgttacatatagccttgatgttgcttttaacaattctatcggccaggcgcagtggctcacgcctgtaatcccagta

SEQ ID NO: 197935 - DNA, 908 bp, Homo sapiens
atgctttcactgcttatagaccagaagtaattaacaaacacctactatgtgctagacaccctacaggggatacctctggatgacttacagggacagcaccaaaatacaagtaccatgcttgcaccgcatgtcaggcactgtatcatgacctaaagaaaaggagaggcaaatagacaaaccaaagtcctgcctctaatgaagtgtaatctagctagtagactagatttggattttcggacagcagaatgtgacttgatagttgaaggtaaatgcaaatcagagttgaggacaagagaaaggtccaaatcattatgtttttggtacttcaggacctttctcatctccctaaacaacagaagattcaatggtgtactcactttttttttgctgaggcaggagaatcgcttgaacccaggaggcggaggctgtggtgagccgagatggcgccactgcactccagcctggacaacaagagtgaaactccatctcaaaaaataaataaataaataaataaataaaaggacaacatagtgaaataaggacactacaaggtttagttgaacagcctgggcttgtcagaggaactacaaaatgggcatcataataataatccctatttcacaaacttattgtgaggaacaaggtgtgataacatctataaaagacctattcttcgctcatgggaatatgaagaattacgcatcttttgccttattctgaattagaattaaattagataactaggtaccatcattaacctagtgagactgtatcatacttccttttgttttttgaagaaaacaagctgattcatagttttctcccacaaagaaccctgctgccaatactaaccgaaaaaaatggggtaaatcttgcctgtagcactagtctataagctctctctcctg

SEQ ID NO: 197936 - DNA, 801 bp, Homo sapiens
ctgtggcctatgactgcttggcaatgtgtcctgtggtcacagcagagttgagcctaggtcagggacagtggtaggacccacccctgcaggtgtcatactgggcatttgatctgggatgtctttgtccatgccttggtaaaggggcagtctgtcagattagggaaactgaggcaggattggtgtggctccatatctgccagtagtcactaagtgacctggggcccaactcttggccagaagtcctgaagccgcctgccctgcagatgccttgggtgtggcctgcttggcccttttaaaactcttaaatgaggttccagccttaaaggaccacagcttcacagccggctccagggtcctctggagagagggagggatgcggccgcgctgggccttctctccttccgcctcgcgttggcagtcctgctggggttccttcccttgcccgcgaggcatctgatcctgagagtccggctctcaagctgcgactgggaatgggccccagcagcctccctgcgctcctcggaacaaatgcaggcacgaagaggattctgcgagctgccgcgggtggagagccgtgtttatattggtgccgcttcatacacacatcatgttttgaacttgactccaaggcctttgcggggaggcacctttctctcccccaaggggtctttgctggtggattcacggtgcctgcccagagggatgtgtgggacttagtgtggggagggagcccatgcttgatgaactcggcctgagtgggccctgatcagtgcgtcgtagaggcccgcatgctgagtctca

SEQ ID NO: 197937 - DNA, 782 bp, Homo sapiens
taacaagggtctcctctggcatatgcaaaaagactaagaagatgcttttgcataaactcaaagttacaaaggatagtttccggtgccaataaaattctgctactcactgaataaactaatctgtcaaagaattagcaacaacctaatcagactcaggcaaactctagttgaaactcgggtaaaattaggaaaaatactaaatgagattgaaactggaccacaaaaccacttctttgaaacaaaaaaaaaatcactgtaacataaacaggcacaggagtatggagcagactcgtacagattaagtcttaatttaaatgactgattcatttaaaaagaaaaagaaaataccaataaactactacctttgtcactcatctacaatgtgctaggcactgacctgggtgtaaaatatttctgaaacagtgttccaatgtccattctccagtttgctgggtgttatgaggcagctattcctaaagcaatagcagtggcagcttcctagtcctgaatagtagctatatactgtttttaaaacagtttactggttccattggtggcctcacacataaaagctcccaaagaaggtcagttctacaacaatgttctaagcatcattattgctcctctagcctctctaaaaatcatttctaagcacctacatctcatattgtttccctttctgcttaaaatccctagtgctgccgggcgtggtggcacatgcctgtaatcccagctactagggaggctgaggcaggagaaacgcttgaacctgggaggcggag

SEQ ID NO: 197938 - DNA, 835 bp, Homo sapiens
ctggctaagctctgttcctgctttcatatactgtaaggttcttctgaacagctgtctggtagcccctgaacaccactcaacactagtgcagtactcaagtgactatcacacaaatccgtgtctggggatctcttcacacccagagctcagcatcaacatgccatgtctcttatatctagccatgctccagacctttagagaaaaaataaaccttattttcaatttaaagtaaaatatacccacataaaaaccttgtcctaaaactagataattttatttcataacaggctcaaactgcttatcaagcatgcatttgctccaacagccactcatcagcttcaacactgtcctcatgttaacttcccttccaaagggaaaaaggatgtgatccacagtatttttccaaaggaaaattaatgaacttccccgaaattaaaacaaatataacttaatacacaaaaactcggccaggcacggtggttcactcctgtaatcccagtactatagggggccgaggcagctattcctaaagcaatagcagtggcagcttcctagtcctgaatagtagctatatactgtttttaaaacagtttactggttccattggtggcctcacacataaaagctcccaaagaaggtcagttctacaacaatgttctaagcatcattattgctcctctagcctctctaaaaatcatttctaagcacctacatctcatattgtttccctttctgcttaaaatccctagtgctgccgggcgtggtggcacatgcctgtaatcccagctactagggaggctgaggcaggagaaacgcttgaacctgggaggcggag

SEQ ID NO: 197939 - DNA, 280 bp, Homo sapiens
aattagggaaagagaaggaggtagaaggtaaacttactcgaattctgcaagatcagaatatataaagtgaacctagtcactacaggcgttgctcaaattccattctgagacttagtcactaatattcggcattttttgtgattattttatagacatgatgtcattgtttcagtgttttactaatcaccaatgacacaactgccagagagcatttattccccattcattccaacaaatgtttactgagcatttactttgcccaaaaaacagggtggtacat

SEQ ID NO: 197940 - DNA, 417 bp, Homo sapiens
taaaatttattgtggtgatgcttatacaactctgaatataaaatgtaaacttcacactttacatatgtgaatggtatgcgaataatattgttaaaaatcagtattgtttttaaaaattcaaatatacaaaagattataaacttgcacctgttcatataatggattttttagaaattatacatgtctctgctttaaaatgttttaaactataaacagaatgctagtttatttaccaaatggaaatggttgctagtcatcagtattttctgagaggcccaatctttctagcatctaggtccctgaagatagctagaaagtgtgcagaggttgagagtaagatcacagggtctagtcatgtgttgagggggcatatttccaggccctcatgaagcccagtgacttttccctgtgtccaga

SEQ ID NO: 197941 - DNA, 408 bp, Homo sapiens
cagtggcacaatcacggctcactgcagcctcgaccttccaggacttatgtgagccttctgcctcagcctcttgagtagctgggagtacaggtgtatgccacaattcctggctatttttggtatatttttgtaggtatggggtttcaccatgttgcctaggttggttttaaattcctgggcttgagcaatctgcctgcctcagccttctgaagtactgggattacaggtgtgaggcaccatacccaactaaattctttactgttttaatgcagttggactccttcatatcacatctaagagaacatattgtagcacatcaggtgaggaagtgtttgctttaggcctccacacagaatcacagtcatctgctaaaaagatccattgcatgacccctacctctacccttgt

SEQ ID NO: 197942 - DNA, 453 bp, Homo sapiens
aatctttggagagcatgtatatattatagttgactgtatagttatgtatgtattgttgggtcttgaaagtgaaattatagattcaaagtcatttatccacttaattttttaatgcttggggagtatttgttttcagtgaattttcattataatatttaattctgtttcttttcaaaggcaataatggataaaacaatgactgcaaatttcccatttctcctacaagagcataatagtgttaatgacctttttcccactcaggcaggggaataatgcccaaagctatttacattgcacacgcaacttacttcatttctctgttagtggaatgtggggttttgcatatgctatgagaactaaaattagcatttagacgtccatgttaaccatgttaacatgtagtaaaacatttcaattctataaaataattaatttattaaaatgtatctcaga

SEQ ID NO: 197943 - DNA, 1140 bp, Homo sapiens
agacaggagaatcgcttgaacctgggaggtggacattgcagtgagccgagatcgcgccattgcactccaacctaggcaacaagagtgaaactccaactaaaaaaaaaaaaagtgtccttgagaatatctttggattgatttcacctgtctatactttgcctgcttgcccttttgtgtgtataatcaataacagacttttcaaagatcaggaatgaacttttgttttttccactttttggtctctgtgaatctaaggaatgaactcttaactagagtcttgtccatatcttggtaaagatgccctctgcccttttcagttaggccgcaatgtaacaaactcagtccatgactgaatttaatctaaccagcccagtatttccttcctgggatccaccagcaccaaatataataaaacttcaatttggaagtcgggcaccacggtgcacacctgtagtcccttcggtggctgggtcaggagtactgcttgagtccgggagttcaaggccagcctgggcaatataattgggacggcaccctgtctcaaaacaaaacaaaataaaatcaccttcaagttggtcttttcttaacaactttattttttctttctccaatacctcatcttgagcattcttcttttgattaataatagcatactggtgtttggatccccttcacaaccagaaagataaaaaaagcctctcagggtagatataggaaaacttcaaatcatttcaaatagggttcctgaaatttcttggagaaaataataagctatattagaaattcagagaaaggaagaattcagagaccttggctctcggtctggcttcactaccaaatcacttaagttatttagataatcacaggccattagttttccctacttcagagaaatgctgagaccgatgttcatttaattcactggataaaaactatccaaaagtaagactatttatctttttttatcttttttttttttaagatggaatttcgttcctgttgcccaggctggagtgcaatggcacaatctcggctcactgcaacctctacctcctgggttcaagcgattctcctgcctgggcttcccaagtagctgggattataggcacgcaccaccacacccagctaatttttgtattt

SEQ ID NO: 197944 - DNA, 417 bp, Homo sapiens
tctcggctcactgcaagctccgcctcccaggttcacgccattctcctgcctcagcctcccgagtagctgggactacaggtgcccgccaccacgcccggctaatgttttgtatttttagtagagacggggtttcaccgtgttagccaggatggtctcgatctcctgaccttgcaatccgcccgcctcagcctcctaaagtgctgggattacaggcgtgagccaccgcgcctggccgagactccatcttaaaaaaaaaaaaaggaaatttttatcaccctataaagaaattttggggctgggcatggtggcttacgcctgtaatcccagtactttgggaggccaaggcagatggagcgcatgagcctaggagtttgaaatcagcctgggcagcataacagcaccctgtctctgaaaaaa

SEQ ID NO: 197945 - DNA, 841 bp, Homo sapiens
gttttgcactaagatagtggcaagcccagaaaatgattgggctcagtgtctccatctaccatcatcttcacagaaatgttaggtttcacatttctttcctttcttctataccctttcgctatcttacatctcagtttattctgtttcaagcattagtgtgtgtgtgtgtgtgtgtgcgcgcgcgtgtgtgtgcgtgtgtgtgtatgttttgagacagagtctagctctgttgcttaggctggaatgcagtggcacaacctcagctcactgcaacctccacctcctgggctcaggcaattcccctgtctcagcctcccgagtagctgggattacaggcatataccaacacatttggctaatttttgtattttcagtagagttgaggtttcaccatgttggacaggttggtctcgaattcctggtcaagtgagccgcctgccttggcctcccaaagttttgggatttcacgcgtgaaccaccgtgcccaaccccaagcggtagttttttccccacgtgtacacactgataccctatttaacttcttttctaaatttggcttagttgttatggtaaaatctttcttttttgtttgccattttgcacacaaagaacctcaaacaaccctaatcataaatgagaaaatttaatatacactcatactagtttacttgtacgaaggatgaaatagtcatacatttaatgtaaatgagacaaaatatagtaacagcttgtgtcaagggtctccaagatcaccctgattcagtgatttgctagaaggactcacagaactcagaagatagttatacacactgtgatttattatagtgaaactttattaagc

SEQ ID NO: 197946 - DNA, 629 bp, Homo sapiens
tccataaatccaagcaagacaatttgttaaggcttagcatgcaatcaggcatccaaaattccatgaaaaccagaaggcagggtgaggaaggaacaggaaccaggcagcagttctgtgcagtggcaccaagtgacagcaagaaggcagcagtactaccaaggcaagattacacccagccaaaaaaccaccagtctgcagggcagccaattgacactccaggcagagccattcagagctgaagagaaagcactaaaaaaaagtgcagccacttctgtgattaaagacaatgcccatggtactaaagtaccgtcttggagacactggtcatagttgttaaagcttccagccctcccagagaacatctctatgaaaaaaatactggtacagcagccccaggcccaccttctggaggttcaacttttaattttagttgtttcaagtgctgtggaaaagactagacctgatccctcagttcttcatattgccttatgaacactggccagaagggaagcacatccctcccttttgttaatttcctccaatattgctaagacaaggaatttcaaaatgttcaacaaatattaagaaacaaaaaagaaatgaataaagaaaataagatgggcaaaaat

SEQ ID NO: 197947 - DNA, 706 bp, Homo sapiens
catccaaatggctttgaaacaagttattgtagagcatgcttcctaccgttgtgttttgagtgagaacttccagcagctgggatttcgagctagtttgttatctgagttcctcatccaaacccccttagagagaaggggagaaggagggaaggaaggaaccacacaccagggcacgtggtattgctccatgtgcagcaacacatggagcagtggaggcaggtggaggtttacaggtcacatgaatatgatgagggtcagcagaattgcggccacgtccccaggagcagggctccaggtaggagcagcctagggactttctcggtgattctgttgcgtgttggtgtcctggtttggattcatgccatctgcaacacagcagccatctcctctacagtaagcaaactaaaccctaaaaataccttacaggctgggcacggtagctcacacctgtaatcccaacattttgggaggctgaggtggacagatcacctgaggtcaggagttcgagaccagcctgaccaacatggtgaaacctcatctctactaaaaacacaaaaattagccgggcatggtggcgggtgcttacaatcccagctactcaggaggctgatgcagagaattgcttgaacccaggaggcggagcttgcagtgattcgagattgcgccacagcactccagcctgggcaacagagcgagactctgcctc

SEQ ID NO: 197948 - DNA, 715 bp, Homo sapiens
taataatctattaatataacacctaaatttgctattactccatagtttgcattttgaactattttcatttggcataagtataacctggaaaaggcatgtctgcccttctttcagagaggaaaggtgtttgaatggcaaaacccttatgtggttgaacttttccatttctttctctgtgccttcatttgagcaggtggatattacctgaggaaaaagatgacacaaatggactaattggctttactcgaaattcatgattacagtgttcaaatgggcactgctgtagttggaatgtttatgtttccccaaattcatgttgaaatcctcacccctcaggggatggtattaggaggtgggtcctttgagaggtgattagattgtcaggatgaagtcctcattaatggaattagtacccttactcaagaggctcaagagatccctgtcccttctaccatgtgacgttacagtgagaagacagccatcagtgaggaagtgggccctcactagacaccaaatcttttggtgccttgattttgggcttcgagcctccagaactgggagaaataaatgtctgttgtttttataagccagctagtttatggtattttggtacagcagtctaaatgaactaagacagacattcaatattgctttgtaattctactcttaacttgccatgtttccagaggacttttacacccacattctcagttaa

SEQ ID NO: 197949 - DNA, 402 bp, Homo sapiens
tatttatatattgagaatatggggggaggtagataacagtagtatggtgggactaagaaaggtttgataggttaaaaaagaaacaaagaaaaattatgatgacttttatattcaggcaatgaagccatatcaagacaataataaaacaaattatttaattaaacatgaagagaatctatatggatattcatatattaatattacatatcatataatgttaaatatgaaatatattaaataagttaatgttggaacttgttcgggcatggtagcttcacacctgtagttccagctacttgggaggctaaggtgggaggattgcttgagcccaggagatcaaggttacagtgaaccatgttcctgccgctgtattccagcctgggtgaagagacaatgtctcag

SEQ ID NO: 197950 - DNA, 418 bp, Homo sapiens
ctaagaattcattactactagactggtcttacatgaactgctcaagggagtcttatatctggaagtgaaaagacaatagccaccatcatgaaaacataaaatgataaaactcactagaagagccaatacacaaaggaaaaagagaatcaaatcttaccactacagaaaaccacctacctgcaaaaataataagagagaaagtaaggaacaaaggaactataaaagaaccagaaaggctgggcgcggtggctcatgcctgtaatcccagcactttgggaggccaaggcgggtggatcacgaggtcacgagatcgagacaagcctgaccaacatggtgaaacccagtctctatgagatcgtgccactgcactccagcctggtgatggagtgagactccgtctcaagaaaaaaaaaaaaaa

SEQ ID NO: 197951 - DNA, 469 bp, Homo sapiens
gaatttgttagagtaggacatggaatggtggagagagattgggatggacgtgtcaggcagacaagcataagtaagaatatagcagcttatggattgatgggaaagataagatgcaaactgaagcctggaatactagtaaaatgattgggtcaacaaaaatagggaatcctgaagggtaggccagtttgaggggtggagagtggaaacagatcatttggggcacattgatagcagtcatttattgactgtctacttcaagccaaggattctgccaagtactgtacacacattgtctcatttaagtctcaccacagaccataatttgacaagtgcgagactccgtctcaaaaaaaaaaaaaaaattgcctatcaggctgggcgctgagtcttgcacctgtaatcccagcgctttgggagcccgaggtgggaggattgcttgagcccaggagtgcaagacgtatctcttaaa

SEQ ID NO: 197952 - DNA, 450 bp, Homo sapiens
agctgggacaggtgcgtgcattgattagcattctggagcccaacaggtgggcactggaggcttccttgccgtggtaaagggaaaccggtgagagggggcgtcatgtcatccaggggagaggagtgatgttaacaatagaaatggcagtgtcacatagtaaatgctaccgtagaatgagtgtggatgtggcgtgcagggtgtggaaggtggcagcaggcgctgtcgctaaggctttctgtggcaagcacagtacaagcattttacacacatatctatctcacttagtcccctcagtaacaccaaggaatagaaactattattataccattttatagacgaaggaatgaaggctcagagagattaagtaacttgcccaaggccactcagcttgtctctggcgggggtaggacatgtctttgtggggaagtagggaggagagtggggagagtg

SEQ ID NO: 197953 - DNA, 512 bp, Homo sapiens
catggtgtagcccattaactcagcttcctaggaatgctcttgaactagtttctatttggaaatgactgataaatgtgggctgaaaaggcccgagagccccaaaatacagcaaggacactctgaaggaccccctctgatatacttgggatgtgtgtccctgcccaaatctcatgttgaaatgtaatcttcagtgttggaggtagggacctggggggaagtggttggatcatgagggtggatccttcatgaatagtttagcactatcccccgcattgtactgtcctcacgatagtgagttctcatgagatctggtcatttaacagtgtgtggcacctccccgcttgctctcttgctcctgcttttgtcatgtgatgtgcctggcctctttttgccttctgccatgaatgtaagcttcctgaggcctccccagaaaccaaggagatgccagcctcatgctgactgtaaagcctgcagaacaataaaccaattaaacctctctttttaatacatta

SEQ ID NO: 197954 - DNA, 83 bp, Homo sapiens
caagtaaaactgaaagataattatggtatgaatgttagtaaactgtttatcacagaggtacaataagggtgaaaataaattta

SEQ ID NO: 197955 - DNA, 470 bp, Homo sapiens
gtgtgtttgtttcacttctaacaatgtttttagttgaatgagtcgccaatatttttgtttcttggttttaaaatgattattacctttttttttcaaattataaaagtagtatatccctattatgaggtaatttggagtgttgaacattttggccttttatctacgcatggtgcattttttaattgttgagatagtattttatagacaaactatgtatcttcttgtctacttaacatcctagcagaagcattttatgtcattttaaatacttttattaacataaccttttaaaactttatgaaaatcttaaacatatgtagtagaggctagtttaatgaaccctcagttctttgacaattatcagctgctaggcaatcttgtttcatgtaaatctccttctgtagtttgggtttgactggttctggtaacacttctataagtttgaatattttgaaataaaagttttagaa

SEQ ID NO: 197956 - DNA, 731 bp, Homo sapiens
cttcatattttgccatgattataagtttcctgaggcctacccagccatggctcctgtatagcctgcagaactagtttcactcttgttgcccaggctacagtgcaatggcacggtcttcgctcaccacaacctccgcctcctgggttcaagcgattctcctgcctcagcctcccgagtagctgggattacagatgtcaattatctattatgcaccagacactgtactggatgtgagggtcatggctgcccataggccatgaggtgactgcgtgcaaatttgaaaaaggctctccagatgcacacctctgcaccaggttgcatgaattgctgtaacactccccgtggagatctgcagcttcactcctgagcccagcaagaccacaagcctactgggaggaatgaacaactccagacgtgctaccttaagagctgtaacactcactgtgaaggtctgcagcttcactccagagccagcgagaccacaaacccaccagaaggaagaaactccaaacacatctgaacatcagaagggacagactccaaacacgccaccttaagagctgtaacactcactgcgagggtctgcggcttcattgttggagtcagggagaccaaaaacccaccaattccggacacaaaatgatcttctcacctcagcctcccaagtagctggtacccaggtgtgtgccactcagaggtgacagcatgctggcagtcctcacagccctcat

SEQ ID NO: 197957 - DNA, 442 bp, Homo sapiens
gcagatgaggaaggcacgagccaaggccgggggctgccggcttctcaatccaagcagcgtccactccccggctcacagccccagccaagcccacgagacagttcccaggggtggcaggaacaagggccacaaaacacagccatagaaatgcttcttgggcacggagaggcccctcaagtccaccacatcataggcgagtttccctattctggacatttcatacacaaggaaacctagaatctgtggcctttcatgtcaggcttctttcactgagcaccatgttttgaaggttgacccacgatgtgtcacttgttaggacttcagtcctttttatggttggatgtgcatagcacgttatgtttatccattttctgttgatggaaatttggattgtttccatattttgctgttgtgaatagtgctgctgtaaacattcaagtgt

SEQ ID NO: 197958 - DNA, 327 bp, Homo sapiens
gaaaccaatttaagaagttaaaaagcctcaaacacttgcaggtatggtttctgaagtttggaaggaggctattctaaaggattgttcagagttcctgccaaagactaaaaactacacaattatgccagcttctatgaaaactgaagtagtagttagtaatgtgcgctaaggtaaggaggacaagaaatgcagatggttgacctagttacataacatccccttccctaggtattttatagtattctgttttatgaccacttggttttatattttcttcattccccaggcttcagtgaaaactcagtatgcaagtgtcaaacctatgta

SEQ ID NO: 197959 - DNA, 606 bp, Homo sapiens
cgctgggtatggtggtgaacgccagcagtcccagctaatcaggagggctgaattgggagaattgcttgagtctgggaggcagatattgcagtgaggccagatcaggccactgcactccagcctgggcaacaaaacgaaacttggtctcaaaaaaaaagaaaaaaaaaaaatccaattcacttaagtgaaagaaaatcacactggcctgagaattctatgcaacattaggatatggagattttattacaaagattttattacaaagatatattacaaagattttaaattcagcccaactgtcattaagtccttcataactttcattttatgaaactgtcattcataaaatgccacaagtatgaaaatataaaaacttaggaaatattgtctcttcctaaggaatctcctagacaacacatttcagacaatcaaaaaacaatttgaaacgttccaatgtaaaggaaatacaggagaaaaacaaatccagaacatgaaactcctaaggaatctcctgtcgaacatgcttcagacaccctattgagaagcttaaacataagaaacatacggagaaatgaaagaataaaatccagaagattccacaaaacg

SEQ ID NO: 197960 - DNA, 308 bp, Homo sapiens
gcggatccccacgcgtcaaattaacgtattacgggaatagttgaaacatcttaagtacaatctattaaacacatctttgaagaaaatgctcagaattcaaaaactcactttaattaactaaataacaaaattctgtttatgtgtagacgcacagtaaaacagtatgcatctattccctagcaacctcttgagctggatatgactgacctcacaaaaaccttctgagtgtcagatagtgtggtttataagtgaagcacacattttatataatgcttagaagtaaacaaggctgtacatttttaaataac

SEQ ID NO: 197961 - DNA, 483 bp, Homo sapiens
ctttcaaaaaaacttcctctccttcattgttgactatgaagattctttcatgcatgtcctgtccactgtcagtcccctctgtattcacaagagcaagtgtaatgcccgctgtgaaggagctaaagtttgttgaataaacacatgaacaaatggtggttttgtggtgttcaactgaaatatttcctatttcagcactggaccacgctgtttttctcactacataatcggttacgctaaatgcatcacgagccaaattcaaaaggtcaaaggagaaggcaaatggcagagtgtggtaaaggggcgagtgagagggtctctgaaaaaagtcaggctaaaattacagggggttcaggcaatgttatcttgatctggatggccagttacatgacagattactttgttcttaacatacgaacatcctattcactttttggtatactggttgtttaacagtaaaaattaaatgtttaaaacccaccatta

SEQ ID NO: 197962 - DNA, 664 bp, Homo sapiens
cagcataaattcctgttccctttacccctcactcaaagtgtctgcttttggcttctgccagagactacccttccaagcctacaggatgggaagcctgcaggctgcaaccctttatgcgaaataaagctcccctttccaaatttataaacccagtgatccttcagttgacaaatccataagcaaacaaaagaaaaaggaacatcaacctaagtctcacacctcatacaaaaattaaaatgcatcccagagttaaatgtaagagattaaacttttaaaacttttaggaaaaaacataggacaaaatctttgagatctaagagtagacaaagtactatttgacttgacaccaaaagcataagaactatcaaagaaacatacattggacttcattaaaaacttttgctctgcaaaattctttgttaagataatgaaaagataagctatggactggggaaaatatttgccaactatgtatctaacaaaggactagcaccaacctttagtcagatataaagaacacttggtggagtgcagtggctcatacctctaatcccagtgttttgggaggctgaggcaggaggatgcttgaggccaggagttcaagatcagcctgggcaacaaagcaagatgatactgctacaaaaaatgaaaaagagaaaataaa

SEQ ID NO: 197963 - DNA, 566 bp, Homo sapiens
gttaaatgagaccaaagttttagaaacatttgagtggaatgcactcatttaaattccctctcctctaacaatgttaaagtagaaagtccaagttgctatttcctgaatggggagtgtccatgtgagtaggctcagcaagccctatccaaatgcacctgcctggaccttctcgaggaaaggcaaccgggctctccctcatgaggcactgcggttttgtgtcatcaaacacacccactgagaagtgggttgcctatgaccacaccagagatgggaaattcctaaccaccaaggccctaggtaatatatcagatggacttcttttatgcgggtttgatagagagcacaatctcaattatgttttacaaatccaagcagagctcaaataatgcccctgcttagtagcttcctagtgatgaccatccaggtcattcatctttcccgcttttctcaaaggcccagtgagaagtctgtcaaccccagcatcccacacggtgaaaccggcttccagcaagctctctcccacccgaggcgcaggctctgagccatcaccagccttgctgggcatg

SEQ ID NO: 197964 - DNA, 363 bp, Homo sapiens
taagtgacatttccagattccaaactttaattctatgcaaatcaacacatgcttatctagagcctattatatgcacagagctctggccaggaaataaataaaacatcttctctgcctccagggactcacaatctagtgagggagaaagatacaagtagaagaaaccgcaattcaaagcagcatttgataggggctgtaatggagggacaaaagcaacaaagaagccaggagggcaagactcaaactctccaagttcctctaagtgccagaattaacttctctgtttttgttcttactataatttttcacattgccattcttattgtttttgccttaataatgagtagtcttaggagtcgacgc

SEQ ID NO: 197965 - DNA, 730 bp, Homo sapiens
atggggtctccctgtgtcacctgggctagggtacagtggctattcacaggagcaatcatagcacactgcagcctggaactctgaagctcaaacaatcctcacccctcagcttcccaatagctgagactacagactcacacaatgtgcttggcaaggccttttattctaaatgcagtggtgagatggacaagagatgtaccatccatatcctcctttaaggaaggacttgatgcccagatgtaaagagtgtagtcaccaaacagccctttcagaatctgccccagacacagagagccccactgcttaaggatatacccttcttagagcagatcgcttctagagactaagtgagcagggttataaagccccagctattttaacctaacaattctgacggataatactcgtttttcagagctccttgataggttggccaaggctatttttggtctgcatcactgatttcttcctcagtccaactcagatttctctttcttccttgtcacagatgttaaaccttaataacatgttgaatcccaaactccacctctgcatctgtgacaaacttaacctgtgacaaatgggaagccataaaaggattttttttttttttttttttgagacagagtttcactcttgttgctcaggctggagtgcaatggcatgatctcaatcttggctcaccgcaacctccgcctcccaggttcaagtgattctcctgcctcagcct

SEQ ID NO: 197966 - DNA, 198 bp, Homo sapiens
tcgatgtctgcgacactcaggaacatcaaacatttaaatgtaaaaaagaaaactcaaaccataccacaggaaaccattagcaaatattttatagtcatggaataaggagggcattcgtaagaatgaaacaaaatccacaaacaataagcataaaaagattcaggctgggcacagtgactcatgcctgtaatcccagca

SEQ ID NO: 197967 - DNA, 217 bp, Homo sapiens
ccaggccagccttgaattcctaggcttaagtgatcctcctgcctctgcttcccaagtgactgggactacaggcacatgctactacacccagctacagtggtttttagtatgttcacaatactgtgcagtcacatctctggtggttgttttctttaagttattttttctgaataccaaaaaatacatgcttattatagaatgttttaaatattctaca

SEQ ID NO: 197968 - DNA, 357 bp, Homo sapiens
tccttcaggaagtgccagagttggaattcaaatcatagttcaaaatctgttcttttagttactatataatcccagcttctctctcatccccagcctctcaaattctagtttaaaattttggacaaaggaaaggtttcaactataaagccactaatctcctggcacattcactcccatcaactaactccaaaccctccaccacacacatgcaaaagtatcttttataaattattataaagtctaatcctactttctttaaaaggtaggcttcaaacaaattaatcagtaatttaatgttatttttaaaagtgataatcatgggtaacttgaaaacagtggaattattaatgttttaaa

SEQ ID NO: 197969 - DNA, 686 bp, Homo sapiens
aaaaaagcaatctacatggctttttttaatgccaatattcatttaacaagttatttttaaagaatctgctatatgaagaatacttaaagccccagtcctgatgggaaacttacaaccaagatggaggagatacatgtaaaataataaagacgtatataatacatcaggcaatagtaagagcctacggggaacaataaagcaggactttgtggtttttgttatgtgggtgcttggggagccctcactgagatgacatttgaggagagggagtgaaccctgcatatgtgtagggggaagagtgttcttgcagtcatagacagtagcaagtgcaaaggccttgcagccagtatgcaaggagcagccaagaggtccatgtggctggagcgcagtgacccaagtaggtgagggaagagcaagtagaagttgaagtcagaggtaaagggagatgggctgggtcatgcagggccttgcattttagtagaaatgggagtgggggccatgaagggttttgagcacaggagtaacatgatttaacttacatttttaaaggctcatctgctgaaaatagattgtcatagagaataagcagggagacaagtaagaaagctgttgcaggaatctaggtgagagatgagctggaccagaatggtatcagtggaggaggtgaggactggctggattgggga

SEQ ID NO: 197970 - DNA, 483 bp, Homo sapiens
ccctggaactatgggtagcaacaaaggagggagggcaggtcacctgtgcagaagaacatgcacacacacaggcatgcacacatatttgtacacgggcacactcatctgcacacacacatgcacgcatacgtgcacaccctccagcacacatgtgttcagatcatgctctcatttacacgtgcacacgggcatgcacactcatgcacatgtactgttgactctatcttgagcttacacatcaaagccacgatctagttcagtacttacttgtttattgatattccatttagcatttaccaagtaccttctatgtaacttggctaggcagtctttttttctcaaacaaaatccagtacaaatcctccctcatccatgaaatctttctggattctccaatgggattgaactaatcctcatagaactttccatgtgcccctgcttgtcacgaatttcatttaccttcagagtaaaattgttgcacat

SEQ ID NO: 197971 - DNA, 528 bp, Homo sapiens
tgatattattttatactttgtgcttggtcttataagcattaatctttccatttgtttgttgtattcagatgcactcaccttttttaaagctgcttctctttttttgtctgttgtcaaatctagtgctgcttctaatgacttttacagatttttttgttgatacggtattttggattttctgaatcttaaaatgttctttcaaaaaagtataaacttaagtagatatccaactcatgatgaaacttccatttatcttaactttctcctttgttggtcctccaaagtaattgatattttttcagattcttactaatgatgcatacaaatgtgtcaaatggccttaattttcaagggacaacacagtcttcattaccctgggcttatcttttatacacagcctattcaatgactccattttctttataggcaaattcattttagttttgacattatgaaaaacccacaagaagatacattgtgacttttctatgtttttctatgttttgcaatatataagcccatgtctga

SEQ ID NO: 197972 - DNA, 396 bp, Homo sapiens
acctcactaatacacctagatggttgataataaaggcagaactagaatacacgttatctgattagcaatatagtgtctttttactaaattattctgttattcatctgcacattcaacaagtatttaatcatatatttactgtagaaaacagcacatcattaaacagacagactgtggtctctgcccccaaggagaatatgtttctagtgagggaaagagatacaaattcataaatctaaactatagaaaatggcaaactctatagcacaaatgtcttttgagagagaataatgggtgaggggaaggaaaggagatgaatacctttaaggtggcaggggtagagctctttgagagactgcaaagcagagaagatgcttcaagaaaaagaagtacaca

SEQ ID NO: 197973 - DNA, 288 bp, Homo sapiens
cttgtttctgaggagcgagagtagaagggggaacactccttgacaaaacaaaactgtgaggaaaacttcaaggccaggcaaagccaaagcctgcccgtcacctcccagtgactacatctggagctaaagacacaagacccagcagtgatttcaggttcactctggacaactaaaacccccaaatgagaggaaaccaccactaagcacttagatgtgagcatggctgactgtatggacttcaacgcaccatttcctggctctgcacctgcttccccagatgggtcccag

SEQ ID NO: 197974 - DNA, 618 bp, Homo sapiens
tctgtcctgaaagcaggccgctccatgctcatctcccacaccttcacctcctgttaggccagcgtccactgcagtggcccagctcttcccagcatccccttacacaggatctgtgttcccttcatggtttggcctgcatgtccttcaacctgggacgtccactctctctcagttctgtcctcattgtgccctacttgtctacttcgggaactctccttcaccactcacctcacacccttcctccaggaagccctccctgactttctaggcagagttggagccctcaccctgggcatttccacagcagaaactgtcccaccacagccgttgctggtggtcatgtttgtgtttgccagcagcccacaagaggtcgaggcgcaacctgtagtcctcagctgctggggccgggcagtggtgtgctttcagcctggagggggcgctcaggaagaggttgtccacttgtgtgcagcttttatgtgtcctgtgcatatggttacagcaccgcttcctgtgaaggagttgagctaggggttgtgctgaatgcagagaacaagatacaaacttaaagaggcctagggtgtggcgggaaacacacaccccttcccccacctatatatg

SEQ ID NO: 197975 - DNA, 198 bp, Homo sapiens
ataaggatttcaaacttaatagataaaaacttaataggttaaaaaaaacttaatagataaaaaacgaaactcttgatctactttttccttcaaatttattctcttaaatttttagaatgctttttttttttttttttttggaaaggggtccttggcctctgtgccccagtgtgcttggggggtgtcccccgggcttca

SEQ ID NO: 197976 - DNA, 211 bp, Homo sapiens
gagtttcgctcctgttgcccatgccatgcaatgagaaagaccctgtctcttaaacaacaacaaagtcagaaggagaggctgccatggctacggctccaggtgacgtcacggccagctccgtgacgcgcggccagggcagcccgcggagaccgaggctcctctgtgacgtcagcagccggccgggacacagcgggagggcaggtgcggccgc

SEQ ID NO: 197977 - DNA, 276 bp, Homo sapiens
ggctagagtatatagtggcacaatcttggctcactgcaacctctacctcccgggttcaagcaattctcctgcctcagcctcctgagtagctgggattacaggcgtgcgccactgtgcccggcctattaagcccattaggtccattttacagacgggagagcagagacctgatgcctgaggtgggaggattgcttgatctcaggaagttgaagctgcagtaagctctgatcatgccactgcattccaacctggccaacagagctatactctgtatca

SEQ ID NO: 197978 - DNA, 400 bp, Homo sapiens
ggaggaatcgctgcttcatgacttcctcaggcatttacatttttctcttctgttgacttaaatcatgaactaaaatttatccctagaggaaaaaagaatgcttcctccattctgggctcttctcactgtacccagactatgtcttcaggactctcatctcttgtcagttctgttgtgctagaaagactggtttgaaaaaattcagctcgtgtaaacctgtgccctccaccctgtggggaacccatgtggggagcctttgaaaatatcacttatcagctgggcgcagtggctcatgcctgtaatcccagcactttgggaggatgaggtgggcggatcatgaggtcaggagttcaagaccagcctggccaacatagtgaaaccccgtctctactaaaaatac

SEQ ID NO: 197979 - DNA, 723 bp, Homo sapiens
cagagcaagactgtttcaaaaaagttaaagaaattaaagaaaaataaatctaaagaaggcttgttacgtctttcctggctggatctgttaggtgatttggtcttgcctgccctgtgcttgacatattcacagcagatcaactgtcttttcttggttggccagattaagttatttaaaagattgcaagtgcccagtagcacagagagcatgggtaaacacatacttccttacatattactggaaacaaatacagttggtcctccaactgcagatcattatgcgtatgatggttgcatctgtactgacccatgtacacactttttttcttgtcattattctgtaaacaatacagtataacaagtatttacatagcatttacattggattagctattataagtaatctagagatgattaaaatatatgggaggatgttcataggttatatgcaaatagtacaccgttttgtatcagggacttgagcatctttgaagtttggtgtctgcaggacattctgaaactaattgcccgtggacatcaagggagattatacaagtgaaacaaaatttggcaatagctattgtctttgtctgttttctgttgcttataacagaatacctgaaaatgggtaatctataaacaaataaaatttatttcttacagttctagaggctggatccaaggttaagggaggggcatctagtgagggccttcttgctggtgg

SEQ ID NO: 197980 - DNA, 380 bp, Homo sapiens
atacctggctataatagagagtgcttgatctctgttcagatgggaagtgttgtctgttagaaaacagtgccattgcttctcctccaggactcaagcagtgaggatccatctcaccgagttgtattctaaaaaaattgcctcagtgagagatgaactgagtattcctactgctgatttgcaaattgctacaacactcttggagagcaatttgttaatttttttccaacaaatattttttgagggtctttgatctgccaagtaccagtttgacttttggggatacaacaatggacagaaaagggcctcatggggcttacagtctagtgggggaagacagagaataaacaaggaaacaaataaaaagggtgatgagtgctgtg

SEQ ID NO: 197981 - DNA, 397 bp, Homo sapiens
cctaaattaaataggggcttttaagcacttcatcatatttagtcctcatgatcacctaagaggttgactttatcaaatccattttacagatgagaaactgaggctcagggagggtaagtgacttttcacaaatgactccccagggtccttatctggtttgccccagagtctttggttgctctaccccattctcttagcatagcctaagagatattttaatttctgactcagcctgagataaggaaatctggctaaacagatagatgcagagctgtgtgtgagacgagctttagcaagtctgcatgtcatttcgggtgtccgacactttctcttctctgacgtcctggcagttcaagctcccagaatccagtgtgagagaaaaataaaaatatctgct

SEQ ID NO: 197982 - DNA, 469 bp, Homo sapiens
tctggggcttggaccctttcaaggcatccatgaagttgaaactatattcataataatgatttttattacttttttcactttcattctctcaggagtgtatgtggagtgttctggaagctacatgatgtaggatgatgacatagctctggtagctaatggaatgtttgcttatgtgttcttgtatataataatttctcagttgtaatttctagtgtgataaatgtcagtaaagatagcccacataaacaaaatctctttggggtcttctataattttaaaaagagtaaagggatcttgcaaccataaagccttcagtctcattctgaagaaatgcagttactcattctttgctactttgaaactagacaaaattgctgccacattctgaatactgctgcattagaccagtggctgtcagtaaagacatctccttagcttataaccaatacgcaataaaaagccaggaaaa

SEQ ID NO: 197983 - DNA, 828 bp, Homo sapiens
caactcatctctagtatgaagcctaaaaaataaatctattgaaaataataactatagcaacttgttaagatatagacaatataaaattatgtgaattcagacaacaaaaaaaagtggtagattgagttaaagtgtagagttttaaagttttttactttgtttctttgtgatcaaaattcagttgtaatctgtttaaaaaaacttgccatttctataagattttttttgtaattctcatggtaatgacacaactaaaacctgtaatagatacactcaaaataaagagcaatgaattcaaacattaccaccagagaaaagtaagtattcagacaaagcacaaaggaagacagtaaaaaaggaagaaaggagaggagtttcaaaacaaccagaagacaagtaacagaatggcagtagtcagtccttacctattgtattagttagggccctccagtgggaccgaaccaataggatatatggatatataaaagggagtttattagggagaactggttctcatgattacaagtcccacaataggctatctgcaagctggggaaagagagaagctaatagtgtctcagtccaagtccaaaagcctcagaactagggaagctgacagtacagccctcattctgtggccaaaggcccaagagcccccaggaagccactggtgaaattcccggagtccaaaggccaaagtacctggagtctgatgtccaagggcaggaagagaggaagcaagtgtccagcagggaagaagaaagagaaccacaagatgcagcaaacaaatttatcccacctccttctgcctgctttgttctagctatg

SEQ ID NO: 197984 - DNA, 502 bp, Homo sapiens
tttggatacagggtctcaatctgttgcccaggctggagtgcagtcactcggtcacggttcactgcaggcttaaactcctaggctcgagcaatcctcctgcctcagctaagtagctaagagtagctaagactacaggcatgcaccaccatgtctggctttttaaattttttgtagagaagggatccaaaacatctttcaaattcagttaatcatatatatgccattatttgaagtctctacctaaggaatggtgctcatcacttctcttctatatataatagttttggtttatatatttcaaggtgattttatttagcatgtagatattattgatgaataaaatattctattttatttagcacacagacagagacatgaaaaaaagtatcaacgtgaaagagtacagagggtctgcaacttacaatggttcacctagattttttgactttgtgatggtgtgaaactgttgcaatttgaatgtacttcaaattttgaattttga

SEQ ID NO: 197985 - DNA, 153 bp, Homo sapiens
aactataaaactcctaaaagataacataggagcaaatctagctgatttggggactggcaatgactttttagatgcaacaccaaaggaatgaaccatgatagaaagtgctggtaaattggactttgttaaaacacttctgttctgcaacagaca

SEQ ID NO: 197986 - DNA, 321 bp, Homo sapiens
tgcactccagagtaggcgatagagaccctatttcaaaaaagtaataataaaaccttctggtataggaaggacatcttttacatgggaattttatcttacattcatttaactcacttattttcaacacttatgcttggattgcctataaagatgagataataaacaactagtcatcattttgtttttcttgctgacaaattttataatataaagacaacataagcttgttttaccagtaaacctagataggaaatcatgcatctttatgatatttaatccccaaaactatgaaaacatgtctgtttcagtcaaaccaacaat

SEQ ID NO: 197987 - DNA, 827 bp, Homo sapiens
gctgttgttgttcattttttactattccaaaaatgcttcaacaaatattcttttacagattgaatgttgcttatccaaaatacttgggaccagaagtcttggggatttctgattttcagattagggatgttcaacctgtatatacctccttacacacttttgtttctcttttgccatctcaaatcttgaaattcaagttttgattcatgtgtcatttgtttagaatattccttctagcatttcccttcaataagatacatggtggtttactctgtgagaccttacctggccaaaaatgtgttcactcagctcccagatagatccagctatgagagcctcttaagcaatggcatatcaggcagtgatgcatccatcactgggctcttcccttaggggctgggcatcacaccagctacaagactatcggctctctgcttgtcatctttctggctgcatgtagcagtcctttcccagcttcagtgcctgggagcaatttcactgcaacccctgtgtatgcagatccatagtcttccactgtctgggttcctcaggaagcaaggaagccctaggtctttgcctcaagcttgaagaaaaatctaagcttccctgctgtcagttccctggttctctcttcacttcagagagtatagccctctacctggctttcttccctggagatctcaagggaacttggggcctcagatggaccctccttagtgtgtctgcttttattcttgtgctactccatggaggaaatggaccaaaggtcaagtcaggaatttatactctcaccatcatcttccccaaatctcaatctcttgatttaa

SEQ ID NO: 197988 - DNA, 362 bp, Homo sapiens
atcatcatttgtaactgcatagtcagcatgtgtaatattccattgataatttatttaaagagtagcctgttatggccatgcacagtggtttacacctgtaatcccagcactttgggaggctgaggcaggtggatcacctgaggtcaggagttcgagaccagcctgcccaacatggtgaaaccccatctctactaaaagtacaaaacttagccgggtgtggtggcgcgtgcctgtagtcccggctactaggggggctgaggcaggagaattgcttaaactagggaggcggaggttgcagtgagtcgagatcgtgccactgcactccagcctgggcaacaagagcgagactccacctcaaaaaa

SEQ ID NO: 197989 - DNA, 582 bp, Homo sapiens
caaaattcagagagtgacagctgccaatctcaccccagcatcctcacctgctaaccaggtatctgtactcactcagcgtgcctgcttggcgaatctcagctgagtcagttacaacaggtcccctttcagacaggtgatgattagaaggtttgtgactcaaagagcatgacgtgttccctttcctctgcagcaggaagatactccctgatatcgtagcagtgactcagcctgccaagacaatccatttcattcttgtaccattcttgcataaatcacagtgcagaaagcttggcaagataatttttaaattttaaactcgaccaggagaactgttgagaaataagacttcatattgaagtacgtttcctctcctcggaagctttcaagaggcgatgctgggtgaagggttactccaagttctggaggctgaaagtccaagatcacgatgctggcagaatcggtgtctggtgggagcctgtttcctggctcgttgatggtgccttctccttgggtcctcacccggtgaaagaggtgagggagctctctctggccattttttctaagggccctaatcccatcctt

SEQ ID NO: 197990 - DNA, 212 bp, Homo sapiens
tttgcatatgtgagttcaggctatctaaaagggagcagtattcatcaggcagggtctggaagtcccctcagtgtgtgctggcagtattggaaggatcagatgagttagtataaattccatggagtccgagagaattaatcagagatactagggggctctagtatgaggacagaggcagttggtgctctgaccttgtttatgtgccagcttgg

SEQ ID NO: 197991 - DNA, 384 bp, Homo sapiens
caaagtatagagcttatttggtgaatttctaacctcattatgttttctggaccatccactgcacatggacacagtatggacattccttactactttggcccagacagctttgttgagcctggtatcaatgcacatatctggagttttctatctccttcattgcaaatttccggtctctttaagagcctgaggggcacacttcttgaagcccactccatggatacacttgtgaatattaatggtgtactcttgggtcaccacctagttgatggcataatggccattcttctcaccatccttctttgcaggaggccaagttgcttaaatgttttaggtagtaggcatcttagctataaaagccctgacttggccgggcataatggc

SEQ ID NO: 197992 - DNA, 317 bp, Homo sapiens
aaaagatcagaccaggtatagatagacagatagatagagagagagagtacatatatatatatattttttttttctatattatattttgacatcttaaaaaaaaccctcccccccctccaaagaaaaccccaacctttctgcctgggagatactgcctttcctggggctagccaattagagacagcaaagggctcaaccaggaacatgtctttgttatgcagactaaccaatccagagtcatacctcctctatttggcctgaggccctcagaagtcaatattcctctgctttaataatcccaggaacagataccaggc

SEQ ID NO: 197993 - DNA, 726 bp, Homo sapiens
gtgggtgctgggtgtggtggctcacgcttgtagttccaactactcaggaggctgaggtggcaggatcctttgagcccaggagttccagtctgcagtgagcatgccactgcactccagcctgcatgacagagtaaagccatctcaaaaaaaaaaaaagatttaaattaaatcctattaatgaattccagtcttcatatttaactttatacagctatgtacctgtgtttgcctgcatacttatgtttaaggtttttctattaagacattgcactgaacatgatatcctttaagaataactctcttaatacccataacgtgatcgaggataaaaaagtttctggaaaaaaatagcacctgctcttgcaacagttcatcctggcagcatgcttttgttttgattattcatgaaattgcagattcactctttagcttgactaacattcagtaggaaatagttgtgtgtttttaacatacttacaattggaaggctctatcttagaatcagcaaaaggcaacactgtgtaatccaaaagtcccctaaatttcccataaggatctgaagaaggcattggtttcttcagagacatcagtcacaggaactcacatgaacagccagtcacccctgcctaactcctcctcctgctcttaatggcaactaaagctaaggttccacccctgggctaggctgcaggggagtggacctgcaagtctgcactggaaacccgg

SEQ ID NO: 197994 - DNA, 662 bp, Homo sapiens
gtaagcagaggaatgaaatactaaagaccagaacttggcgctggtgtaagaacgacatgcaggccggtggaggagagcggagagcctggcaggaaaccccgcagctgcagccaatccatctacaataaagacaccaggaacacacacggggaaggacagtttcttcaataaacggtgttggggaaactggatgtccctgtgcagaagaatgaaattagaccctcatctcacaccatctataaaaatcaactcaaaatgggttaaagacttaaatgtaagatctgcaactgcaaaaccactaagaaaaaacacagggaaaaattccacgacactggtttagttaatgatttttttttaaatatggccctcaaagtacaggcaacaaaagcagaaagtagagaaatgggattatatcaaactgaaaagcttctgcacagcaaacaacagagtgaagagacaacctagggaactggaaaaaaaactgcaaaccatacaacatctgataaggagttaatactcaaaatgtgtaaggaactcaaacaactcaatagcaagaaaacaaataccagattttaaaaaaatggcaaagaaacggaatggaagcttctcagaaggagacatacaaatggctaacaggtatatgaaaaagtgcacaacatcac

SEQ ID NO: 197995 - DNA, 523 bp, Homo sapiens
cattaaagtccttgcaaaggatgcaaacatgtctttattcagcaatttttcccaaatgtaaacaaatccgaccaagactttggagaaatttgtgcaagttttacatgcatacgtactatgtgaacgtggaacttaccttaatatacttcagtgaaagggtaattggatgaccttaaaatctttttaaaaatcggctgggcacattgactcatgcctgtaatcccagcactttgggagtccaaggtgggtggatgacctgaggtcaggagttcgagaccagcctggccaacattgtgaaaccccttctctactaaaaatagaaaaaaattaactgggcacagctactcgggaggtgaagcaggagaattgcttgaacccgggaggcagaggttgcactgagccattgcactccagcctgggcaacagagcaagactccatctcaaaaaaaatttttttaagttagaatttgcaaatagatttatatcctgggaatatcaaataatcatggattatctatgagta

SEQ ID NO: 197996 - DNA, 391 bp, Homo sapiens
atttttaaaaaattacattgactagaaaacatcagtgagtagcacaggtagcaacactatgcattcagtgagcccagtgtgtactgggttacactgtaaaatgtataactgttcttgcaggagttgaaaaattgtcataaacaatgagtgtttataggcagaggtggtactatccccactttagagatgtgaaaactgaggctcagagaagggatttgcctcggattaagcctaaaacagtagagccaggtccccgccaggacagatctgatgcttttctcttgggctgtcaatgtgaatagttcccacagacatccctggagcatcatccactccccgttgctccacccagaataatacccgagaggctggcaagtctgctgtcccttcc

SEQ ID NO: 197997 - DNA, 398 bp, Homo sapiens
ttgggagtctgaggtgggaggatcacttgagtccaggaggttgaggctgcagtgagctgtgatcacccaccacactccagcctgcgcgacagagcgagaccccgtcccaaaactaaaataagtaaaaatttttaaaagataagtaacatggtcactctcaacatggtaggcactcttcatctggtccctttctttttatctctctaacttcataccctgccactcaacccttcaatctttaagtcctagtttcaactctgcaggttctacttttcttcataccttccaatgtactgtcacttcttcctggaacactatcaccttgtacctccatatcccatccccacatatattaactcatccttctaatttctgcttcagattacttctggagaatt

SEQ ID NO: 197998 - DNA, 694 bp, Homo sapiens
cgccagcgaggacgccgtccagggcatcgccaaggaggatgccgcccagggcatcgccaacgaggacgccgcccagggcatcgccaacgaggacgccgcccagggcatcgccaaagaggacgccgcccacggcatcgccaacgagctgtatacgacatcgctaacgaggacaccctacaagccgtcgctaacaagtacactgtacacaacatcgctaatgagggcactgtacaagacatcaccaatgagggcgctttatacgacattgctaatggcaccgacaaggcacgctaacgtggacgctgtacacgacattgctaatgaggacagcgtataagacatcgctagtaactatcgcaagaacaaaaaaccaaacaccgcatattctcactcatagatgggaattgaacaatgagatcacatggacacaggaaggggaatatcacactctggggactgttgtggggtggggggggagggatagcatcgggagatatacctaatgctagatgatgagttagtgggtgcagcgcaccagcgtggcacatgtatacatatgtaactaacctgcacaatgtgcacatgtaccctaaaacttaaagtatatatatatataaaaagacatcgctagtgagcacgctgtatacgacatcgctaatgaggacaccatacaaggcatcgctaacgatgacgc

SEQ ID NO: 197999 - DNA, 569 bp, Homo sapiens
ctctaggagaccagaaaagaaggcagttttagcttaaccatctctgggtggcccgttccgaactcaggatttttttcctggactcaagtagacctgatgcggtggtttctgaaacttggaatcttggtcaaatatgtggggttcccttttcttggaaaactctcagctttacagttaagtcggagtcttggtctccatttggcactagtgtctttcaaaacctcccgctttcggtttcttcgatgcacgaattagaaacataaggactaaaaaccgaaagcccctatcacttttttgtgaacccctaacaacgaggcaagtttgagttttggtctttttttggtggactggggggaacgtcggggagggggatgtttactttaaacaagattgtaggtttttctattgtagaaaaggggattagaataataagtttacttttccaaaatacagttggggcgaaccatggctctcaacgtgagaaaaccatcgccgaagacttttaaaaattgactggggaagttttctgacttacccatttcttaagggtcagtaatgcccagttactt

SEQ ID NO: 198000 - DNA, 1495 bp, Homo sapiens
tagagggcgggcggggatacgggcgtgagcacaggcgggcacgtgtcatcgggcggtacagataggtctactctgtacaaaaagaaatcatttcagagatacaggctcacaaacccctatgagttaagaaggggcaagcagcctatcgctggctcataacccaataaccttttagtcctgctggaaaaagtatgtcactacattggcctgctgatggatcagctccttaattacgtggaaaaggtggcatagtggacgtaaaacagtttgtcacttgtttagtcctctagttaggtaatattggatgtgtgtttcaattttagagcaggtacactaagattattagtactcattgcaataaaattcttaactggaaaatcgctactaattcttaattggatcttttaagttttttacttaacctaagctttctcagtctatttttccctttgagtattccatcttaaagcatgttgtgtatttaatgtggcagctatgttgcaagtcttattttggtcttaatactcagtttccagatgtaatatattacaagtagaaaaagaaatctactttccagaatgaactttgttaaattttacagatattgtttggtttatgaggttgttcataacagatgcaaatttgaggaattatgtgtagaataccagaaagactttagtgtttggcaatttatttagataaattaagataaatccatagtacaagacataaaccaaggtggtcatctctgtgtgatgaagtagcatttttttcttttcttttttaaactttcctgtatttaaaatcttttacacaaaacacattcaattgtaattaggaaaaaaaacccaaatttttaagtgtccatagtcaaaagtatgcctggatttgtcttagtttttctctgaatttcttaagaaatctttgtattagcttttttatctacattaagatatattttgttggctgggcatggtggctcactcctgtaatcccagcactttgggagactcaggcaggtggatcacttgaggttaggagtttgagaccagccaggccaacatggtgaaaccccgtctctactaaaaatacaaaaattagccgggcgtggtggtgcacgcctgtagtcccagctacctgggaggctgaggcaggagaatcgcttgaacctgggaggcggaggttgcagtgagctgagatcatgccactgcactccagcctgggtgacagagtgagactccatctcaaaaaaatacatatatattttggtgattctgatgcattttagactaggaaattttatattttaccctgctctcctaaaatgaaacagtgaagacatcattgcaaacaaccttactcagccaaaaacaaaacaacaaaaaccctccaccctctgtatgttttactataactttaattctgttctttgttcatgtaattgctttaggtcagggggtttcggctttcaggggatcctctcagagtcgcacct

SEQ ID NO: 198001 - DNA, 661 bp, Homo sapiens
ggttgggaatctaagataaactcactttatgtttaatatcctattacaatcagatgttttaatgaattagtatttgttgtatgtgtgtgtgtgttataaattatttttaattagaaattgtagttatcttgagaccagtttaaaattttaacaattagaataagatgagaaaatgatatccagggtacagaataataatgccattggggtatacaagatcacattgatttgttctttaaatgtctttcagagtggtattttagtggcctaagaacaattgttgctttcctaaataagggttaatcttactttcataggatcaggtttaattggagaaattttgttgaaaacagaggaagttaaaatgaaataaaaggtggccgggcgcagtggctcacgcttgtaattccagcactttgggaggccaaggcggacagatcacctgaggtcaggagttcaagaccagcctgaccaatacgatgaaaccctgtctctactaagaatacaaaaattagccaggcatggtggcatgcgcctgtaatcccagctacttgggaggctgagacaggaaaatcgtttgaatctgggaggcggaagttgcagtgagctgagatcatgccattgcactccagcctgggcaacaagagcaaaactccatcta

SEQ ID NO: 198002 - DNA, 313 bp, Homo sapiens
actacaaaagacagatatagtgtcactactaacattgggaggcaggttttctccagtatgggtggataaacaaaggtggatgcctgttatttatagagatttagctgactgctttaattatataactatttagaccaatggaaaaaatggcccataagatggatttttccttaaggcttaaaacactaaagttggctggacatggtggctcacacctgtaatgccagccctttgggaggccaaggcaggtggatcgcttgagcccaggagtttaagaccagcctgggcaacacagcgaggcctcatccctaca

SEQ ID NO: 198003 - DNA, 143 bp, Homo sapiens
aacttccttacctatttttgctccagttcagttttcatctctactgtctggtgaattctatagttttgaaggttgctagtgacttcctgttgtgtagtgctagacaggttttggtgattaatttaggtaggaggataaaaatg

SEQ ID NO: 198004 - DNA, 373 bp, Homo sapiens
agacaaggagtacgcgggtcgcctggttctagagaatactagggggaagtatgtaggaattgaagattagtccgccgtagtcggtgtactcgtaggttcagtaccattggtggccaattgatttgatggtaagggaagctgagtcaggaggattacttgaggccaggagttcaaggttacagtgcactatcatcatgcctatgaatagccactgcaatccggcctgggcaacatagcaagaccctatctcgaataaatgaataaatacataaacaatcggtcaatcaaacagattaaacctccaaaaagaaacagctgaaaacatgatctagacttgttgaacttcagtttacacatatacactgacttatta

SEQ ID NO: 198005 - DNA, 438 bp, Homo sapiens
taaatctctaaagaaaaaaagttattatattttgtattcttaaaattaattttgacacaagaaactttgtatattgtcacatgcatgggtaatatgttactattattaatcttactttgctggtgaaaaaaagaggctttattaggggatttgctcaagcttatacaatgggtctagagtttttcagtggcttataagctaactttgagggcaattctgaatgagaattcccaggacatttttaacaatgacattatgtcaaggtaatgcttttgaaatggcagcattttaggccacttttaaaaaggatgttactcacttagttaagtgagagttgatacattatgcaaagtagatgttatagtcatacaaaataaagcagaaactgaatttctttgtgcctgaaattgatatgaatccacttattgcattcttaaa

SEQ ID NO: 198006 - DNA, 315 bp, Homo sapiens
gggtcctgaagaggaagggcttggggcttggactcctgggtctgagggaggagggagctgagggcccaaactcctggctcccgaggagggacaaaggcactgggaactggggccccaaacttctgattcccagagacaagagggtgacctcttatgtctaagggaggaggaacctggggtcctgggcccctggaactgaaagaagacagcactgaggtttgaaggaggagtgggtaagctatggcccagactcctgggccccagctaagcaaggcttgatccagccccacctaacaggcctccccacctgcccac

SEQ ID NO: 198007 - DNA, 832 bp, Homo sapiens
ggcgttgttctggattcccgtcgtaacttaaagggaaactttcacaatgtccggagcccttgatgtcctgcaaatgaaggaggaggatgtccttaagttccttgcagcaggaacccacttaggtggcaccaatcttgacttccagatggaacagtacatctataaaaggaaaagtgatggcatctatatcataaatctcaagaggacctgggagaagcttctgctggcagctcgtgcaattgttgccattgaaaaccctgctgatgtcagtgttatatcctccaggaatactggccagagggctgtgctgaagtttgctgctgccactggagccactccaattgctggccgcttcactcctggaaccttcactaaccagatccaggcagccttccgggagccacggcttcttgtggttactgaccccagggctgaccaccagcctctcacggaggcatcttatgttaacctacctaccattgcgctgtgtaacacagattctcctctgcgctatgtggacattgccatcccatgcaacaacaagggagctcactcagtgggtttgatgtggtggatgctggctcgggaagttctgcgcatgcgtggcaccatttcccgtgaacacccatgggaggtcatgcctgatctgtacttctacagagatcctgaagagattgaacaaagaagagcaggctgctgctgagaaggcagtgaccaaggaggaatttcagggtgaatggactgctccggtcctgagttcactgtactcaacctgaagttgcgacggtctgaagggtcagggccctctgtgccattagaatccctactgaag

SEQ ID NO: 198008 - DNA, 1783 bp, Homo sapiens
tccgcgtgaggtgcattctcgcgccggtggcgaggttagggcccgcgttgcgacgtggtgcagcgcatattttcacaagtgggtctcccttgtccgggactatggccaccgactcgtgggccctggcggtggacgagcaggaagcggctgtcaagtcgatgaccaatttgcagatcaaggaagagaaagtcaaagcagataccaatggtattatcaaaaccagtaccactgccgagaaaacagatgaagaggagaaagaggacagagctgcccagtccttactcaacaagctgatcagaagcaaccttgttgataacacaaaccaagtggaagtcctgcaacgggatccaaactcccctctgtactcggtgaagtcgtttgaagagcttcggctgaaaccacagcttctccagggagtctatgccatgggcttcaatcgaccctccaagatacaagagaacgcattacccatgatgcttgctgaacccccacagaatctgattgcccagtctcagtctggcactggtaaaacagctgcctttgtcttagccatgctcagccgagtggagccatcagacagatacccccagtgtctgtgcctctccccaacatatgagctggcgcttcaaacaggaaaagtgattgagcagatgggcaaattttacccagaactgaagcttgcctatgccgttcgaggcaataaatggaaagaggccagaagatcagtgagcagattgtcattggcacccctgggaccgtgctggactggtgctccaagctcaagttcattgatcccaagaaaatcaaggtgtttgttctggatgaggctgatgtcatgatagccactcagggccaccaagatcagagcatccgcatccagaggatgctgcccaggaactgccagatgctgcttttctccgccacctttgaagactctgtgtggaagttgcccagaaagtggtcccagacccaaatgttatcaaactgaagcgtgaggaagagaccctggataccatcaagcagtactatgtcctgtgcagcagcagagacgagaagttccaggccttgtgtaacctctacggggccatcaccattgctcaagccatgatcttctgccatactcgcaaaacagctagttggctggcagcagagctctcaaaagaaggccaccaggtggctctgctgagtggggagatgatggtggagcagagggctgcggtgattgagcgcttccgagagggcaaagagaaggtttggtgaccaccaacgtgtgtgcccgcggcattgatgttgaacaagtgtctgtcgtcatcaactttgatcttcccgtggacaaggacgggaatcctgacaatgagacctacctgcaccggatcgggcgcacgggccgctttggcaagaggggcctggcagtgaacatggtggacagcaagcacagcatgaacatcctgaacagaatccaggagcattttaataagaagatagaaagattggacacagatgatttggacgagattgagaaaatagccaactgagaagctccaccagccactgatgccagccctggcactgcccctgcacaggagacaagtgcatttagggcacaggccccgacatcaccccaaggacaacggcagaagtagagagaaactacctacctcacttcaaattatgttggacttgacaaaaataggtgcaatgatggggggcactagaagaaaaaattgctttggacacttgggtcctttcccactttttaaagccacattcccccatctttata

SEQ ID NO: 198009 - DNA, 1411 bp, Homo sapiens
  misc_feature (15)..(15): n is a, c, g, or t
  misc_feature (17)..(18): n is a, c, g, or t
  misc_feature (20)..(20): n is a, c, g, or t
  misc_feature (25)..(25): n is a, c, g, or t
  misc_feature (50)..(50): n is a, c, g, or t
  misc_feature (114)..(114): n is a, c, g, or t
  misc_feature (1179)..(1179): n is a, c, g, or t
  misc_feature (1185)..(1185): n is a, c, g, or t
  misc_feature (1191)..(1193): n is a, c, g, or t
  misc_feature (1199)..(1199): n is a, c, g, or t
  misc_feature (1221)..(1221): n is a, c, g, or t
  misc_feature (1226)..(1226): n is a, c, g, or t
  misc_feature (1230)..(1231): n is a, c, g, or t
  misc_feature (1244)..(1244): n is a, c, g, or t
  misc_feature (1250)..(1250): n is a, c, g, or t
  misc_feature (1252)..(1252): n is a, c, g, or t
  misc_feature (1266)..(1266): n is a, c, g, or t
  misc_feature (1274)..(1274): n is a, c, g, or t
  misc_feature (1280)..(1280): n is a, c, g, or t
  misc_feature (1282)..(1282): n is a, c, g, or t
  misc_feature (1286)..(1288): n is a, c, g, or t
ggctggtcggtcgangnncntttgntctacaagcagccggcggcgccgcngagtgaggggacgcggcgcggtggggcggcgcggcccgaggaggcggcggaggaggggccgccngcggcccccggctcactccggcactccgggccgctcggcccccatgcctgcccgaccgcgctgccggagccccaggtgaccagcgccatgtccagccaggtggtgggcattgagcctctctacatcaaggcagagccggccagccctgacagtccaaagggttcctcggagacagagaccgagcctcctgtggccctggcccctggtccagctcccactcgctgcctcccaggccacaaggaagaggaggatggggagggggctgggcctggcgagcagggcggtgggaagctggtgctcagctccctgcccaagcgcctctgcctggtctgtggggacgtggcctccggctaccactatggtgtggcatcctgtgaggcctgcaaagccttcttcaagaggaccatccagggagcatcgagtacagctgtccggcctccaacgagtgtgagatcaccaagcggagacgcaaggcctgccaggcctgccgcttcaccaagtgcctgcgggtgggcatgctcaaggagggagtgcgcctggaccgcgtccggggtgggcggcagaagtacaagcggcggccggaggtggacccactgcccttcccgggccccttccctgctgggcccctggcagtcgctggaggcccccggaagacagcagccccagtgaatgcactggtgtctcatctgctggtggttgagcctgagaagctctatgccatgcctgaccccgcaggccctgatgggcacctcccagccgtggctaccctctgtgacctctttgaccgagagattgtggtcaccatcagctgggccaagagcatcccaggcttctcatcgctgtcgctgtctgaccagatgtcagtactgcagagcgtgtggatggaggtgctggtgctgggtgtggcccagcgctcaatgccactgcaggatgagctggcttcgctgaggacttagtcctggatgaagagggggcacgggcagctggcctgggggaactgggggctgccctgctgaactagtgcgggcggtgcaggccctgcggctggagcgagaggagtatgtnctactnaaggcnnngccctngcattcagactctggcacatcnaaatnccgnngctgtgagcactngagaantntgccgaggccctgnggaagatnaaccgncnggtnnnccggagggggtgctgagagggggcggcaggccgctggtggcacacagacggccccgcagaaggggaagtggggccaatcatagggagaacgaggaagggccagaccagcgttcgcggagcagc

SEQ ID NO: 198010 - DNA, 1078 bp, Homo sapiens
  misc_feature (846)..(846): n is a, c, g, or t
  misc_feature (852)..(852): n is a, c, g, or t
  misc_feature (858)..(860): n is a, c, g, or t
  misc_feature (866)..(866): n is a, c, g, or t
  misc_feature (888)..(888): n is a, c, g, or t
  misc_feature (893)..(893): n is a, c, g, or t
  misc_feature (897)..(898): n is a, c, g, or t
  misc_feature (911)..(911): n is a, c, g, or t
  misc_feature (917)..(917): n is a, c, g, or t
  misc_feature (919)..(919): n is a, c, g, or t
  misc_feature (933)..(933): n is a, c, g, or t
  misc_feature (941)..(941): n is a, c, g, or t
  misc_feature (947)..(947): n is a, c, g, or t
  misc_feature (949)..(949): n is a, c, g, or t
  misc_feature (953)..(955): n is a, c, g, or t
agcggctgtacggtcggaattttggatgaggatggggagggggctgggcctggcgagcagggcggtgggaagctggtgctcagctccctgcccaagcgcctctgcctggtctgtggggacgtggcctccggctaccactatggtgtggcatcctgtgaggcctgcaaagccttcttcaagaggaccatccagggagcatcgagtacagctgtccggcctccaacgagtgtgagatcaccaagcggagacgcaaggcctgccaggcctgccgcttcaccaagtgcctgcgggtgggcatgctcaaggagggagtgcgcctggaccgcgtccggggtgggcggcagaagtacaagcggcggccggaggtggacccactgcccttcccgggccccttccctgctgggcccctggcagtcgctggaggcccccggaagacagcagccccagtgaatgcactggtgtctcatctgctggtggttgagcctgagaagctctatgccatgcctgaccccgcaggccctgatgggcacctcccagccgtggctaccctctgtgacctctttgaccgagagattgtggtcaccatcagctgggccaagagcatcccaggcttctcatcgctgtcgctgtctgaccagatgtcagtactgcagagcgtgtggatggaggtgctggtgctgggtgtggcccagcgctcaatgccactgcaggatgagctggcttcgctgaggacttagtcctggatgaagagggggcacgggcagctggcctgggggaactgggggctgccctgctgaactagtgcgggcggtgcaggccctgcggctggagcgagaggagtatgtnctactnaaggcnnngccctngcattcagactctggcacatcnaaatnccgnngctgtgagcactngagaantntgccgaggccctgnggaagatnaaccgncnggtnnnccggagggggtgctgagagggggcggcaggccgctggtggcacacagacggccccgcagaaggggaagtggggccaatcatagggagaacgaggaagggccagaccagcgttcgcggagcagc

SEQ ID NO: 198011 - DNA, 1438 bp, Homo sapiens
  misc_feature (147)..(149): n is a, c, g, or t
  misc_feature (155)..(155): n is a, c, g, or t
  misc_feature (158)..(159): n is a, c, g, or t
  misc_feature (167)..(167): n is a, c, g, or t
  misc_feature (1206)..(1206): n is a, c, g, or t
  misc_feature (1212)..(1212): n is a, c, g, or t
  misc_feature (1218)..(1220): n is a, c, g, or t
  misc_feature (1226)..(1226): n is a, c, g, or t
  misc_feature (1248)..(1248): n is a, c, g, or t
  misc_feature (1253)..(1253): n is a, c, g, or t
  misc_feature (1257)..(1258): n is a, c, g, or t
  misc_feature (1271)..(1271): n is a, c, g, or t
  misc_feature (1277)..(1277): n is a, c, g, or t
  misc_feature (1279)..(1279): n is a, c, g, or t
  misc_feature (1293)..(1293): n is a, c, g, or t
  misc_feature (1301)..(1301): n is a, c, g, or t
  misc_feature (1307)..(1307): n is a, c, g, or t
  misc_feature (1309)..(1309): n is a, c, g, or t
  misc_feature (1313)..(1315): n is a, c, g, or t
ggaggtctcccgcgggcggggagggggaggcgtagcaactttaggcaacttcccaaaggtgtgcgcaggttgggggcgggacgcggcgccccgggaggtggcggcctctgcgacagcgggagtataagagtggacctgcaggctggnnncgaggnggnngagggcgnccgcgtgtgctgggacggcatgctggggcaggagggcagcgcgtgtcaggtgaccagcgccatgtccagccaggtggtgggcattgagcctctctacatcaaggcagagccggccagccctgacagtccaaagggttcctcggagacagagaccgagcctcctgtggccctggcccctggtccagctcccactcgctgcctcccaggccacaaggaagaggaggatggggagggggctgggcctggcgagcagggcggtgggaagctggtgctcagctccctgcccaagcgcctctgcctggtctgtggggacgtggcctccggctaccactatggtgtggcatcctgtgaggcctgcaaagccttcttcaagaggaccatccagggagcatcgagtacagctgtccggcctccaacgagtgtgagatcaccaagcggagacgcaaggcctgccaggcctgccgcttcaccaagtgcctgcgggtgggcatgctcaaggagggagtgcgcctggaccgcgtccggggtgggcggcagaagtacaagcggcggccggaggtggacccactgcccttcccgggccccttccctgctgggcccctggcagtcgctggaggcccccggaagacagcagccccagtgaatgcactggtgtctcatctgctggtggttgagcctgagaagctctatgccatgcctgaccccgcaggccctgatgggcacctcccagccgtggctaccctctgtgacctctttgaccgagagattgtggtcaccatcagctgggccaagagcatcccaggcttctcatcgctgtcgctgtctgaccagatgtcagtactgcagagcgtgtggatggaggtgctggtgctgggtgtggcccagcgctcaatgccactgcaggatgagctggcttcgctgaggacttagtcctggatgaagagggggcacgggcagctggcctgggggaactgggggctgccctgctgaactagtgcgggcggtgcaggccctgcggctggagcgagaggagtatgtnctactnaaggcnnngccctngcattcagactctggcacatcnaaatnccgnngctgtgagcactngagaantntgccgaggccctgnggaagatnaaccgncnggtnnnccggagggggtgctgagagggggcggcaggccgctggtggcacacagacggccccgcagaaggggaagtggggccaatcatagggagaacgaggaagggccagaccagcgttcgcggagcagc

SEQ ID NO: 198012 - DNA, 1075 bp, Homo sapiens
  misc_feature (15)..(15): n is a, c, g, or t
  misc_feature (17)..(18): n is a, c, g, or t
  misc_feature (20)..(20): n is a, c, g, or t
  misc_feature (25)..(25): n is a, c, g, or t
  misc_feature (50)..(50): n is a, c, g, or t
  misc_feature (114)..(114): n is a, c, g, or t
  misc_feature (843)..(843): n is a, c, g, or t
  misc_feature (849)..(849): n is a, c, g, or t
  misc_feature (855)..(857): n is a, c, g, or t
  misc_feature (863)..(863): n is a, c, g, or t
  misc_feature (885)..(885): n is a, c, g, or t
  misc_feature (890)..(890): n is a, c, g, or t
  misc_feature (894)..(895): n is a, c, g, or t
  misc_feature (908)..(908): n is a, c, g, or t
  misc_feature (914)..(914): n is a, c, g, or t
  misc_feature (916)..(916): n is a, c, g, or t
  misc_feature (930)..(930): n is a, c, g, or t
  misc_feature (938)..(938): n is a, c, g, or t
  misc_feature (944)..(944): n is a, c, g, or t
  misc_feature (946)..(946): n is a, c, g, or t
  misc_feature (950)..(952): n is a, c, g, or t
ggctggtcggtcgangnncntttgntctacaagcagccggcggcgccgcngagtgaggggacgcggcgcggtggggcggcgcggcccgaggaggcggcggaggaggggccgccngcggcccccggctcactccggcactccgggccgctcggcccccatgcctgcccgaccgcgctgccggagccccagggagcatcgagtacagctgtccggcctccaacgagtgtgagatcaccaagcggagacgcaaggcctgccaggcctgccgcttcaccaagtgcctgcgggtgggcatgctcaaggagggagtgcgcctggaccgcgtccggggtgggcggcagaagtacaagcggcggccggaggtggacccactgcccttcccgggccccttccctgctgggcccctggcagtcgctggaggcccccggaagacagcagccccagtgaatgcactggtgtctcatctgctggtggttgagcctgagaagctctatgccatgcctgaccccgcaggccctgatgggcacctcccagccgtggctaccctctgtgacctctttgaccgagagattgtggtcaccatcagctgggccaagagcatcccaggcttctcatcgctgtcgctgtctgaccagatgtcagtactgcagagcgtgtggatggaggtgctggtgctgggtgtggcccagcgctcaatgccactgcaggatgagctggcttcgctgaggacttagtcctggatgaagagggggcacgggcagctggcctgggggaactgggggctgccctgctgaactagtgcgggcggtgcaggccctgcggctggagcgagaggagtatgtnctactnaaggcnnngccctngcattcagactctggcacatcnaaatnccgnngctgtgagcactngagaantntgccgaggccctgnggaagatnaaccgncnggtnnnccggagggggtgctgagagggggcggcaggccgctggtggcacacagacggccccgcagaaggggaagtggggccaatcatagggagaacgaggaagggccagaccagcgttcgcggagcagc

SEQ ID NO: 198013 - DNA, 141 bp, Homo sapiens
cctttttctgtacttgcttgcatttttgctttaatgtcttctacagaactaggtccttttggtgttttaggagttttttcctgttttttgaaggattcttgtccttttgatcttggtgttgatgatggttttgagtctttt

SEQ ID NO: 198014 - DNA, 538 bp, Homo sapiens
gcagttccaagtctatgaatctggcttatggatatactcccatgtgaacaaaatgatgtatctataaggttattcactgcaacattgtttataatagcaacagatgggaaacaaaataaatgcccctcaaccgggaactggttaaacaaattttggcacagccatacaatgggatccagtacagctgtaaaaatgatggagacacctctttgtgtgctggtatggagggaatcccaagacatattgttaagcagaaaaagaaatcaagatgtagaacagtgtataaatagtctgcccttcatatgaaaatgagagaaaaagaatatgtgtgtgtatgtatgtatgcatatataaatgcttgtatttccctgaatattcatgaaatacctttgtagaaaggaaattggtggtgagagacaagagtgggaagaaaactttttactgtatatcctcttgtgcctttggaatttcaaactctgtaaatatatttcctgttcgaaaaattaaattgaaatgaagacaactcataaaaaagaaa

SEQ ID NO: 198015 - DNA, 557 bp, Homo sapiens
gaataaagagtctgttcctccttccttgatatactccaatgattgtaaagaagggtacttgtagttttatattatgtttggcactagtctaagtattgtaggtgattaaaaaaactcctataaattatgttttctacctttaaaagaatgtgcaagtcaagcaaataacacatataaacaagacacctgctgaacaacttagcataataaaattcagtgctaagtgaaaagctatataatgttatactagttcatagaagagagggattcataagtgcagaaagagtctgtaagtctgttttgagatctgggctagagtagtgtttctcaaagtgttgtccaagactagcagtctcagcaccttctgtaaacttattagaaatgcagattccaggggttgccccagacctaccatatcaggaactctgggttggggtccacaatctgcagtttaacaaaccttccgggtgattcagatgaagttaaattttgagaatcactgctatagataataaagaatgtgatattttattcagttaatatgttaagtgtctaat

SEQ ID NO: 198016 - DNA, 129 bp, Homo sapiens
tggagaagtatttaggagacggactccatgagatggatgagacagagaagtctagaatgacttctaaattttcactttggttgaaggaggaaacacaggagaaaatgtttactggtgttttgtaaggga

SEQ ID NO: 198017 - DNA, 429 bp, Homo sapiens
gactctagagctcccaggtttaccaagacaattgttgaataaaatttaagtgaatgagtttgtgcttcatatttaacttttaactttccactaggctttattaaatggaaaactgaaatttacaaagtcttagagtagaagcatttttatcctggctagggattctctaagagaaccagtagcaccaagatgcactggaacagtgcaacgagagagttcatgccttagggtttagaagcatacaagcaaagggaatggtgcccacttcttactagaagaatttcacaggctggagtctgggcggaggagcctgggatgacagtagaagtgtgcaggaagcactaagtcaagcctgtactaccacctcttggtttaacaataatgtataagttacctacaagccaagtggtcactgctgaaaccatcttg

SEQ ID NO: 198018 - DNA, 356 bp, Homo sapiens
ccacaaggtctcacttctgcctgcctctccaatgccatctcctgtcaccatttggggcctttagttttgagctgcaagagttcctcccatcacacacacacacatacacacacacacacacacttaaatgagtaagtaaatagaacatacaaaacgcttaaacactttgcacatagtgagcataataagtttgctactattattagactgtcttcagtaaatatttactgggctgcctactcagtgccaagcactatgggaggctcacagatacaacacgaacaagaaatatgtggccttggccagacgcggtggctcacgcttacaatcccagcactttgggaggccgaggcagg

SEQ ID NO: 198019 - DNA, 416 bp, Homo sapiens
cagaggaggagactgaggcacagataacgtaagtaattctcaccaaggtcatgtggccctgtgtggaggtgagatgtgcagaatccaggaaggacacagaccctggggccctgggaaagttgctaatgctatctcctattctcctctcattaagaaaaacatagttttacctggctactaacaattgtttgattttttcttactcttgggtctcaaaggagttttaactttaattgctagccctcctttgtttacaccctgcgtgagccaggtaccgttttaggtgctgaagatgatgaaaacagaacagtttccatcactgtggagtttacatgttggcgggggcaggtgatgcaatggcgtgaacaagtagcaaggtagtaggtatgtggtaatcaggtctgtgcaaagaagaa

SEQ ID NO: 198020 - DNA, 777 bp, Homo sapiens
aactctggaaatcagattctctcccctcccctgtttgttgttgctgcttgttttggggttggtttgctctagtgacttttctaagtatttttgtaaattttgtttgctatgtgtggccactgaggtctcccttgttagcttagtaaccatctagttatttaacagagattcccctaaatgcctggagccaaaaacaaaaacaaaataaaccctaaaagaaaaaaatcccctaaaagaaaaaaacccaaactctcccagactttgcagattggcactttgttggggcactccttcaacacttagtgaggccattaacagctctgccgtagccttttcttcctgtttgcatggagcccaaagttcatctagaggtgaaagcttaaggttccctcagatcttttcagagcatacacctagccctcagcatgcccaggaattttaaaaagccccttttccctcaaatatctcatttccaagtttattttttcacaggttttttgttctctgtgttagttgctcctgtattatcccttacccctcatggctggggctaatatatttgcctttaagtacttttgacaaaggccacctgggaggcttcttctgtcctgagtaagttccaaggcatgtgaaataaagacaagcccttgagtcagttcctcagggacacaccagacatcaaaacacacaaccatagttatttgagaataaggtccatattgctccttctgcaacctgccctaggaacgtgggctgtcatcttcagtggccatcttt

SEQ ID NO: 198021 - DNA, 776 bp, Homo sapiens
gtatccatgaagagcctgtctggatctcccttcctgcctaagatcaatttctaaatgtaaaataactggtttcaaagatacagatgtttatttaaaatgttgctgactgttgccaaactgctatttagaaaagacattccaatttacacctttaccacagtgttttttaactctgtgttatcattctttctaatctttgccagcatggtaggcaaaaaatggacaaaactaaaaggagaattagacaaatccataagcataatatgagatatttcagcttgcctctctgagtaattagaataatgagacaaaaatacataaaagatttaaacactataattatcaaatgaatctaattgacatgcattgaatatttcacctaatacctacagaatgcagattgtttttaagtgcctatgaaagtttttcccaaattgacacatgctggacaataaaaaagatcaaaataatcaattcttgagtgttttctgacgtgttggaattaagcaagaaatggattaccaaaaaaactagaaaattgtcagctgtttgaagataagcaatatatttctgagaaattcggggattagagaagaaataacattaaactatttagaacagaaccatgaaaatatagtataacttaaaggatgtgtatagagccatgcttagaggaagagttatagccttcaaatctatacatgagaaagaatgaaggctaaaaataattgaaaggacttctaaataaagatggctgagtgaaagacacatttact

SEQ ID NO: 198022 - DNA, 409 bp, Homo sapiens
tgactggatataagcctcactgaaaaatgtccacactgctgaacaagataaactacaacttagaaccggcagccttcacagttaccagtattctttctgatggtggtgtggctctttccttccttaagtgtcaggggcatacgctgagtgtggaagcccaaggttggggttggtgacagcactgcctcaggagagctgaggcgccactcctgcagctgcacagctggctccgttcccaggttctagtagctgcgggagggttaagcagcccagtccatgcctgcccctgctccctccatcactcaggcagaagcctgaattcttttgcaggcgttccaccactcttgcataaagtttggaggtcttgtgatctctccaaaatttaccatcatactctaaatatgaaatt

SEQ ID NO: 198023 - DNA, 235 bp, Homo sapiens
tagagacagggttttgccatgttgctcaggctggtcttgaactcttgggctcaagtgatcttcccacttcagcctcccaaagtgttgggattacaggcatgagccactgtacctggccattagctgaattttcaaccctctcttcactgctggcttttcagccaatacagatgttcaaatctttcccattctaagaaactttctcgcaatcccatacaactctgtcttccctctt

SEQ ID NO: 198024 - DNA, 267 bp, Homo sapiens
ctgacatacattcaggggttttatgtgtgcatttaatgtttcttcaaaaaagctcagttgctttacagccagaaccccatattgcttttctattcattataatacctagcagatcattggtcttgttgcaaattcttatcaagtttaccttgaattgagtgttgagcttctaccttgaaatcctaacattctgtgttctgctcttgctggccttcctgactgatgctttgtgattgtgtgtgtgtgatggcatatgtgtctgagtgt

SEQ ID NO: 198025 - DNA, 461 bp, Homo sapiens
attgccttgggtaaatgcatgcatttttctacaaatttgagttaagtataacagtaataaatccattcacttttaaatgacccattcaaacaggggtactacacagacctccatttctaattggaataaatatcagaaaagggtcatctaggtaactctgctagtttactagactcctagtcactggagtaagtacatagcacaaaggtcttatatgtttatagtgataaaacagatcaaggagcaataatgcaaatattttatcctaatggtataagctaatataaaagatgtcattaagaggccaggcacgggtggatcatgaggtcaggagttcaagaccagcctggccaagatggtgaaagcctgtctctactaaaaatacaaaaattagccaggcatgatggcaggcacttgtaatctcagctacccggggaggggggagaatcgcttgaacctgg

SEQ ID NO: 198026 - DNA, 401 bp, Homo sapiens
attgccttgggtaaatgcatgcatttttctacaaatttgagttaagtataacagtaataaatccattcacttttaaatgacccattcaaacaggggtactacacagacctccatttctaattggaataaatatcagaaaagggtcatctaggtaactctgctagtttactagactcctagtcactggagtaagtacatagcacaaaggtcttatatgtttatagtgataaaacagatcaaggagcaataatgcaaatattttatcctaatggtataagctaatataaaagatgtcattaagaggccaggcacggtggctcaagcctgtaatcccagcactttgggagtccaaggcgggcctttctctcactgtccagatatcttgctctggggcaaacaag

SEQ ID NO: 198027 - DNA, 422 bp, Homo sapiens
agcactttgggaggccaagacgggcctcccacaaggtcaggatcacaaggtcaggagatcgagaccatccgagctaacacaacaacacagacgaagacatacatataacacaggcggagacacacaacacagacaaagacacacaacacagacgaagatatacaacacagccgaagacacacacataacacaggtgaagacacacaacacagacgaagacacacaacacagacgaagacacaacacagatgaagacacacacattaacacaggtgaagacacacaacacaggtgaagacatacaacagatgaagacgcacaacacagacgaagacacgcgcataacagatgaagacacacaaagacacacaacacagacgaagacacacaacacagatgacacagaacacagatgaagacac

SEQ ID NO: 198028 - DNA, 640 bp, Homo sapiens
attgcctcatgcttccctgggcagtgaagccctcccagtgttttggaatcccggtgcaaaatagccttttcaacctcctgacccacaaatctgagtgggtctcttggttttaacatgggagaccacaactgtagagcctctctgatgtgacagctacaggaagtccggtgctgtgctggcggcagaggccctcgtctgtcatcccagcccctgacggttctccttgtcttactagcttctcccctccttggcagagctctcaaaagtacaggaaagagattgcttcagtgtggtgagaagtttggcacacatctgaccaatggctccatctctagcaaatccagagtaaggtcacttgagaggaaacaggcccaagttaaaagcaccctcacagggtccagtggcttacgcctgtaatccaacactttggaaggccaacgtgggggcatcatttcaagcaagaagtttgagaccagcctgggcaacaaagagagaccccgactctaccaaaaaatatgcacgcctgtagtcccagctacttgggaggctaaagcaggaggactgcttgagcgcacgagttcgaggccacagtgagctctgattgcaccactgcactccaccctaggtgatagactgagac

SEQ ID NO: 198029 - DNA, 424 bp, Homo sapiens
gaggggtgtgtgtgtgtgtgtgtgtgtgtgtacgtatagaatgctgcaggtgtgactggaaggtcacgtttggtcactgtagcaacaggagtaggatgaagtcctgcacacagggtctctgccactgtccaactccatttggagaattgcaactctgttgccatgggccccaaccaaggaaaccaggtcttacagtgggctgcacttagaaaaccagggtagtcctggccagcatggtgaaaccccatctctactaaaaatacaataattagctgggcgtggtggcaggcacctgtaatcccagctacttgggaggctgaggcaggagaatcgcttgaacccaggagacgaggttgcagtgagccgagattgcgccactgtactccagcctgggtgacgagcgaaactccatctcaaaaagaaa

SEQ ID NO: 198030 - DNA, 426 bp, Homo sapiens
acctatacagctgtactctacaaagaatgaaaggaaatatactataggtaaattttctttaaaaatcaaccaggatatcaagaaaacctaggctagaatacagactgtgacagatcagtctaactgtattacaaatgtatgataacctaactgaatgatgtttaggtaatacagatacagatagacacaaaaataattatagatgggttagcatatacatatacatactcacatttcatagctctgtcgactttcagagcctgaagcagtgacacacccgtagtaataagcatatccaacacccagttcttggtttctaaatatcatcctccaataaaagaaaccagagtcccttggacatagggctgattttggtactgggataaggcaagtacaagatagagtaacttgtagtgtcagaaagta

SEQ ID NO: 198031 - DNA, 656 bp, Homo sapiens
cgtgttagaggatcccttcatgtcgagacttcatcccccgcctccaaaaaagaaggaagtcttgtcttatactgcaatatggtgaacattgaggaggatgtaatgctaagtgaaataagaggacaaatagtgtatcattctccttatgtgaagtatccagtgttgccaaaatcatagaaacagaaagtggaaaggtggttgccgggagctgggcatgaaagccctggacatgaattcatgtccagagctttcatgccttaaaggtacattcgttcttccgctcaaatcctgatctggtccattaaagagtgtgcgcggacaaagtttctgaaaggattagagaaggattcccccccaaggattgcccaaaactgaactacagacaaacactattttatttaaataaggggaagctttctaaaagtatacttctcctaataaaaataggtttataattggaatgataaatggtttctacaccaatttacatcacaacatgtaattttaggcagtacatcggattctaaagcacatcatgctatcctttcatagagcctcgagatcaagctaaaaaattccttagtggatgaagcatggaatgaagggtacggccgatcgatcgcaggggtcaaaaaaacaaaaccaaaaaaagaaaa

SEQ ID NO: 198032 - DNA, 668 bp, Homo sapiens
gaattctattagccttaaaaaagaaaggaattctgtcatttgcaacatgaataaacctggaggacattgttaaatgaaataagccaggcaccgaatgacaaaaaccgcatgttttcacctctacgtggaatctaaaacaatcagaactcaacagaagcagagagtagaatgatggctactagaggctaggagaaggggaatgaggaggtgttggtccaaagaaaaaggaatcttgaaaggcaggttatcctggattatttgagcagacctaatgtaatcacaagggtccttataaaggaaagaggcaggcaagagagcctgagtcaaggtggaagcagaggtcagagtgatgctgggacacaagccaagaaattcgggtagcctctggaagctgaaaaggcaagaaaacgaattcttcccatgagtatccagaagtgcagccctttttacccatttaagacttctgacctccagaacagtaagataatacgtttgtgttgttttaagccatgaagtttgtagtaacatcttacagcagcaacaggaaactaatacacactgcttgaaaattttctttttaaaaaagtactggcctggccgggcacagtggctcacgcctgtaatcccagcacttttggaggctgagggaggcggatcacgaggtcagg

SEQ ID NO: 198033 - DNA, 398 bp, Homo sapiens
ctagcccaaagacaacaacatttgaaggaaaatcagggatataatgtcaaagaacactgcagtccaggggcgaaatgaatgtgccttgagcaacttctctaggatctcacttgatagcaggctgggatttatagtacccaggggaaggctgacagtatctttcctccagatcagctctgagctgggcttttgttgataagctgtcccaggagtgctgaggctctgtcactgacagaggaggcagatgtattgaaagcaggatcgtgggttgataatttgttagggatgtagagaagcctaactggttttcttacgtggaaaagaccaccctcttttcccacttcccagatgtgctaaactcttctggcagaggatataggattgtccttggggaatta

SEQ ID NO: 198034 - DNA, 181 bp, Homo sapiens
aaggaagcggggcgcgtggggccggcgccccggagaaagtttgttcgcgccgggaccctcgggcaggccgaaggtgatccaagcctcccgcgggagaagcgcgtagtctccggggcagggggcggccaacatggagtctgggcgcagggctgggggggggggggcggcgcggaggtgggag

SEQ ID NO: 198035 - DNA, 415 bp, Homo sapiens
gatttatattttcatttttcattatccttactagtcttttagtagttttgcaatacagaaaatagaaatagagttatcaaagtggtagtaatgagtaagatttgatcacacatgtcaaatgcctgaggcattttatttatttttattttttctgtcgccatggcagaacagaatgcctgaggtatataataaaattcacaaatgtatcctttttcctcccagatatgtctagttaagtttctgaacagtatgtgttttaaaagaggaactctaaagagaacttaatattcaactattttttgtagccgcttattcataattagcaaatgaattctgaaatacttttgtaattattgttccctgatggatttatttgctatgttaagaaatagtataagactttgggcatctatat

SEQ ID NO: 198036 - DNA, 232 bp, Homo sapiens
tttttatttccctgtgtgtgacatgtctattctctctgtctgcttttatgatccttattttatcactggtttgaggaatgtgatccctatctctcagagatcactgacctttattacctgatatacagtttctcacaagccattgtttcatagataatatggaaatatttagaaattttaccaagtttactctcaaccttagtatttgaagataatgtcctcctctttattg

SEQ ID NO: 198037 - DNA, 958 bp, Homo sapiens
tttgaaccactgactgattgccctgtacttggaggatgtgaggaagcagaattgagccaataaagagaagaggaagaaggagccacagaactgagtgggatgtcccctgagcactccttggtggagcaaaagtcttgcaagtctctagtgcgctgggcaggctgagggcgttcagcggagaacacagctctgtaaatacatcagcgaggatgcatatatacagtttccccagtgctccctcagacccttggaggctgggctactccaagctctgtttcctgcaaaaaaatggagtaagtcctgtggagtctaaatacacattccctctgcattatacccacgcctcgacttcattatatctaggagcactgagacaaagagatttataacaaacttcatccaagccaagaatgaaacacggcagcctccatgcagcaggaaacccattgatctgtttcttataagcatgtggttctatgctgtttttctgccaaagcttttccctgcctcccacttgaggagcatacaccagctgattctgcagattgactctacatcattctctgtcatgaagccatggcatgtgtttatgcgtctgtaacaaagcgtttatattctgccatctgcataaaaactgctgaaggacatttcagcaagaatccctatggtttatgcagctgcatgttgaacatgaaaatctaagatatgacagtggtctttcattcatacaacctttgaattttggtaaagttctgatgtaatgttaaagagtggtattttgaggactacgcatcaagatataaacatggcacatcttttataatatcagccactggaagacatttgaaataatatttgtataattgtgggctgtattatctttctttcttgcacataataaagtcagatgcggccggcgcacgttattgttggtacctcaacaacgaaaaaactatcc

SEQ ID NO: 198038 - DNA, 959 bp, Homo sapiens
tttgaaccactgactgattgccctgtacttggaggatgtgaggaagcagaattgagccaataaagagaagaggaagaaggagccacagaactgagtgggatgtcccctgagcactccttggtggagcaaaagtcttgcaagtctctagtgcgctgggcaggctgagggcgttcagcggagaacacagctctgtaaatacatcagcgaggatgcatatatacagtttccccagtgctccctcagacccttggaggctgggctactccaagctctgtttcctgcaaaaaaatggagtaagtcctgtggagtctaaatacacattccctctgcattatacccacgcctcgacttcattatatctaggagcactgagacaaagagatttataacaaacttcatccaagccaagaatgaaacacggcagcctccatgcagcaggaaacccattgatctgtttcttataagcatgtggttctatgctgtttttctgccaaagcttttccctgcctcccacttgaggagcatacaccagctgattctgcagattgactctacatcattctctgtcatgaagccatggcatgtgtttatgcgtctgtaacaaagcgtttatattctgccatctgcataaaaactgctgaaggacatttcagcaagaatccctatggtttatgcagctgcatgttgaacatgaaaatctaagatatgacagtggtctttcattcatacaacctttgaattttggtaaagttctgatgtaatgttaaagagtggtattttgaggactacgcatcaagatataaacatggcacatcttttataatatcagccactggaagacatttgaaataatatttgtataattgtgggctgtattatctttctttcttgcacataataaagtcgggtacgcgagccagtttttattttttccctccctcgtttattccaaattttat

SEQ ID NO: 198039 - DNA, 282 bp, Homo sapiens
aagccataagattgagaagagatccaaggactccaatatgaaggtcaaggggaggagatgccagcaataagtcagtgacgtaggagggaaatgactagaatggagaacccaggaatattctttcatgcatgcctccattctgagcgacccctcatacagagttaggcatagtcttcaacccaagggtcccatggttcattccagattcagaaagaacccatgtgaaacagcagcaagtaatatgagagggtgtctctttaagaccatgctgtaaggttcaga

SEQ ID NO: 198040 - DNA, 220 bp, Homo sapiens
gtagtataaagcagcccagcataatatttaagggcattccagcagggaagacagctattaaggatatgattgtacaattaattgttatcattgtaagtgccacaaggaaaacaggataccatgagagcctattaaaagaagacctccctcatctgtgcaggtcaggaagggattctgcagaagagttgagatctgaaaaattagtcagacttagccaaag

SEQ ID NO: 198041 - DNA, 319 bp, Homo sapiens
acagcaaaaaagggagaggggcacaaaaaaagtggacacatcttggtattttttattggaatgttaactatgtattctgcaagcatttttattgatctctaaggataatattagctaacaatttagtgtcaggctttgtgctaaatgaaatgctttactggtattgtctcatttattcacctcatttttacagatgagaaaaatcaagaatgaggagagttagtaccatgcagatggtcccaggatgaaaccagaatatgaactcaggcagtccagctgctcaacctgtgttcttaaccttcatgccttcatcgatcgc

SEQ ID NO: 198042 - DNA, 582 bp, Homo sapiens
tgtacagcaggtagcggctatgacgctgagtaccgagtctgtggccgcaggtagctaggcctatgggtgtgcaccaccacacctggccttctctgcctctttcataaagggacacttgggaaggcatttagggcctaccaggagaatccagcatgatctccccatctcaagatcttttcatttaattacatctgcaagacccttttttcatataaggtaacattggaggtttcagagatcaggacttgatatctttaagggtcattagtcagcctactgcagaagagaatgggaagtggggaaagtgaggaaggtagtaacactttgggttgctgtgtaaatggtttccaacaaccaccttcacagtgaatatcactccgcgtgctcagaactggagtgccccgggccatagtgcctcttcagcatggttgaagttgggtgggattaagtgttgatcacactgggttctcataattgagaagccctatctgtaaacattatcataaacaaaaagtggtactaagcttaaggacctcccagccagaagcattagtgctggttttctccaaaggccgtaattgc

SEQ ID NO: 198043 - DNA, 161 bp, Homo sapiens
aacaatatagcatagaactaggttaatactcaaggtaaaataaggttacttgaaactgaaaatcatagaatcacatgtaccagtagcaaatatgaggcatctttggaaaaataatctcactgctaaacaatttctcttccaaacagttctgagtcagcatt

SEQ ID NO: 198044 - DNA, 578 bp, Homo sapiens
tgctaggtttacaggcatcagccactgtgtctggccaagagagaggattataactgctgaaggggttatgtggttgagagagggttattatttattttttaaagggttcttgattgtatttgggatgactggtaattcctagttgtagctgtggtctgctagggcctactataaataagttctagctcaacaggttattttttacttgctaaataaaataaaagtgtgagtcagtaattcttattattttctccctcttttgtggaaaccggcagttttactgcagaactctcctcaaggctaagctaataaaatacccaatattgtttttctgactatgaagagactaagaaaagacaacagaaaaattagcaagtcttttataaaaacagaagacatataaagatgcagcaacttgcttaagtcagtgatactacactaacttataccaaaacattttgagtagcacacgtaggctagtgaagaaaacctgcatctactagaatagttttatcttgatggacttgctaaaaaagggtcatcatagacaatacattaaaaatctggatggcgctgtg

SEQ ID NO: 198045 - DNA, 479 bp, Homo sapiens
gtgccaggcagtgcactaggcccttggggaaggtccctgcatgaatggagcttaccatctggtcagggtcatcttgttaagagcctgagttctacaatcagtgtcaggatttaaatcccaactccccctttcttttttttatttttataatttttttttttattttaaatagagacaggtcttgctatatgttgcccagctggtctcgaacacctgggctcaagcaatcctctcaaagtgctgggattacaggcgtgagccgccatgcccagcgtcaattctccctttccatctggtgcacatgaacaaattacttaacctctccttgcctcactttactcatttataagctaggaatactgtttagtagtgtttgactcattgggtcattgtgagttttaaacgtgattacacataaaaaggtcttagtacagtgcctggcacataatacacattaaatgtttgcaattattaaaaca

SEQ ID NO: 198046 - DNA, 488 bp, Homo sapiens
gcagtgcaactcaacatgtctacacttgttgtctctaattctcctttaattaactcctaaacatacttaaatcagactcttgtcctcaccattcccctagaactctggtcaggttcaacagtgacctttaagttactatatcagtaggttagtgtttggccctcatcttacttgacctatccagagcattagagacatgtatcttcctagaggcctgtgactcacttgttcctccacatttttcagaccttttaattttggaatccctgaaagatgagcacttagtctgcttatctatttgcagttattgttggggatctcattcagtctcatgacattaaatatgatttatagactgatgactaccaacttaatgtcattactccagacatttcttcaaaacaatcaattttcctatttcaggaactataggaatttttaggtctacatcaaaaattttaatagacaagttttgcatcttccaccag

SEQ ID NO: 198047 - DNA, 236 bp, Homo sapiens
ccactccaagaaaatattccccaatgcacctgcatgcctccagatctatacacaagactgttcctctgcccagagcacccttcaagtcttctcaaactggaaagctacaattttccttcaagactcagacatctgtcatctctgcctcacaaagagacacaacataccatgttcccccagcacttgtcacatagcactattatctgtgtgtgtgtatgtgtgtctcccatgaaact

SEQ ID NO: 198048 - DNA, 596 bp, Homo sapiens
aatgtgggtcccatcccaagtacaaacatggctgtaatacaaaacagaatgttacacatggctataaagaggcatatacacctctcttcctcctctcctagaatacagaagggatggagttgttctatgttctccagagatcagaatgggcccgactttaatgttggacccatccatggggcagaaggggggaggcagatttcaggttccatagtctgtgagcatttaacagaagatggaggaggtgctgtgaggccatggggaaaggaaggctgattacctgaatgggaatgggccccacgttatgtcggtcccatcctgacttgccttatttatttgttcgacgcgtctctgaatgtatccgcctcggttcccaccactgccttcgctgcgcacgccccctcgtgtttccagggctgaccgtgtccccacccgactccgcatgtttgggtctgtttcctccctctctggccctgtcttaccccatcacccgactctggccactgacctcagggccgaaggggaggtgttgtcataggaacgcgtgcggagtcgccccgtctccgagggagggtctgtcctactgtactacaggt

SEQ ID NO: 198049 - DNA, 353 bp, Homo sapiens
atctttacctttctcagaacccaagatataatattttaatagtcccagattatttttgacaccacctctccacatctaacgtcttccttctattacagagccgtgctcaagagtgctagactagattctaccaagtagaagctcttacctgagatctggaagaaagaatgaaaacattacccattcttttatcagaactgaacaaattagatgttcctaggcgaacatagtacttcgcaaagatctttcagcctttttctagaaatcgcttacctgagtacagaaggcaggagggattgtgccagcagtttcccaaattgctagtagtttctgtaagtttcggattttctaaa

SEQ ID NO: 198050 - DNA, 210 bp, Homo sapiens
tgtaagagaccccccaagaaacatgtcattctactgaaaacgcactgctaaattacagcgcactgtctacacaagatgcactcacttctgacaccaactgcaagactggggttccccaaaccacccaagatgcaataactgcctaggactcccagagctcactgaaagtggttgtgcttaagattgctggttatcacagggaaacaacat

SEQ ID NO: 198051 - DNA, 190 bp, Homo sapiens
ggtccgggcggatgataatacaatcagaaacaactaaacttaattgaagcatgttaaaccctgcattagggccgggtgcatccggagtggcaaatgccagcctggaagcagctgttagggtccactccaggacctggagctgtcccttaagaatccctgtggatatccccttcccgcattccaagttcta

SEQ ID NO: 198052 - DNA, 232 bp, Homo sapiens
aatagtatttattttatgtaaattatgtttcaatacaattgattttttaaaaaaaaacgtttcccagagtgatcaaagtggagggcagggaacagtaaacatcagtgcttatgttatagctactagaagcctcccaattccaacgacatgctttcaagcaggtctgatccttcccctggaggatacctctgacccaggggtgctacaaatgcattgcccctagttgcttctg

SEQ ID NO: 198053 - DNA, 210 bp, Homo sapiens
catcgcaaatcatggggtaaatgtcttatgaaagctgccatacaagccatgtataaacacactgggatgcttcaggcaggcgaatctatcactcagccctcaagcaaatctctgtgcttctcttacaaaaacagctataactctcagaaactcgacagtcctttcaggtaagcattaggttacaaagcatgttttcctgtggaagccaca

SEQ ID NO: 198054 - DNA, 721 bp, Homo sapiens
ggatatacatacacatacacactttttttggtgtgtgagagatggagtctcactctgtcccccagactgagtgcagtggtgcaatctcagctcactacaacctctgtgttgaaaaaaaaatcattgaattgtacacctaaaatgaatgaaattgatggcatgtaaattatacctcaaaaaagaggttgaaaggaaaagaaaaggggccgggcgtggtggctcacgcctgtaatccccaacactttgggaggccaaggcaggtgtatcacctgaggtcaggagttcaagaccagcctggccaacatggcaagttcctgtctactaaaaatacaaaaattagctgggcgtggtgtctggcgccgttaatcccagagtagctgggattacaggcgcccgccaccaagcctggctaatttttgtatatttagtagagacacggtttcaccattttggccaggctggtcttgaactcttgaccttgtgacccacccgcctcagcctctcaaagtgctgggattacaggcgtgagccaccgcgcctggcaaaaaaaacatttttttttttaacctgcacattctttgacctggcatcttcacttctggaaatttattacaggccaggcacagtgtctcacacctgtaatcccagcattttgggaggcccaggcgggcagatcacctgaggtcaggagttcgagaccagcctgaccaacatggagaaa

SEQ ID NO: 198055 - DNA, 251 bp, Homo sapiens
aaatcctccaaccaatccttacttcaagcaaatgcacctttaccaggaaattttcctttcccagttctttacctccttaggtgcacccagaaatattctctttcagtctccttatcactcctttgttcatatgaaacttactagcaactatcgtaacttaccaaattatttcctatggcagtacattaagggtaaaagtcacattgtttatctttgtatccattattacacaatgtcacctgtacaggaag

SEQ ID NO: 198056 - DNA, 1146 bp, Homo sapiens
attctttgcctttgctcatgctatcctcatagcccagaatattcttgtcccaaagtgctgggaatacaggcatgagccaccatgcccagcccttccttgtttctttaatgatggctattccccgcttcccaggccagaattatggagataattgtctcaactgattatttcctcctccaagaaaagctgaagaatgcatagtgttaagcacacggggtgcttgatagcatagtggtaaggttcaagagctttgaagccaagcagtccatctgttagctacgagaccttggagctctcttagcaaagaagagaggaatgtctattgcgtggcaatctgtggtgcctgccaaaaaagatagaatacaaagattaatcatacagtaatactcagtcttcaacctcgaggtgctcttaaaggagcccatgaaataaaataataaaccatagaaaatgataagtactactaggtaaaaaatcaaggtagagagtgatagtacttacaaaagagatacagaaagaaattggagtggaaaggagggagacagtcaggagggcttcttgaaggaggtggccaggagaaacaaggatttgggtccatggaattcagagcaagaatattctgggctatgaggatagcatgagcaaaggcattgagactgatatatcaggttgcatatagggaacagagacaagagagtggctcggtttgaccacgaatgaagtgaaatagagggagagaagagaatatagggttgaggtccggttaggcgaggccttgaatgtcatgcagaggagtccagtagcttagacagtttatatgctcctccccagtaagacgtgtagccgtataatgagagctttcgagaccaagctgtgtcgtcaattctggaagactgtcgtaccagaaggccttgacttttcctatcttggtccaatgtcactccttgcagatttgctatctcagtacaaaagatgtgaaagacactggaacatgctgttttacaaaacatctcagaaagagccagtctgagaagcagtgtgcaatggcctcaggtgtgtaccctcaaattaagagaaatattcctgaccatagcagaatatgctttctgttgtctttcttattcctatacagtgctggtggaggaa

SEQ ID NO: 198057 - DNA, 1163 bp, Homo sapiens
ggaaagctataacagggaaacagctatacaggacacaggtttaccgcggcatcagcctcaccagtcccaaagtgctgggaatacaggcatgagccaccatgcccagcccttccttgtttctttaatgatggctattccccgcttcccaggccagaattatggagataattgtctcaactgattatttcctcctccaagaaaagctgaagaatgcatagtgttaagcacacggggtgcttgatagcatagtggtaaggttcaagagctttgaagccaagcagtccatctgttagctacgagaccttggagctctcttagcaaagaagagaggaatgtctattgcgtggcaatctgtggtgcctgccaaaaaagatagaatacaaagattaatcatacagtaatactcagtcttcaacctcgaggtgctcttaaaggagcccatgaaataaaataataaaccatagaaaatgataagtactactaggtaaaaaatcaaggtagagagtgatagtacttacaaaagagatacagaaagaaattggagtggaaaggagggagacagtcaggagggcttcttgaaggaggtggccaggagaaacaaggatttgggtccatggaattcagagcaagaatattctgggctatgaggatagcatgagcaaaggcattgagactgatatatcaggttgcatatagggaacagagacaagagagtggctcggtttgaccacgaatgaagtgaaatagagggagagaagagaatatagggttgaggtccggttaggcgaggccttgaatgtcatgcagaggagtccagtagcttagacagtttatatgctcctccccagtaagacgtgtagccgtataatgagagctttcgagaccaagctgtgtcgtcaattctggaagactgtcgtaccagaaggccttgacttttcctatcttggtccaatgtcactccttgcagatttgctatctcagtacaaaagatgtgaaagacactggaacatgctgttttacaaaacatctcagaaagagccagtctgagaagcagtgtgcaatggcctcaggtgtgtaccctcaaattaagagaaatattcctgaccatagcagaatatgctttctgttgtctttcttattcctatacagtgctggtggaggaa

SEQ ID NO: 198058 - DNA, 837 bp, Homo sapiens
ggacacaattcaacgcataacacttactaagtcttcatccctctttatacaattttcttctagggaaatccaactcactctctgaagtgcacttgagtcctgcctcctacctgaagcctttcataatggaattccctcctctcagcactctgtcatgcccttcaaacaagttatatcttttatgtggttcgctattcctgtctgcccagcgcggctcaccatcctgagagtggaaatgattcagctgctctgtgcacccttcacagggtccagaggcacttcctagtgagatgatttaggatcttgcagtacagagaaaaccattacaatcagaggaaatggggatggagagtaatcaggcaatgttttctgaaagaggtgagataaagcactggaaagatgggaggaagagagaatattccaggctgttttgtgaaaatagtattttttcgttttgagggtaagattgtaaccatgcttccttacaatgatgttttagaatgttctgcatagggtccaccaggagccttaacatcagtcaggattgggttcattgtttccaactgcacttggatgtttcttgccaagcttggccctctgcacattttagatattccatctctgttaactgtctatgcctttagctgcctcagtgagatgctcatctgtctttagcaaggtaacaggtgctgtccatccatgcattttggttctgttgtgttctggtgctgttttggccaggaaggcactgcattttaagaaacgcagtggttggcatttcttttgtgtaatggcggtagttagagtgcagagacttggtggcaataaggaagagat

SEQ ID NO: 198059 - DNA, 124 bp, Homo sapiens
agagaaagtaaataatagaatctggtgttgaatttagatgaatagttttcaatctttatagtatatcagaatcacctaaagagtttattcaaacacagattgctgggcccccacctctagagtt

SEQ ID NO: 198060 - DNA, 154 bp, Homo sapiens
tgctaggattgcaggcgtgagccactgtgcccagcctctttttattttttttaagttaaaaaataaaaacaaacaaacagacttgccatatgatctatcaatataacttcctttttttttcttttttttttagaaaagatgtttattcaggcct

SEQ ID NO: 198061 - DNA, 632 bp, Homo sapiens
gggattacaggcgtgcgccaccatgccccgctaattttttgtattttaagtagagacggggtttcaccgtgttagccagcctggtctcgaactcctaacctcaagtgatctgcccgccttggccttccaaagtgctgggattacaggcatgagccaccacgcctggccatgctttagtttaaataacataaagttagcatctaggaaaaaggaggatgttttagtttcttcattatgatggaatgaaaatactttaccagagtaatttttaaggttatgtgtatttagagcttataatataaaattcatgtacacacgaaagcacataaataaaggctgatataacctttgacctaataattctatttcaacaaatgtatcctgaagaaatactagagttgtgtccagaggtttatcaagattattcattgtaccctttaaaaaaaattagcaaaataagtagaagtaataaatgatctacagtaagcacataggtcaaaaatggtatatccataaaataaaatactatgcagccctttaaaaattgttttcaaagactaatgaactggagaaaaaaagttaaacacaaaagtccttttgttattctgcaactttcttaaataaatagatgg

SEQ ID NO: 198062 - DNA, 301 bp, Homo sapiens
gtgagccgagatcatgccactgcactctagcctgggcgacagtgtgagactccatctcaaaagaaaaaaaaaaatctataattgtataaaatcccatacactagcacttcctgttattttgttcatcagcggacagcaaagcatgtagtcgtgttgccttcttgtctcccagtgatagacccatgtagcatttcataaaaatggataattaaaggggagaattgtcaaagatcaaagtgcatcaaataaatgaagtgttaaaattggattaaaattttagctaattgtaaacagcattctt

SEQ ID NO: 198063 - DNA, 447 bp, Homo sapiens
catctatttaacacatcacctttatgtaatatgtagctagttttagtgttttaataagtcccaactaaagactgagtgttttcagtgaagatggaaatggagacccaggcacttgcttagagttatcgtgagtccgatgttcctgaacttcaagttgtacaattaagggcatactctaagaacttctggatgctttctggagtatacagacagatcaactaatgacttaaatgagtgactcttgaagctgcaagaagaggaaagaaataaccacaagaaggggctatctcagcatctgttattcctgacaggaggaattaaatatgctctgctggtaattctaagcttttctgcaggggatctgcttgccccaggagcaccttagtcctcattgaggcagccattctgccataaaaacgatcatgtctcaagctgttcctgccgtcc

SEQ ID NO: 198064 - DNA, 417 bp, Homo sapiens
gcctggagatggtaaaggactttcagcagggttatgacaaaaccataaacctgatgatgcctgaagtgtccagacttccaaattcatgcggtttggagaatgttctgcctgacagcagcagggagttgtaagcaggttcagcgtcatccagaaatgcttgtgtcagaccaccgcttccacagagggttctgcagagataaaagtagacaagatggcgaggaaaaggttaaacactcccattctctaggattgcctggcataattctttgtgctcatggatgtcatcgtcaagattcgcgactgtgggcaggaatgtgcaggtgggggagtcagcaccaatgaatcctattaattcatgccagccagtcacttctgctttcaggaaaagattcagatttccccagtcttaggaacatt

SEQ ID NO: 198065 - DNA, 390 bp, Homo sapiens
tgtagaaaatagttattgagaggcatttgctgggtagtggtctttcagttggcaggggaaagatcatcactgtctttgggcctcaatttcttcatctcaaaaacaggtattgattcacacaggatgcttatgaggactaaatgaaaggataaaagcaaaagtactttgaaaactgtcagctactctacaaagcattattttaaataaaacttcaagccagcattaagaaaaaaaatggaattaaaaaagactaaccaatgaaaagaaatagaaattagaactaattcattataatgtctggttcaactagatgttaataagaaaccttttgtttaaagctgttgctgaaaatctttctaatcagtacactgtctaaacagtgtgtctaaa

SEQ ID NO: 198066 - DNA, 424 bp, Homo sapiens
taacctcacaagggtattgacaagatcaatgcatcagaaatatatcagaaagtgttttgtaaactaaataccatataaatatgtgggatgtccttacgtttgcagtttcaacattcaagaagaccattcatttcctgttagcatcccttgtactttgaggatgtggccacaaggtcctttggcctttgtcagtatcatcaaaaatgccagcttttagacacagatgtgatttatttgaaagaattatattagctcacttttatcttttaaaaaattaagacaatattttattaaaataactaaacaggcccagcccagtgaggcacgcctgtaattccagcactttgggagaccaaggtggaaggattgcctgagttcaggagttcgagaccagcctggccaatgtagtgaaactccatctcta

SEQ ID NO: 198067 - DNA, 484 bp, Homo sapiens
atcccccccatacacttccttacaaacaaatacagtaggtattgtcaaatttacttatagaaatattacatttttaacacttctgccataatataaaagagtaactaagccatattcattattgaatattatcagcatcttctacgttttgaccattcgaaaatggtatctcattttaaatatagttattttcctaatgaagaaaaataaaatattttgcattttttctggtcattttgtatttcattcatattcattctatgaattcactgtttctatcttttcttcatgtttataggttttttatttaatattctctgtttgcttttatgttgaaaatacattcttctagtttgttgtgtctttaaatttattcatttgcatgtatgcctgagtgtgagagctctgagaatcataaaagcaaaatggaattagatgtgcaagaaatacattaggaaacaaccatggaataacatggggagca

SEQ ID NO: 198068 - DNA, 439 bp, Homo sapiens
aagtattttctccctttctgcacttcatatacactttcccttagccttgaagttaatgtctgctatgcttttccaaccttggctttagttttcaacttagatgtcagttcctgtgaaagatcttttctgtttttccaatatcaattagatctacctgacataatttcatggcattctgtacttctataacactgtttcttattttacttgcataaaatagatacaaacacatataaagttgtttaaaatctatgaagcagactacaacctccaagaggccatattatattcttaaaattcaggttgcttacataaagtaaacaaaggagcaaaacttgtgctagatttgagagccaatctaacccttttcggaatacatccgagttctgttatagtctgatatcataggtaaaatcaagtgactattgcagaaatgtca

SEQ ID NO: 198069 - DNA, 290 bp, Homo sapiens
cctcccatgcagagccctttagggaagggcaaacttcacagaaacagtggccaaatctcacatctgcagaggtattgtcttttcctggacattccctttgctgccccctggggctttctcttgtcagttatctcttctgtcccttgcatttttctcctttttcattgactcattcctctctattcacaagttttctctttctcaagtccctctacctctaactaaccttactttccatctctgtgcccaaaacttgctcatctgcaaacactctgcactaaacgcctctg

SEQ ID NO: 198070 - DNA, 414 bp, Homo sapiens
gccgaggcgggtggatcacctgagaccaggagttcgagaccagcctggccagcatggtgaaactctgtctctactaaaagtacaaaattagccgggtgtggtggcgcgcacctgtaatcccagctactcgggaggccgaggcaggagaatcacttgaacctgggtggcaaaggttgcagtgagcagagatcatgccactgcactccagcctgggcaacagagcaaaagtctgtctcaaagaaaaaaaaattcaattaatgataaacaaccaattagtatcttctgagagatacaaaatattttgtttataaaacaataaacttaaaatatggaaatttaaaatgtgattgggaaaataaacattgaattgaaggattagaaaataatgttgaagaaaaacctaccagaacaaca

SEQ ID NO: 198071 - DNA, 199 bp, Homo sapiens
tgcacacgccgaatacccagaccacacgccgaaaacccagcccatcaacgaatacaggcaattcatttgagtccagcaactggtggggtcctattacctttcatgttaccaaacttggaaaaagagagacagagaaatataacagaagtcagaaatataaagaacagggtggatattgtgtggatactcggcgtgtgca

SEQ ID NO: 198072 - DNA, 418 bp, Homo sapiens
  misc_feature (6)..(6): n is a, c, g, or t
tgcgtnctagaggatcccttcatgtccagtgctttcatgcctagaaaaagaatcccaggattttccctcctgtgtgttttcgtcttgcttcttcatggtccatgatgccagctgaggttgtcagtacaatgaaaccaaactggcgggatgaaagccctcgatatgaattcatatcgagagctttcatgccacactgccaagtatacacaacttcccagtaaatggttgtggggaggaaagaggtggagcctccccagccgtttccctgcagaatcagctctgtctcatgtggaagtggagaatcagccttgcctggcctttaggaacttttgtggggaagagagctttgaagagaggagggggactttaaagagggatgaaaatgagccctgggagggatgaaagcgctcgacatgaa

SEQ ID NO: 198073 - DNA, 270 bp, Homo sapiens
  misc_feature (242)..(242): n is a, c, g, or t
  misc_feature (245)..(245): n is a, c, g, or t
  misc_feature (251)..(251): n is a, c, g, or t
ttttatttgtaaatatatgtattacatgcctagaaaaagaatcccaggattttccctcctgtgtgttttcgtcttgcttcttcatggtccatgatgccagctgaggttgtcagtacaatgaaaccaaactggcgggatgaaagcctcgacatgaatcatgtcgagacctttcatgcccataggcacattctccatccttaacactggtctatctgctcttcccatcctcctgtgggatgaangcnctgganatgaagggtaccgagctcg

SEQ ID NO: 198074 - DNA, 357 bp, Homo sapiens
  misc_feature (6)..(6): n is a, c, g, or t
  misc_feature (329)..(329): n is a, c, g, or t
  misc_feature (332)..(332): n is a, c, g, or t
  misc_feature (338)..(338): n is a, c, g, or t
tgcgtnctagaggatcccttcatgtccagtgctttcatgcctagaaaaagaatcccaggattttccctcctgtgtgttttcgtcttgcttcttcatggtccatgatgccagctgaggttgtcagtacaatgaaaccaaactggcgggatgaaagctctcgatatgaactctttatttccataatagaaaatcttttatttccacctttagtgttccctgctagaatagatgaccacaaaacccaggccagaaacgttctggtctgccgtgaacagtccaggaggcacttgttctgctgctgtggaagtcgccctgactcggggatgaangcnctgganatgaagggtaccgagctcg

SEQ ID NO: 198075 - DNA, 459 bp, Homo sapiens
tttgaaaatacacagtcagaggagacaaaagagaaaagaataaaaaacaatgaagcatacctatagggtctaggaaatagcttcaaaaggtcaaatctaagagttactggacttaaagaggagagagaaacacagatagggatagaaagttattacccctttgaataaaaaggatgttaatgagtgataattattacagagaacttcccaaatgtagagaaagatatcaatattcaagtacaagaagattatagaacatctagcacatttgattcaaagaagactacctcaaggcatttaataattaaactctgaaaggtcaaagataaagaaaggatcctaaaaggataaaagaaacaaataacatacaatggaactcttatatgtccggcagcagacttttcagtggaaacctcacaggtcatgagagagtggcatgacatatttaaagtgctgaaa

SEQ ID NO: 198076 - DNA, 405 bp, Homo sapiens
gctatttaagggcctgtttttaccccttaatccatgtcgattgcttacaagctggtgtgctaggcacggaatgggatccaacaggtaaaaataggatggatccctacctcaagtagcttttagtatttgctgtattcagttggttgcagaatacaaactagagactattgaaggtagttgctctgtcatttaccacactttagtgagcttcgtgaaggtagagatcttgattttttccttattttattccagcacccagaagtatcaactagcacataagtgcttaataaataattgtataaatgactaagggatgactgcctttctcttaaatacagtctctgttaatgtactctacaaagttttggtttttaataaaacaactgtataatatggctaattcat

SEQ ID NO: 198077 - DNA, 155 bp, Homo sapiens
taaaataataataataataataataataataataaaattaaattaaaattaaaatggtggcaggaagcagaactttcagcacctttctttttccttgaaaaatttagatctgggagtttacatcaggacacaagaagtctccttattcttttttg

SEQ ID NO: 198078 - DNA, 356 bp, Homo sapiens
ttttacccagtgtgaactctctgaaagcaggggccatatcctggccatctttatatccctcccacctaacatggtatgagatccctcatagatatatagtagaaatgatgtatgcaagagacaggacaagttggtagactatattattattattattattgtaaaatacataacaacatttactattgtaagctttttaaagtatacaattcagtggcattaaatacattcaagatgttgtacaaccatcaccaacatccatttccagaactttttcattgtcccaaacagaaactctgtacccattaaacagtaactcccctgccctctccctgaaataaagaacagcttgacag

SEQ ID NO: 198079 - DNA, 294 bp, Homo sapiens
aaattgcatggtgtatatgaagaataaattagcattaattttcttccattaactgttaataaaacatgctgatgagctccctcttcttctatggacatctctgtttcctgcctaaccaagagaaatgtaaggatttcctaatttttttccccactatgcaattgtctttcagccatatatgctcttcacctcccacaatcaagctctaggtcatgggcagccttcattcagtgaaatgtacgagacaagacttctttcagagcccatcaacactccctcccacacacacacaca

SEQ ID NO: 198080 - DNA, 467 bp, Homo sapiens
tcaattatgtaattattttataggatgtgtgaactttgtacttacgtgtgcttttgtggtagcaagtatcatctttctgtttccttttagcatttttggtgtactggtctagtggtgacaaatttccttagcatttgtttgtttgggaaatactttatttctgcttcatttatgaagcttagtttaaaaagatacacgctttgggaggccgaggcaggcagatcataaggtcaggagatcgagaccatcctggctaacatggtgaaaccccgtctctactaaaaaaataaataaataaaatacaaaaaattagcggacatggtggtgggtgcctgtggtcccagctactcgggaggctggggcaggagaatggcgtgaacctgggaggcggagcttgcagtgagctgagattgcaccactgcgcttcagtctaggcgacagagcgagactccgtctcagaaaaaaaa

SEQ ID NO: 198081 - DNA, 257 bp, Homo sapiens
gcacttcctgcgtgatggccaggacactctggcattttacaaggatcaattcatggaatcctcacctatgacagtggttcccaaacttgactacgcttgggaagctttcaaaaatttcaacacataggtcataccccaaaccaatcataacatttgaaggtaagagtaggcaccaatgtatttaaaggcaccctggtaattcaaacatgcagcaaaggttttgaaaccctgagagatgggaactgctacggtctgaa

SEQ ID NO: 198082 - DNA, 290 bp, Homo sapiens
accccaaatccagggactccagggaggggtagtctggattcacagccagagaacctttattagaggtgatcaaatgagcacaagtgtttgaggaataggtaatgactggttgaatctccctgtctatccaacaccacgtgtatctgttgagaccctggctctggtgtggcagggttagggtgaccccagctttaccaagcagaggactccacaacctttaggttcctctgtgaggggtgagatgggttacgacacccactcctctgacccaggtcctctccagcaaaaca

SEQ ID NO: 198083 - DNA, 400 bp, Homo sapiens
tatcatctcattttgttcttgaacttcattaagaacaaaacagggtgggtggggcaggaaattcctaggcgatacttctgcactgaatgggatcatactgactacataacacgttatacttagggggagacaggagcatcatctgggttctgcgaaagccgggtggtctggggcagcttgctttgttctcctgctcctctagcgcctttgccgtctttccccagcatgtggctgtgggaaagacactgaagatgaacctgcaacaagcgattctgacaccagcgctaggctctacagcccacgggggacttgctagcctcagtcacaggtgggagagctggggcagatctgcacacaagggctctcagtgatgacacctgtagccaacacctggggcttg

SEQ ID NO: 198084 - DNA, 473 bp, Homo sapiens
ctatatcctgctctatgtaatcttttggaacttaactttttttcacttaatattacagttgtccttcagcatctgtggcagattcgtttcaggacctctgaagatacaaaatccgaggatgctcaagtcccttatataaaataggttgtatctgcatataacctatgcacattctcctgtatactttaaatcatctcgtggctcatgcctgtaatcccagcactttgtgaggccgaggcaggtggatcacctgaggttgggagcttgagaccagcctgaccaacatggagaaaccctgtctctactaaaaagacagaattagctgggtgtggtggcaggtgcctgtaatcccagctacctgggagtctgaggcaggagaatcacttgaacccgggagatggaggttgtggtgagctgagatcacgccattgcactccagcctgggcaacaagagccaaactccatctcaaaaa

SEQ ID NO: 198085 - DNA, 512 bp, Homo sapiens
aattagctcttttttccctatccagtttcccaggggctcaaatacatttctaagagcaaggatttcggcagtccacccccaacgagtctgtacataaaaataaagcagcactttggaggcccagtgtataagcacaattcccaccggctgtttgatatttcttttcctactagaaaaaacccaaagtacaagaaattattctgttaaggctccacacattttaaaaatgaaagaaaagaaaattaatttaatttgctacaaaaatgtagcagaaagagaaatgttgtcattacaatctgctgaaatatctctaaattataggcaaatatatttatcagactatgcatatgctatgtccaccacagaagtaaatatgcaaatgcaataaaatatctatatttctatagtgtaaaccaaccttgtccaacccacggcctatgggctgcatgcggcccaggacagctttgaatgcggcccaacataaattcgtaaattttcttaaaacactatga

SEQ ID NO: 198086 - DNA, 303 bp, Homo sapiens
tgactttgtggaatgtcagttcagccaaaattcaaaaccaatatatacttctttcctctcatgtactaagcacaataaattttactcaataagttgtaatctcatagattgttatattaaaaaccaagcgaaattttaagataaaacatgattgcagataaatttgacatttttcattgagaagctgcaggctacactctcaagactctctcaaagccatcaagcactgatgtatacttcctcctctaggaggcgtactttgggaaatcataaactcaaattccaccactgggacctcagttc

SEQ ID NO: 198087 - DNA, 429 bp, Homo sapiens
aatttctgtagctccagaatattctccccagtcccctgagacgaagttacagagctgtgaatccggtagtgaaagccttggtataaggcgcataagaaatgtgcagattatctaccatgaaatagaggaagaaatcaaggttattcaagtagaggaatgacacgttttagaaagacttttgttataacgttatgggaaatggattataggctggaggcaagagataagacattgtcagtgtgacagaatattttattaataaagcacataatttatactcagatctatgtgagatgagaccaattcatgtcaacatgtccaatgtttttgaaaaaatgctaagtttttattatcgcttttgtttatttccctgtgaaatatagtaggctagccctctatttctcctggcgaaatcttagataggtggaa

SEQ ID NO: 198088 - DNA, 423 bp, Homo sapiens
cctagaggacccaatgtatgatatgagttggagcgcaatggtgcagtctcggcctcagcctcccgagtagctgggattacaggcatgagccaccacgtctggctaattttgtatttttagtagagacggggtttctccatgttggtcatgctggtctcaaaaaaattatagaatgaatgaatgaatgaaaagagaacctaccagtttgtaaggttcatttttggcatgctgaatgcaaataaataagtttactaagtgagaaatcgtaagagaagctggaggtggcaggaggagcctgggatggagcataggtctgatcctagtgcagggaagaggctgctaaggttgacacgtctcaaagcactagaattacaggcctgagccaccacgccctgccttatctccaactcatatcaatacatt

SEQ ID NO: 198089 - DNA, 507 bp, Homo sapiens
aaggctcagactcatgtcttattgtgagttggtatcaattcagacatactgtcacctgaaacctgaaatattagtatagttacatttaagatgtgggaagttgggagggagaaacaactaaataacacaaaatacagtgactacaatcctccaagttgaaaactgtatgaatattgtaacttttcatcacctttgacagctctaagttacatggttgtgatgctcacacatatctagttttttttctcctcttagaaacctgaaagattacactttgctgtcctcctcgcagttggggccatgtggtcctggccaataggttatgaggtgaagtcacatatatcactttcaggctgaagtatttaattgctggtgtaataatctcttgcactctcttctcttacttcggcaaatcttgctatctggagcagctggagtgatcctagatgactgaaacgtgtaatgtgttggtcaacactaaataaagtcaaagtacttaaaaatctt

SEQ ID NO: 198090 - DNA, 538 bp, Homo sapiens
cttacctggttaatttttatttctaaaatggctttaccatctgtctctgccaataacgttttatttacctgaacacttctaataggacactgcctttggaaaccatgctatcaaatctaaatgacttcctccatttactgtcttacttcctgttttcatttttattctccatatatacacttttacttgggtacgatctgtatgaatgaggcagtggcgacatttaaatatggcatgtgccaagaactattctaagaatttttcattaaaatgcattattttattgaaatacacatgaaatgcttattagataattgaggctatccttattgatggattggaaaactggggatgagtaaaccagagaatagcagaatccaaagcttgcacagttatgtaagctttcaattctgctatcagaatatgtgtattctgataaaactatattgtgtgtgtttgcttgtgtgtgtgtgtgtgtgtgttagttccaaggagatggtgtgtaggaagaaatgtgtgtgtgccagtgtggagagag

SEQ ID NO: 198091 - DNA, 439 bp, Homo sapiens
acgcgtgggcggacgcgtgggggaatttgtgtatttcaattatattgttaaatttattggtaagaagtggtacataatatttccataatatcattttaatatctgcagggtctctagtgatgtctcaaatttcattcctaatattggtaatttgtgtcttctccctttgttacttgatcaacctagctaatggtttattaactttattgattttttaaagtttgatttaattgatttttctctattgcttgtccattttctattttattgatgtctgctgttacctttactttccttctatgcattttgggtttaatctgcttatttatttagattcttagggaaatacttagtcattgattttaagctattcgtttttctttttatagcatttttatagcattcaaagtcataaatccctaaattttgtatgttgtta

SEQ ID NO: 198092 - DNA, 315 bp, Homo sapiens
aggtctcataatcatcttgtgtacactctctgcatttttataatatgctgcatctatctatccatgacagcatgttttccaggtgggcagaggcatcagtggtagcactaacagatcatatgaaaatcaaaattacctaagtcctaaataccaactaactgacaatgaaacattcaaagaaaaaagggagcacttaatttacccctgagtggtcttattaataaggattgcaggatgataagattctgtaaagtaaaataaaataaaaaaataaggctgggcatggtggctcacgcctgtaatcccagcactttg

SEQ ID NO: 198093 - DNA, 664 bp, Homo sapiens
cctcagagaaataaaataaactgctttttatggctgacagaatctaaattgggattttttaaattttaactagttactttttgacttgtttctaaggctttgctttttccctgacagattaaaattattacagtgtgagaacatgtgctttttacttatttaagactcaaatccatcaactatcttaaacaattatcttctctctgtctatataaaataaacacgatgatgagcaatgttcaaatgatattaatttttaaaggtatgtagtcacctggaaaatcagtcagttctgcattttactgtaaatcttcatttataaataggcacccgtcctctgtctcttgatggtttaacttaatgccattaaaagtagaagagatttctccagctctcaagttgcagaactggaatcaatgtatgttgttaaaatgaagaatagaggccgggcacagtcgctcacgcctgtaatcccagcactttgggaggccaaggcgggcagatcacgaggtcagaagatccagaccatcctggctaacacggtgaaaccccgtctctactaaaaatacaaaaaaatgagccaggcctcgtggcgggagtctgtagtcccagcccagtgcagtcccatcactgcactccagcctgggtgacagagcgagactct

SEQ ID NO: 198094 - DNA, 848 bp, Homo sapiens
ccagcccagcccagtccgagcgcggacccggcgcccgcagccccggcgccgccatggtggaggcggcgccccccgggcccgggccgctgcggaggacctttctagtgcccgagatcaagtcgctggaccagtacgatttctcgcgggccaaggcggcggccagcctggcgtgggtgctgcgggccgcgttcgggggcgcagagcacgtgcccccggagctgtgggagcccttctataccgaccagtacgcgcaggagcatgtgaagcccccggtgacacggctgctgctctcagccgagctctactgcagagcctggcgccaggcactgccacagcttgaaacaccccccaacccctctgcactgctggccctgctggcgcggaggggcacagtgcctgctttgcccgagcgcccggtgcgcgaggccgacctgaggcaccagcccattctcatgggagcccacctagctgtcattgatgccctcatggctgcctttgccttcgagtggacaaagaccctgccaggtcccttggccctgaccagcttggagcacaaagctgcttttctgggtggacacgaccgtccggcggctgcaggagaagaccgagcaggaagcggcccagcgagcctctccagcagccctgcagacggggcggccccggcgcagccctcgtgcctacgcgctggtactggaagctggttcctatccgataccgcaaggaccgtgtggtggcgcgacgtgccccctgcttcccgacggtgaccagcctccaggacctggccagtggggccgcgctggccgccaccatccactgctattgtccccagctgcttcgacttgagggtg

SEQ ID NO: 198095 - DNA, 268 bp, Homo sapiens
gaaggtgctgacaggcaaggggctcaggagttgggggtcagagaagagggatgggaactgaaggcactgggacttaggcaaacaaccaagactggccaaacctggtggtgccaggctcagaggccgaggctgtttttccctttacaagcggatgaagggagaaccagtctcgctcagagagtgacctgtcactgctgaattcactggccctcaagggaggggttggcatttctctgtcagcactcttcaaggggggaaggtgcatgcc

SEQ ID NO: 198096 - DNA, 384 bp, Homo sapiens
gatacaaagtgttcccaaactgtgattactaaaggagacattcgctcactgaaaattagctggggcacaggtgatgactggagtgagctgagtcatacatctcttcaagtagcatgcaaaaagggagacgattcagtgaggtcacaaacaagcaaacaacaaaaaaaataaatcaacagataaagtgaagaaggaagaggaagggcaacaatggaaagtcccctccaaagattcctagcaactgtaaatccacaggacattcattcatgacagggtcccctgaggactgaggaggtcagaataatactaacaatggctaccacttgtagaatgcttacttactccccagaacagtgcaagtacttctctgtttttcaatctatt

SEQ ID NO: 198097 - DNA, 1060 bp, Homo sapiens
cagacctactgaatcagaaactctgggggcgagggctgaaacctgctttcataagcccttcaggcgatactgatgtaaactaaagcttaaaaaccaccgttttactgtgacttcatgaagaatataattgcaatatcacctaaatttttatcctggctgggatggggcagattcttactatggacaatttctggaacttacagtatgaagagcagatgaggagtttgagacaaagaaaaaattgtacagggagtttagtgaattttccatcaggttggccattactttctttctctaaagtctcaggatgtctggaagcaaggaaagacaaaagacttgaagcaccgggtgcatgctgtgtgtcacaagtgaggtggagagttggctgtggaaggtacagcaattcctctggaattaaatgaccgaccaacacagtaccaagaggatgaagagaagatgttttgcgttgctacgtgaatcagtggatgactcatatttcacttgcatatgaaatataaggcagttaacatcttgtttgtggcttaagcaaggacattaatcctactagatgaaggggaagttggttctgttgtcttaagggatgcccccttgtgattttggtcaactgaatgaaaaagaaaagatagccttggacttttttttcatgggaggtttggaggtcaagcatgtagaaggaaaaggctgtagtcatgaatatagaactgtctgctctccaccttttcctcactctacatttagtcatcacactgaacaggatgtggcctgctgacagtgagtagctgaagtgcctgtttggtaagtaggttagcattcatcatgaactctgaaagccatttcagagtttggctgctgctctgaccctgctgtggtacaaaaaacatggatttttttttttttaactggagtaataccaaattccctttagaagcttgaagtttgatactattgctttccccattataaggattatacagtattaattaattataaggcccaaagtttgttttggcaaataaagtattattctctatcatcatct

SEQ ID NO: 198098 - DNA, 591 bp, Homo sapiens
tccttactgagtttttgtttgtacattgatcattgagagaagagttgaagtctccaagtataatggtaagtttgtttatttctccttttcagttttgcatcatgtgtattgaacctcctgttaggtgcatgtaaatttaggattgttaaaactttttggtgaatgaaccccttaatcattatataatgccctctttatctctgatagtattcctcattccaaagtctactttatctaatattaatacagcctctccagcctccttttagtgtttgtatattattttccatccatttaatctgtcttttatttaaaatgggtttgttctagacagccttttttaattcatcttgaaaaatctgtttttacattgaagtgtttagactatttacatttaatgtaattttgatgtagttggatttaaatatacaatcttaattgttttctacttatgtgctctctgatgcctatttttgagtgcattttatcttcaccatgggctcactacttacactcaacttttcctctcttttaaaaagttaatgggcttctctgtgatttatattttacatctttaataatagaccatat

SEQ ID NO: 198099 - DNA, 889 bp, Homo sapiens
gggttgaaatggtaggtagaggacagaagggcaaaagttttggttccagcaagaagtactcaagccagacgtgaagaaggactggctgacaaggattagagattccaggcgacccttacctctggactgggactgagtgcacctgtgagcccagccaggtcctgggcaccactgtggacagcagaggagataagaaggggtatggactctcaggatactccaggatacatgggggattgggtggaggtggacccccacaaaacaagcaaccaaagagagagcagaagcagtgccgagatatggggctcagcctcagaggactaggagcttgagggggcagtcagggcagactttttggaggagctggcctggagccacctgaagatgggaggatgtggtttactcactcattgtcagcagacaactttgggggctccctgtttgccaggccagtgcctactgtgagaagtgacatggaggaagtcatggacagggccagcccagcctggctgggggtatggggtatgtcactgacaacttgagcaagtcacttcctccctgtgggtgtttgtttcttcgtctgtaaacgtcagagctggatgaagttgaatgacagaccaaggagtgctcgaaggcactgggaaccatggaaaggctttgagtgggggtgggactgtagttggcacagtggagagacgctggagggacatgagagagaaggagaggcaggatgggggtgtgggggtgctgaagtctgattgggccattagggtggagaggagggaaacccctcagctcttggctgtgctgtcgcaacaggatgacactcccttctgccaggtccctgccttcctgaggatgaggactcagtgatgtgtcatagcagctg

SEQ ID NO: 198100 - DNA, 454 bp, Homo sapiens
gcgctggctgtcatttgccttggacaaaaaaagatggctaaaaatgggcctgtgtagaaatttccagtgggttttcagatctgtttcggggacagagcagggacccagatgagatgagggtatataattctttagggtttggggcgtttccttgtatttgtatttttttttttttcatgcttttaggactgttttccccatgtggcctgaggagttttcccctcctgggccatgcccacaggactagttctcagctctgtctggaagcggttgcttggcttgaggcaagttcccttctggcctcagttttctcatctgtaaaatgaagggtttagaggctgggcctggtgactcatgcctgtaaccccagcactttgggaggccgaggcaggtcgatcacgaggtcaagagattgagaccatcctggccaacctggtgaaaccccgcctttact

SEQ ID NO: 198101 - DNA, 738 bp, Homo sapiens
ggtctgtgtctagattcatttttctttttttaaagtttttctagcactatttgctcctttgtattgccttttttcctccgtcaaagattaggtgactatatttatgttggcatacttctggtctatttattttgttctattgatcaacttatctattttttcaccaataccacactatgttgatcactgtaactttacagtaagtgttgacactgggtagtgtcagccctcttactttgttcttccctttttttatttgaattgagtattatgggccttttgcctctccatataaactttaggatcagtttgccacaatgcatataataatttgctaagattttggttagaattgtgttgactttatagataaagttgaaaaaaactgacaccttcacaatattgagtcttcctatccatgaacatgaatgtctccccatttatttgattcttttttttgaaatcattcatcagagtattatactttttctcaaatagaccttgtgcatattttgtgagatttatacctaagtatttcattttggagggtcctaatgcaaatagtaatgtgtttgtttttaatttcaaattacatttgctgctatataggaaagtaactatcatttgtatattaactttgaatcctaaaaccttgttctaattgtttattggttccaagagggggttgtaggtatgtggccttatttctggattctctgttctgttccattggtctat

SEQ ID NO: 198102 - DNA, 128 bp, Homo sapiens
ttattttttaaatatggctataataaattttaaaattacatatatggcctgcattatatttttattggacagtactggtttagaacatgaaggtaggtctggatggagataaacattttgaaattatt

SEQ ID NO: 198103 - DNA, 601 bp, Homo sapiens
gcctaattaatcagtgactgtctttatttaagtcagcaagcaacaaaagaaatccaagaaatagtaactctaaagtggagaaacctagtggacatcaccttaaccaagtgatgaaaaactgaaaccactaatattggtgtaaagtgatctcgtgtactttctagtatcatgccctaaaaagacaccattctatggtattcctgtcaaaaatgctgaatctactcacaaggaaagattagacaaactcaaactgaaagacattctataaaattattggcctattctatttaaatattaaagacaagaaagaaagacaaggaaagggttgaggagactgagagagactaaagagatatgacagctaaatgccctgtatgtcctggactggatcctgcggggagggaaatagctataaaatacaacactgggggccaggcatggtggctcgcacccgtaatcccagcactctaggaggcccagacaggtggattacctgaggtcaggagtttgagaccagcctggacaacatggtgaaaccccgtctctaccaaaaatacaaaaactagctgggcgtagtggggggtacctgtaatcccagcta

SEQ ID NO: 198104 - DNA, 469 bp, Homo sapiens
aataacacatttcaaacttaaaggacaccaaaagcaaaaccaaaagcccaaaaccccactaatgttgggaagcaggaacatctttaattacctggttatataatcgcatccaagatagttaactcctaatggatctaggttttattatttataatacaagtataataagaagacctactggctttaaaatgaaaataagtggaattaaatgaaatattgtataacataatgactatagtagataacaatgtattgtattcttgaaaattgttgagagactaggttttaagtgttctcatcataaaaaataagtatatgaagtaacatatattttgagtagctcaatttagccactccacaatgtatacatatttcaaaacatgttgtacataataagtagatacaatttttgtttctcaagaataaataaaaatgttcaacaattttttaaaaaatggaatcaaggcag

SEQ ID NO: 198105 - DNA, 344 bp, Homo sapiens
agaagacaataataatcagaactatttcttgactgtgaaaagactgtaatgaaataaggaaataagatcccttaagaattctattggccaggcacagtggctgctcacacctacaatgccagcactttgggagacagagtccagcacattgcttgaatgcaggagtttgagaccagcctgagcaacagggcaaaactctgtttccaaaaaaaaaaaattagcctcagttattcaggaggctgaggtgggagggtcacctgggcctgggaggtcaagactgcagtgagctgagatcacgccactgcacctccagccagggtgacacggggaaatcctgtctcaaa

SEQ ID NO: 198106 - DNA, 410 bp, Homo sapiens
tggttccaagtctttgctattgtgaatagtgctgcagtaaacataacgtgtgcatgtgtctttatagcagcatgatttataatcctttgggtatatacccagtaatgggatcgctgggtcaaatggtatttctagttctagatccttgaggaatcaccacactgtcttccacaatggttgaactagtttacactcccactaacagcataaaagcgttcctatttctccacatcctttccagcatatgtaggtaagttcttaaatagcaattttattttgagatggagtctcgcttggctatgactggtccacttttactactggaaacagaaatcgttttctccttagaatatatgtctgtatttaccacaaaactagtttcagcacctggcacagaactaaaaaaatat

SEQ ID NO: 198107 - DNA, 414 bp, Homo sapiens
aatatttaactggctctctttgcagagaaaaatgccctgattggtagtgtttgccaatttttgtggtgtaaatactcccaccatgactgatttaaaagcagcacaaatattacagtgtatttccactactcagataccatgggcatgaatcatctcagcaatgtaaagtaataaggaagtggtatgctttgtgtatttattacttttatttttaatataatttgtttaactgtattcaatttaagttttaataatagcatgcataacgattggctcaataaaattgtgaaaatttaacaatgtggctccagcacaccacggtctctgcctctgcagcatttgatattttgcccatcctccactattgaatctgtctcttttcttggctccttgaaatcagtttctccctttttt

SEQ ID NO: 198108 - DNA, 478 bp, Homo sapiens
gctatatatcggttgatatggaataattgctaaataaatttatcatacttattgagaatgataaatattctgccacgttaaaacaaaccggacaataaatccctatgaaaatcataaattattctaattagttctcttaacacagacctatttgaaattatttgttttactttcctttgatggactttctacgttttgtataatgctggctgtactcactgtactttatgaactcacaaattcactcactaatattaatgattaaattaacagtgtaagcattcttaattgatctccatttattccaaaggtgctggaataaattgacattttcacatatccatcatcattattatttgagctaaataatgtgtgtacacttaacatcacctgattttgatccataagaccctttactattttgcaaggaaatctaagagacaaaaagctgaaatttgaagatgcagtagaaaatacg

SEQ ID NO: 198109 - DNA, 369 bp, Homo sapiens
taaataattaaaaacacaggatttgacaacaaattctaatcagattctttgacttccaagaaagcaaactcagtataataagaagtgagtgtactttgtaagcccaaatctcagaagaaaggcagtaataccttttattggaaaatgatctatcaacccgctttaacaagctggcagtcattttgcgagtacgcagttcctcggctgaaggacacatggcacagaaaggggaaatgagtttgcatttagtttagaaatgaatttatattaactaaagaatacaactatttttagctgaaacaatgagctactctgaccaggaagcaaagatctcatgggatccacctaactggaaagtgccaatgtttc

SEQ ID NO: 198110 - DNA, 311 bp, Homo sapiens
tactttaaataaaatggcataggtaagttaaaagtaaaaataaaagtaaaatgtagacctactcataactcccccgaactggaaataacacaaattctcacagatgcatggctaaaaactaccatacatccatgcaatagaatattacttagcaatttaaaaaattattggtacacacaacaaaatggattaatctctaaggcattatgctgggtaaaagaaatcagtttcaacagttacaaactatatgactccatttacatggcacttcggaaaaggtaaaactatagcaattaggaaagatcaatggt

SEQ ID NO: 198111 - DNA, 336 bp, Homo sapiens
tgaattaggggtgctcagtctgtagcaacatgcgggaagaggggcatggagcaagggcatgtgcaggggcaaagtaggtccaagccccttctccagcttgctgcctgcagagggcagcaagggcagaaagaagggttagctttgaaccaagttcaaagatgcagttactacctcggaccagacacttttaatgccaacctgactctgtatttgcaatttaaagtgacctaagaatttttatcacctaaccgggggcagaaaacttgtggggctgcccgagttttcatccaggaatggggggatgaacttccaccggagaaggaatcataaaaagta

SEQ ID NO: 198112 - DNA, 411 bp, Homo sapiens
ccgagtggttgctgagggcttctgaagcccaggccttatcgtggcagggtgcaagaatctttgttgatgaccaagtggaagtccactatgcaggacataggcgcctcagtaggggacagtgtggccagtggaacaaacatgatctgcagcccatccctgggattgagtctcccctctgccctttattcactgcagaactgagtggtcacattgtctcttcaaggctcagtttcctattgtgtaaagggaagtgatagtttctgccctgataattgaaaccataacctaggccgggtgtggtggctcacacctgtaatcccagcactttgggaggccaagacaggaggatcgcttgagctcaggagtttgagactagcctgggcaacatagtgagactcccccatctctaaa

SEQ ID NO: 198113 - DNA, 437 bp, Homo sapiens
aaattgtgctgatggtgtcaagggtaacaagattcctgaaataactcagagtacagtcttctgttaatgagtgtcatattgtagtataaatatttctttatatgtctgtcttcctcatttaactggaaactcttagggatagggacacatcttcagcatttctgggcccagcagttggcagagtgcctgtcatataataaagcatccaataaactgatattatattgagccaatatgtgaatcaagatatatcttagttgtttctgaatcagtttggtatatctgtatttttttacttattttcatatgaaaaggaaattattttatgttagaattttacattttagaatgctaccacattgtactgtattaatgtacatgctaattatttgtaatattaatcttgcttatgttcaaagtatctgagaaaattggtt

SEQ ID NO: 198114 - DNA, 670 bp, Homo sapiens
gctatgggagttgtaagccagaaaccgtaattaaaaccagtatgtatatcataacaccacaggtcaccccctagtttgtgaccacagatcttttatatcaaacaatatttgtatatgcagtcattaatcattagtccagtacatcatattgtatgaatgtctcccaggatgaggccattccggtttgcaagtttcctaaatcttgtcaagttccaaaagcaggattggccttggtaaacacacagcttcatactttcatgcatctggaataattgagcttgagatagtatcatcttttgttcttagactcttttgggctgttaacataacattgaattttcctcagttagtaaccctaactcatttattcacttctttactttcagctatggtttctccttctttccgtttatacccaaattttttcacctctgaaagggacattagaatcttcttgtgctgttccagattgcaggcagcaatacaagtctaggagtaggtcttcctcagtccactcccattcagatagggtaaagttatataggagcagaactagtgagctatttttaccatcaggcaatatagttgcattcactgttagtcccacttttgctaaatggggtgaaagcactactcaccccagtaatgttcttaggaattttgccattag

SEQ ID NO: 198115 - DNA, 1482 bp, Homo sapiens
gacgacagtagcggtggcctcagctccaccagtaactgccgctggcaggagcaccacacgctctaggagtttcccgggtatcaagtatgggtccagcccgtcccagttatcctcttcccctatggcttcattcccgttgtcagtaccccgacctcagcttgcaaccttgatcttgggcttgattataaatgacgaaagaccgcggcagccttcaaagtgcgggagcgagccccgtactggtcagcgcggcggagggatctttccaggaggccccaagcccccaagcctgtggagagacttggtaacagctggcaaggcctgctccagccaccctcgctggctccttgcccctgcattcagcgcctgagggcgttattcgccctctccctgcgtcccacgcaagcggctcaaggaactcactcgatccggattccgcctcgtatgctctccaagccttcgccacctccgcaggcgctctagaaaggcgtgatggccccagctcagtgcccgccagcccgaagaggacaagcagggctggaagggacttggttttggaaaaagccccaaccgcccccaccaactggaaggaaaaggaattagtatccaccgcatctgtttaactgctaatagatcccagattacgggcaggtagtaggttggtgtctttagatacaacagcctgataataacgctggtgacattaacaacagcttgtggaggggagagggttgttactggtgaaagttaagagattcaatctagggaagtaggagactgaactctgacaaggttaggggcactgagaaccccaatttagcatcgatgcatctaccaggcaagaaaatttgcgttttgacccagaactcagtcatgatgctccgtagaggaggtggattcgaccagcagacagatgtccccaaagtcgagagagagctaagctgcctattttctctccaggtgaaagacaaagcctagagcaccccacttaagatgaccacccccagctctttcaaaaaaaaaaaatcccccgaagagacagcgtggtgccagcgtagcagcagctcggccggttactggaaacttcacctggcaacgcagccccttttacctgacggctgcgtcttctccttgcaatgggctcatccgaatccgacagggtcagggaggtggaaagggaagacgctggcgcggcagcagcggggatcccggggcatggtattgttttaggggtcgccgccgaggtccctcctgcccatcgttgagaactgccaccctgatcccagggctcggtggacacggcggcgggagcggagatgccgcctcgccgctgctgggcaccagggacggaggaccagaggcgcacctcggaaaggagtagctcagcgccttggcgcggagatttgcgggcactgatgatatctcgagcgctcgttcctccgcggtgacaatggataatgccaaacgcgcaagtgacggcgacag

SEQ ID NO: 198116 - DNA, 399 bp, Homo sapiens
ttgcaattttcagtgtttccaactagaggcgattatttagaaaataatggtttcaatcactgtcagtcactgttttatttcatgccatctctacagtaacatccattatgcattttcaaaaagtaatattagattttatttcttaactaacttattttaaaaactgtaggcaattctcatcaaatgtgtcatattaatatgcaaaggaacagttgtccattgagtcaaaatgttagagtcaaaacaccctgttttaccaagacctgcttgtatacataataggaatctcaaactcaacataaacctatcttcccttctgtgttctatgtcttatggcatgacatggccttcctttcctcagttatctaaataagaatcatacatatattagttcattcc

SEQ ID NO: 198117 - DNA, 122 bp, Homo sapiens
gacggccaccatcagaagctaggaagggacaaagaaggattctgatcagactctcagagggacatggcccagctgatgcgttgatttccaacttccagcttccagaactgtgggagactaca

SEQ ID NO: 198118 - DNA, 411 bp, Homo sapiens
  misc_feature (320)..(320): n is a, c, g, or t
aaaacgcccggcacagagcaagtcctagagaactctgtcatccgtgaagatatgtgctttttttcttttctcttttttttttttggcgtgtacacttttcaactctggagtagatgatctgtgattgactctgtttctcccccttttttttggagatggagttcagctctgtcacccaggctggagtgctttggcatgatctcggattctgcaacttttgcctcctaggttcaagtgcttctgcctcagcctcccgagtagctgggactacaggcgcacgccaccacacccggctaatttttgtatttttagtagagacngggtttcaccatgttagccaggctggcctcaaactcccaacctcagatgatccacctgcctcggcctcccgaagtgctgggattacaggcg

SEQ ID NO: 198119 - DNA, 520 bp, Homo sapiens
tggcagagtggggtcccctgacctctttaagaggagcactgctttctgagggctcagaaggcaatctgaggctccagcatcttggccaggggctgtgaagagacaagtggagcacagggtggggtatgcagggagcaggaggtatcatgggcgggcccctcagggagggccgtggattattcaaaagtgccctggcctgctgtgcattctggaggatattcaccatcaaccctgccaggaaagaaggcctcacaaaacaccaggtctgaaggaaggatcaaggaatttctttgacagatgttaatcaagaaaacctgaacaccaagggaggctattgcttcctcctgaaactatttgactggcttggtctctttgtacttgggtgggactaaccatgagaaaaagctcatctgtgtgagtttcgtggctcaatgttatggggtacagacgtgagctactcctctaatgtccaggagctgtatcaatcccaagaaatgacttgcaatatcctgcatgtgtg

SEQ ID NO: 198120 - DNA, 546 bp, Homo sapiens
agctatctgagggtaacactgtacttgcctcctaaagatttatcccacctctgccccaccatgatcactaccacacccagacaccacctgagaagctataaaatttggatgagattggccccaccctcatctctgagagagttatagttggtctaccttaccaagaaagaagtggagaggggaatgatcaggatgaggaatcctggtagaagactctgctatatggcacctttgactcaaaaacattgatgacgtgaaaataagtcaactgctaaagttcacattttaatcctaggcaggctctcctcaacccatcaaaatgctggaccacttctttccacaatcagttaatctgcattcaagaatggaaaattaactttattattagcttaggaggaacataattaagaaagaaaaatgatgtagggaattataaggatttccaatgccaagtataaattatttttgaattagctattttaagtttttaatacctcagatccctcttcattcatatatataaattaaaggttaattgcatttaag

SEQ ID NO: 198121 - DNA, 234 bp, Homo sapiens
tgcgatgtggtcgtctgcacgtgggtgtctgcatgtgggtgtctgtgccctcaagtgtctcgtgtctgcacgtgggtgtctgcaccctcacgtgtctcgtgtccgcacaagcatgtgtaggtgtccctgctgggctctttggtgggcggccagtgatcctcgaggtcacgcatgtcttctgtgggtgcctgctccttgcaccccacagtgttgagatgggtttgcattggcccc

SEQ ID NO: 198122 - DNA, 130 bp, Homo sapiens
cagcttgcctctctgtcatccgcaggatcgggcagcctccaagtcctcatcattctaactctcataatgcctctggagtttgtccagatctcctcgtcaccactgccgctacgctaatcaaaaccaccat

SEQ ID NO: 198123 - DNA, 1488 bp, Homo sapiens
tcagtcaccagatcctatcagttctgactccttggttgctctatttttgtgtattcctactgctactgcattaatccagatcataattatttgagatactgcaactctttttctgcttctagtctttccacattcgttctccacactatcatcatagtcgtctttataaagttctgtttatttcacacctttgcttaaaacctttcattggctccccattgttctgccttatggtgtggaagattcttcatactcagaccttaccttttttgtccaacctcatctttctccactctccccacagcctatcagcaaactgtggaatagaagacaatatttactccctcaatctgtaagagcattatccatggaactttctgtggtggtagaaatgttttatatcatatatgcactattcaatatggtaatcagtagccatgtgtggctaccgaatacttgaaatgtggttagtgtgactgaggaattgaacttttaattttgtttaattttaatgaatttgaagttaaatagccacatgtggctagtggtaatgatttagacaacagagatctcgaacagtgcttctcaaccagaggcaatatttgccctccacgcccctaggggacatttgacaatatatggagacattttgggttttcacacttggtgagttctactggtatcagatgggaagaggccaagcgatgctgtttcagcatcctccaaaacaggatgtcccccgcccccataacagacttagcccaaaaggtcagagtgctgaggttaagaaactctattctagactgttccttctttgttcgtaacacgtacttatagtttaggattcgtcttagatatcaacccctctggaaagccttctatgatttctcaggtctgaattttatattttctgttccattatatccttaccttatttgtgtgatacaataacctttatggtagttataattggcatttttatttggtcttggcttcttgagtataggaacatatgcattggaatatacccagaggcacatgaacgtgatcaatatttgttgaatgtatgaacgaatataaactaatgaatcaatcattaaacatactgcggtttaaaatagaagtgttgccaccttaaatttataccttttagagatcatacacttataaaatatttggaaatatttttgggagttactcctggtttgccaataagtaaagataactcattcctttagaagggaagaacttttttttttttctgtttctgccattcttccctttgctcctgctctacttagtttagtatgccccttccttccatactcacctgttaaaagataaccaatccaccccactctcatccccagagtgctcgtggggaactaaaactttattgcataaatgcaggaaggatttgagcaggtgaagtgggacaaagagactagaaactaaaaaaaaaaaaaaaaaaaaaaaagaactgactag

SEQ ID NO: 198124 - DNA, 455 bp, Homo sapiens
  misc_feature (414)..(415): n is a, c, g, or t
  misc_feature (421)..(421): n is a, c, g, or t
  misc_feature (427)..(428): n is a, c, g, or t
caccctcactctgctctgtttgccctttttctatttctattttttaaaaaattcagtctgaacaaaaaacattgagcttataacatcagtacttcattactctatttctgtatttcagctggtagtttttgtttaatatgtagttataaaacttgtatagacctaactgcataaatatttaatgttttttgataggcagtatgttaaatatatattctcaggtgtacttctactatagatggtccccttgagaatagattttactgtgcatgaacatagttcctaaatctaaatccctactcttttttttaatttatttatttatatttatttatttatttattttttggagatggagtctctcactctgtcatccaagctggagtgcagtgagccaagatcatgcccctgcanntcagcntgggcnncagagctagtctctgtctcaaaaaaaa

SEQ ID NO: 198125 - DNA, 397 bp, Homo sapiens
aaaaatttatataataatttttaaactatgggattgtacattatgtgtttcttccttaccatgcccttaagatcctaataacaagaaagtatgtattattagcaacactcctaccctaaagagcatatgaaacatatacaaacaatctgtaaatattttacaggacaattattttctttttactcaaaccataacctgtagtattttgagagcctattttaggtagtgaatttagaatgtcttcctcctcctattctctggccgatatagatttggttctccaccatactgtgatacgtttgaaaaggggaactgtattttatctttctatccttatcatccagagcagagcattactagtaaatagaaaataatcaatattttagtgaataaataa

SEQ ID NO: 198126 - DNA, 239 bp, Homo sapiens
agttatgttcagcataactagcaaatccaaaggccagctccacatggagaaatacagtatattcttgttggctgctgaatgcactgatttgtaacttacagtctagagttgcagttagacatgatggtatggtctcactttaggagcgaaaagaaggaagcagtgcttcccgccttccccataactcacatgtacatttcccatatgtgtatataaagaatctattttggaaagcatca

SEQ ID NO: 198127 - DNA, 957 bp, Homo sapiens
tgctgtggatgacctctgatgtgcctgccctatgtggacctatactccctgtgtgatgacgcctgatgtgcctgctcctagatgaccctaccctgtgtgatgacccgaggccgcccagggccctccccgggagacccgaggccgcccagggcccttcccggggagacccgaggccgtccagggccctcccgggagacccgaggccgtccagggccctcccgggagacccgaggccgtccagaatcttggattccaaagatccgctaacctctgttttaggggaaatcagtttctgcctgcgtgtgtgttcagctaggggttcaaggcccggcgacgatggctcagcctgcttggggaggggccatttgttcttcccacgcagagacttgccctcccactcaccgataagttgagtgcaagcatgtcgtctccgtacatgaaagtaagcctgaagactcaggtctcgtctctcattttctgaagatttttgacatagaactgattttttcccacattgagaactagctccaagatggccatggtcgcctctgctgggctttgtgggggcagagaagggactaggatgtagctaagtacaactagcaagtcctgtggagcctcacgtccaggttctgctaccccttttcctaagactctatgaagcgggccaggcgcagtgactcacgcctgtaatctcagcattttgggaggctgaggaggcaggcagatcacttgaggccaggagtttgagaccagcctggccaacatggcgaaaccctgtctctactaaaaacataaaaattagccaggcatggtggcacatgcctgtggttccagctacttgggaggctgagatgggaggttcacttgaacccaggaggtggaggctgtggtgggccaacatcctgccactgcactccagcctgggcaacagagccaaactctgactccaaaaaa

SEQ ID NO: 198128 - DNA, 921 bp, Homo sapiens
  misc_feature (25)..(25): n is a, c, g, or t
  misc_feature (28)..(28): n is a, c, g, or t
cgggagacccgaggccgcccagggnctncccgggagacccgaggccgcccagagccctcccgggagacccgaggccgcccagggccctccccgggagacccgaggccgcccagggcccttcccggggagacccgaggccgtccagggccctcccgggagacccgaggccgtccagggccctcccgggagacccgaggccgtccagaatcttggattccaaagatccgctaacctctgttttaggggaaatcagtttctgcctgcgtgtgtgttcagctaggggttcaaggcccggcgacgatggctcagcctgcttggggaggggccatttgttcttcccacgcagagacttgccctcccactcaccgataagttgagtgcaagcatgtcgtctccgtacatgaaagtaagcctgaagactcaggtctcgtctctcattttctgaagatttttgacatagaactgattttttcccacattgagaactagctccaagatggccatggtcgcctctgctgggctttgtgggggcagagaagggactaggatgtagctaagtacaactagcaagtcctgtggagcctcacgtccaggttctgctaccccttttcctaagactctatgaagcgggccaggcgcagtgactcacgcctgtaatctcagcattttgggaggctgaggaggcaggcagatcacttgaggccaggagtttgagaccagcctggccaacatggcgaaaccctgtctctactaaaaacataaaaattagccaggcatggtggcacatgcctgtggttccagctacttgggaggctgagatgggaggttcacttgaacccaggaggtggaggctgtggtgggccaacatcctgccactgcactccagcctgggcaacagagccaaactctgactccaaaaaa

SEQ ID NO: 198129 - DNA, 368 bp, Homo sapiens
ggaaagaaataacgtgcttgctgtgaatacgttcactttaaacattatgtctgttagtaaaacactaaaatcagcccaaatatccaaccactggatcaagatttaatgaattatgatatactaatacaagataataacatacattaaaaatgacgaatagaacaccttgtagaaacactaaacatttttgcaggtgtaatgtcacataaaaaaatctaaatgtaagaggtagtagctaaggggtatggatttctctatagggtaatgaaaggttctaaaagtgactgtggtgatcgatgcacagctctgtgaatattctaaaacctactgaattgcagatttcaataaataagtgaatggcatttgaa

SEQ ID NO: 198130 - DNA, 484 bp, Homo sapiens
atgcttgtatcagctttaaccagctgccctgtgttccatgtttctgggttggaatgagaaagctattagaacactggaagactgcaagccacatacaaatcatctttgttactgacacttgggggagtactttatagtggctgtcaagaccaatacaaaacatggtttgtgcctgaaaaagtcaagtgccattattcaaaaagaagatgttagtaatccaaataactgaacaacatccaggatcttcattgagtttagctgctatagacgcagatttattattgagtctgacttaagtaaattagcatgtaggtttgcattctagatttgatggaataacaaaggttaattacttgcaatgatctatgctggaataggagtaaaaggggagagctatatttagatttaatttcaccattcttaagggaatactatgtgaggggacgggattattatagggggcaaaggaaggagtgctaaggaa

SEQ ID NO: 198131 - DNA, 545 bp, Homo sapiens
gtggaatactatttagcacaaaaggggacaaattacagatggtaagtttttttttttaaatcagaaaaatataccaaatgagaagaacaagacacaaaagatcacatattgcatgattccattaatattaaatgtccagggaaaaggcaaatctacagagacagtcaactattggttctctaggactagtggtaggaagagggattaactacatacagattagaaggatctttactgggatggtagaaatgctccgaaatggatttacagagatggttgcataacacattaaatttgcaaatagtattcgattgtatacataaaatgtacgaatttcacagtatgtaaattataccttggataaagttaattttaaaaagtaaaatctctttcatcaagactgaactacatacagttttctccttttcattaaaatggtgaatttttccaaaggactagaatactagtagcacatcactcttccaatacagattattagaccctatttatacctcgactttcctagttctggagcctcagagaaa

SEQ ID NO: 198132 - DNA, 300 bp, Homo sapiens
gaggggaggagaaaggaacagcactgagaggggccaggagcccaggaaggggagggaagggcagccgcgggccaggggtgagcctgcgggccacgcgcgacccccggagccttcgcagccctctcagtgtccccactcccagcccaggcgagtccacaggacccgggcccctgctcctccctcgccttctctttgctccttcttttgctttgtggcctttctttcccttcccagagacacctgggagctgcccccaagctttggggcgccccgcggggccctgccaagggtgcgtgtgag

SEQ ID NO: 198133 - DNA, 206 bp, Homo sapiens
ggatggttcttcatccagtattctcattatcattcatcagaagctcattgactcaagtatttgatgaattgtagctgactgtagctttggcacgtagattcttacagacagtttaatctcttctaagtgaattctgagtcccaaataacatgttgaaaccctcagtggtctcactttccaataaacatggctttgaaaaccagcac

SEQ ID NO: 198134 - DNA, 116 bp, Homo sapiens
ggtcagtgtgcatatggggaactgatctgaacccaggtattctaggcccagggtcagagagtcagatcttaatccctcaggctaaacagtctctcaatttactcgttctccttcct

SEQ ID NO: 198135 - DNA, 415 bp, Homo sapiens
ggatttagggaagaggttcttagacatgacagcgaaagcaccatccataaaagaaaaaggataaattggacttcatcaaattaaatttcatcaaaaagataaattttgacttcatcagaattaaaaactattattctgtgaaggatacttttataagaatgaaaagacgagagacagacttggagaaaatatttacaaatacaaagggcttgtctttggaatatataaagaactctcaaaacttaactataagaaagtaacccagttttttcaactgggcaaaagacagacacttcaccaaagaggatatacagatggcaaataagcacgagagaagatgcatgacatcattaatcattagagaaatgtaggttaaaattaggatatcatatgcacttactagagtgactaagat

SEQ ID NO: 198136 - DNA, 670 bp, Homo sapiens
tgaagcacctacttcctgtgtgtgttgctttcacagcattagccaactgttttacttcatgatatttaatacacacatccacacccatacatgcttacatacagctcccagttcccaacctcccaactcctgtatttgggatcccattttctagataagagatttgtggctttaagaggttcagtaatattttcaaagtcacacagaaggagggaaagcagggatgtaaaaccaaatttccctaattttaaagcccttgttctttcaaccatgccacaccacctgctacacaaagcccctggcagacccatatgttaccttccaaatcccttctgctgatgttagcaaccactaagggtcaaaggttgtattttcaaaatgtgactcatgagccattagtaagttctgaaatcaattgctgggccttgaccagcatttttaaaaaacaaaatagcgcagggtagattgagtagaatagatcagaaagagtaagaattgtttcatgaaccttggtttcaggtatgcatgtgtggagtgttctaggtcttaatgtaaaatgtatttcttattatgggtttatatttaaaaagtttgaaagtcattgggttcagtggatgctctcacatagacctagctcatgaattgagaattactgaacactcagctctct

SEQ ID NO: 198137 - DNA, 188 bp, Homo sapiens
ctattttaggtgttttagattaatcagtgaacacaacaaagatatctctgacctggaatagctttgactcaagcagggaggaggataaatgcaataaattgtaaattagatagttttgttacaaagtgatgcttaaaaacgaggaaaagtagagatgaatgatattgggagtgtttgatgatgggagg

SEQ ID NO: 198138 - DNA, 227 bp, Homo sapiens
tcaatcaagtaatccttttatcttgttttataggtaagaataaggaagtctaaatgtaagaggtcaggccaatgtcacaaatgatttagcaatcacaagcaaacttgagagatgattgaataatgttatgtgaacttcttgcaaccacggggaaatcaattacccaagccttagatgttcccttgccaaggcagggtggacagtgtttagggccatgtttattcacc

SEQ ID NO: 198139 - DNA, 669 bp, Homo sapiens
agtaactgggactacaggcacacgccaccatgtgcagctaatgttttaattttttatttttttttagagacagggtctcaccatgttgtccaggctggtcccgaactcctggtctcaagcaatcctcctgccttggacagccaacatgctgagattacaggcatgagccaggcccccagccctgagcatatatttgtacattcctttcctcatttgatcttcacatcaatcatctgaagcagagaacgtaattatccccattagacagctgcagggacgaaggcactgggaaggcaggtgctgcccagatcagagagcatcgctagcagagtcaggacttgaatcaagcatgtctgattctaaaacctacttgcctacccaccatgtgatgcccaggtcaattccacccaacaagagggcaggcactacatctgccttattcttcgccatattcccagtgcctggcaccaggtgaattgcccttggaaaaggatgagagaaatcagtggttctggaagtgtagccccaggaccagcagcagcagcagcacttgggaacttcttagaaatgctgattcttggttcccattgcagatctactgaatcataccaatgcacgctagagtgtgagaaccactgggacaaatgggcgaacgtccccaagcctgat

SEQ ID NO: 198140 - DNA, 386 bp, Homo sapiens
tgaaaaaaaaatgcagattctcattttctaggtctggaatggagtctgcatttccaactagctcctgggcatgctgatggtgctggtccaggagctacaccaagtaatggcacaagagtgtctaatgtgatcttcttattcagtgttgttatatctatctatgtaaagtgatttcgaagggaaataaaaatggtttatttcaaattcattatttttctattttatttaataaacttcgagatgaaaaaaccaccatccagaaaaatagaatgaaagtttctttccaacggctgtattagtccgttctcatgctgctaaataaagacatacccaagactcggtaatttataaaggaaagaggtttaattgaatcacagttcctcatg

SEQ ID NO: 198141 - DNA, 514 bp, Homo sapiens
acgtgatctggtgcaaaaagattgggaactgctcatatgcatgactttcctgaatctggaatgcacactgtgttcaagaactggaagggactggtagaaagtatgagattaatctgatgaggagacaagagtcagatcaagtagaatattgtaagccatgttgaggactttaaagtttatcttaaagtaaacggaaagcttatttaaaaattttaagcaggagttaggcaatctgacctgacttgtgtcttagaaagattactttggctgccgtatggcatataaagagagaccgagggaagtagaagtccaattagaaaggctgtagcgtttattcaagcggaagataaaatgtggtgtgttttgaacggtggcagtggaaaaagaagtgaggagggagattcaaaatatattttggcagttatggtgatggattagatttgaagagaggttgaaggaagaattcagcaaaagcagttggctggctggatgcattactattaggatgaggatc

SEQ ID NO: 198142 - DNA, 180 bp, Homo sapiens
gaaaggatcctgtagctagtaagtaatagagacaggatttgaatttaggtggtctcatactaaagcctgagctcctaagagtttgttatattgccacagtgagtaattattaagtatatatcatctccaaagcaagaatcaagaggctattttgtgtaaccactgtgctatgtgccgtca

SEQ ID NO: 198143 - DNA, 510 bp, Homo sapiens
cgtgtaacatctcaacacaaaggtcaggaagcagtggccatgcgccagagaagaaaagcagctgtgttacatgactgtttccagcactttttcccttggcataatgcatttagaaggtcctgaaatgttattttctttttacatctatggctgcttttgtgctgcagtggcagagttgagtagttgcaacagagaccatgtggtccacaaagcctaagatgtggccaggcacaggggctcacacctgtaatcccagcacgttgggaggccaaggtgggcagatcacttcaccccagaaattcaagaccagcctgggcaacatggtgaaactctgtcactacaaaaaatacaaaaattagctgagcacaaggacatgtgcctgtagtcccagctgctcaggaggccaagatgggaggattgcttgggcccaggaggtcaaggctgcagtgagccaagatcatgccactgcaccctagcctgacagaatgagaccctgtctcaaaaaaaaaa

SEQ ID NO: 198144 - DNA, 359 bp, Homo sapiens
cactgagcaggtcatgcacactgctggggagcgggggtgggagaggaagatcagcaggcttgacccacaactaccaccactggggcccaaagactgccccacctggcatccccatccccagcaaagcctcgccacagcctccccaaacaaccacagccaatccactgaggaactcacagataccactgacactgattatagctgaagaaatatggaaactaaactactgcccccacccaaaataaaagccaaagcatcctacccaaccaatacaatagatacatctatcaggaaaagtcttttcctatgaaagccaatccataaaattgaaagaagagacagttacaccagatgcacaa

SEQ ID NO: 198145 - DNA, 348 bp, Homo sapiens
agctgtggaaaaaaaaataatacaatgttttaaaaaaaacactcaattctgaatgataaacaccaagttcaagtcagtggttatttctgggggggtcctcacagaaatggacaattggaataacacagtgaacttcagcggtgtttttcgtgtctcatttcttaaactggaggtacatttacaatgtttattatattttctctatacttctttgtctgcctgaactagtttgtttcccagtagttattggaagaggaacagaaatctaacttttttgagacagggtctcactgtgtcatccaggctagagtgcagtggtatgatctagggtcactgcagtctcaactt

SEQ ID NO: 198146 - DNA, 641 bp, Homo sapiens
gacaaagtgagaccctgtctctaaaagaaaaaaaaaattggcctgtgagcatgggtttgattttcaaacaggacctggagggtagggacagacagtgctgtcacccttaggtgctgaacactcagaaacgggccagcggcagcccttccctcacctgcagacaccagattgggcagaacagcacatggcacttgcagctcttgcagtgagggcagaacccagtgtcaacccttctgcctgtgggaggggctgctgaggcctgcggagaggccagggtggaggctcgtccccttgtccagcccttggcgtggtctccaccaggtccccagcccaccagtgcagggcgcccctgagcctgctgctgccacgggccctgtctctacccaggacgtccccacaccctcgcagtgtcagggaaatgatcatggtggcggtgacactccgcaggcagggctgctgagagaagctgagaagggtcacactgcaggcaggggcccgtgtgacaagcccctctcaccccgagagagctgaccaggcagctcacgagcagagccacatcccgggagtccgagaaaggtcctggctgggctcagccacctcattggccacgggcagcctttgtcgtgtgagccttgctctcc

SEQ ID NO: 198147 - DNA, 911 bp, Homo sapiens
ccagagtattcctcaaatctcttccagtccttttatattaagagcaagcggtggttctagaatcttccttaaaatctctctctggctgtttcctaacttttccatggttgtcttagctgattcgtttttcctgtggggaaaattgctgttggtcctgcgaccagagctcctttggtagcttctgggcctggggagtgggaaggagaaagtagctgctaattagccgtcaggtgacttcaggggaaagcaggagagaaggttgaaaatcagtgaatccacaaatcatttagctactgccttgaggccatcctgtgtagcaagtggcagaggcaggattttggtaccctgggcaagtcgccccctctgagggcctcggtttcctcatctacccgggtgaggagaataagcctgcttaaaacgatttctaagatacataaagaacagtagagaacagtgcatgtagcaggcggccttttgtgtgcaggtggggatagtgccaaccacgcttttgtttaaacgcacagcaagtctctgcaaagatgtgcaacagcagcctgtctccagggagcagggctgggaggctgtgggactcagggaagacaggccacactattcccttttgtaccttttgagctacaacaatgtgaacatactacctattcacaaaatgagttagtttgtttttttgagaccgagtttcactcttgttgcccaggctggagtgcagtggtgtgatctcggctcactgcaacctccgcctcccaggttcaagcaattctcctgcctcagcctcccgagtagctgggattacaggcatgcaccaccatacctggctaattttgtaatttttttttgtagagatggggtttctccatgttggtcaggctggtctcaaactcccgacctcaggt

SEQ ID NO: 198148 - DNA, 114 bp, Homo sapiens
atgttttagacttaccttcataatatggcatagtttttggaagattctcattagtatgaaatctatatcctcttttcatggtgggccaaatttgtaaaaatagccaaaaaataa

SEQ ID NO: 198149 - DNA, 434 bp, Homo sapiens
tacttcctgaattcctgtgctcctcgggtaagacttcctcgtggagatggagctaaagaaactaaaagacactcccacccttgttaggatagactttatttgcacataaggtcagacaaatttccataatgccacctgctatggactgaacatattcctgcaaaattcatgtgttgaaagctactccccaatgtaatggtattagatgaggtttgaggaggtggtttggtcatgaaggtggacccctcaagaatgggattagagcccttacaagtggctgaagcaaccagagtgttccttttccatgcgaggacatagcaagaaggtcccacccaggagccgtaagcaagccctcaccagacactcaatctgccttcaatgtggacttcaaggtctgtgggaactgtgagaaataaatttctgttgtatataag

SEQ ID NO: 198150 - DNA, 301 bp, Homo sapiens
ggactgcccaatgaatctagacagttccattatgagacaagttaattttcttcttctggaaggcatacaatggggacagcctattaagcccaaacctctctttctaacttcttcctggaaagaatttggagtcagagttcttatttaacatttcagatcctacagcgccaccaagtgaaataggattttttctccataaggagccctatctgccctttgtgcaaaaccattagttccccaattcctctccctcctgtgtgcctctgttagggactaagctccatgctccatctgttaacag

SEQ ID NO: 198151 - DNA, 236 bp, Homo sapiens
caatcctgtgcgtattcggggtggtggtggcggcagtggcagcggcagcggcggcggcggtagcagcagcggcagcggcagcagcagcagcaacagccataacaacggaggtatttaagggttctagtgagtcatttgtgcttcgaagtccagaccccagcaagccacataatagctgtttcttttctcttttctctctctttttttcactccctgatgactgctctcaagagcga

SEQ ID NO: 198152 - DNA, 308 bp, Homo sapiens
tgcatctacccacggggttgccacgactgagctttgaggagacctgtgagcagtcacagagtgaccacacttcatcacagtctggcttggagtaatctccctctctgggaacatggtagatacatttatttaaattatatgaaggccaagaattttttagaggccaaagtcatttaaaaacaaaggattttttaaagctcggttcacaatgtcatgtgaaagttgaagggcaaaactccctcagtgaaaatgtatttccaagtagaagattccatgtcttacaaaatttgagaccattatttgcatca

SEQ ID NO: 198153 - DNA, 537 bp, Homo sapiens
ggactaatgcttgggatttattattgagtttcatatgaatttggaatctagattcatcccattgtttaaacagtctgctttgtttttttcttaatagttacttgaaatgctaaaggaactaaatagagccagatattacacagaagatgagacatttcaagatcattctgttctttataatcttatctccaaaatttctataatagacgattattgcagtggtcactcttcaattctagcagctttagaagctgaaaccacactgaaaaagtggatgtttacacatttagacccatccttagatctgtataatacaattaaaccacgaataaacaaaacatgatttatgcttgtcaaaatttgtagaactcttcagaaattgtgactccatctccaccacagaactaaaactcatcaaaatttattttattattatgtgtaaatagcaatagatttagttgctaggtgccatctgctcagtgtcgaagatcactgtgaattggaatgcttacatttcttgaacaatcagcagtactt

SEQ ID NO: 198154 - DNA, 575 bp, Homo sapiens
aactaatctttagactcatatggaaatgtaaaggacctggcatttgggaaaaaaagaaactttgaaaaggaagaacaaagtaggagggacaacactacttgatttcaagatttattataaagttacagtaatcaaacactgcggtactggcaccaacaaagataaacagatcactggaacaaaataagagtccagaaataggcccacacatatttctggaaaactaaattttggcaaaagtacaaaggcaattcagtaaagatagcctttttcaacaaacagagctggaacaactggatattcacatgcaaaaacgtaaacttctagccacctcataccatagttaaaactcagatgaatcatagaggaaaatagatcctaaaactgtaaaacttctagaaaaaagcatagaagaaaatctttgtgatcatgggttaggcaaagattttagatacaaaataaaaaaaataaattaaaaattgatatatagacaataaaaattaaccatttctgcttcttcaaagaaacaacttcttcttcaaagaaaactttaagagaacgaagagacagcccaa

SEQ ID NO: 198155 - DNA, 243 bp, Homo sapiens
tgatctgaggatcccaagcttttaccgctagacactaaacaacaagaataaatagtcaaataaagacaactaacaggttgtgaacaaccatcagaggggaactagcatagaccaaatattatcctcatagtctttctataaagtagattttatcatcatcattttgtagatagccaagactcagagagggtaataacctgccctaaggcatacaaccaataggcgtaagctaaaatatgaatg

SEQ ID NO: 198156 - DNA, 519 bp, Homo sapiens
acttaacatatatagtaattgacttaacctacttgattcaccatttgttgttataaaatattgccttaattaaatatttcaaatcttaaaggtttttccattatatgaaattttttaaggaatgcttttcaaaaatgaagactgcagtaccttttgtgatttggtacatataaccaaatcgccctttttattgtgtagttacagttgataatgccacctgaaatacatgaatgtgccagtttcattgcagttttaccatagtggagtgttaaagcagcaacaatctaattatttaaaatcctagtggtagttggtaatgtcatcatatctttgatagcatagctggaagtacaaggaattgctactgtctttgagtaaacaaaactctaactttgaatgagccgtaaaaggatagtctctaacccaagagagaacaaataaccccatctccctatatcctgaagcacagctaaaacatggctggagtatttgcaagaaactaataaggaaattttgcaa

SEQ ID NO: 198157 - DNA, 461 bp, Homo sapiens
gagttttcttccctaactcattctcagccttttccttaagagtaggtccccagaagtttcctaatgaattccttacttcctctgcaatgaaacctctaatgctgtcaccatagacacaagggctggccctgaggtcagcaaatcagaaactatgggatcacatccacagcgactcaaatcaccagggcctaaaagggcgtgtccttccatcgaacatgtctaggaaacacctgatcactgtctaggaaacaccatttactcctgacttctcccacactcaccttcctcacctacggtccatcaaagccttttgaagattttattcactccttatgtcgtctggtaacataggggttctaagacaggcaatgcttctggagctaacactgtctgtctcagaaccccagtgttaccagatgacatatggagtgaagatctgagaactgctttttttttttttt

SEQ ID NO: 198158 - DNA, 345 bp, Homo sapiens
tagataggatttgccaggtaggtaaccagattgaatagaatcagttttagttcttccttttcaatttgaataactgttatttcattttcttactttattgcattggctaggacctccaatacaatgttgaagaggagtgagattacatattgcagcattttcttatctgacatgcattgtattttgtttgtctcacagctcagaaaggccttactgaccattctgtctgaaatacatcttcctctttttatcattatctcagcatcatacttaattactttatattccttgtcataaattatatgtatttctttgttgtctgtctcttacactaatccgtaagcg

SEQ ID NO: 198159 - DNA, 573 bp, Homo sapiens
ccattttaatagcaaataccttccaatatatgcttagtttttcctgtttattaataaagctatgatactcatccttatagctgaatgtgaatacatatcacaaagataaatttctagaggtgaaactgtggaattgttgaggtcatatcccttattttaggcttctaatatactaaattgccctccagaaaggttgtatttagtctctactcaacaacctctttgcctgtttcacagtctggctcaaactagtattgtcactatatttagtattgttattctaaaacaatttaacaatattctgggcaaaatgacatcataacggtttttttttttttcttggagacggagtctcgctctgtcacccaggctggagtgcagtggcacgatctcggctcactgcaacctctgtctcccaggctcaagcggttctcctgccttaagctgggattataggtgcatgccaccacgcccggctaatttttgtacttttagtagagacagggtttcaccatgttggccaggctggtctggaactcctgacctcaggagatctggccgcctcggccttcc

SEQ ID NO: 198160 - DNA, 194 bp, Homo sapiens
tagcatgcaggataaaactattgaggactggataaaataatgcatttttactttgttcctttcgtcttgttttagacaaaaggctcattgtgctatgtgaacgctcaggtcttgtgtaacttgttgactttatatatgtacatatcggtcttgctagattaccttcatggcagttacttgagccagatggaaga

SEQ ID NO: 198161 - DNA, 412 bp, Homo sapiens
cgggtggatcacttgaggtcaggagttcaagaccagcctggccaacatggtgaaaccctgtctctaccaaaaatacaaaaattagctgggtgtggtggcaggtgcctgtaatcacattttagttttgatttgcaaagcactggcgcatgaaaaaatcttgggccgggtgcagtggctcacgcctgtaatcccaacactttgggaggccgaggcaggtggatcacctgaggtcaggagttcaagactggcctggccaacatggggaatcctcatctctactaaaaatacaaaaattagccgggcacgatggtgtgcacctgtaatcccagctactcgggaggctgaggcagagaactgcttgaacccgggaagcggaggttgcagtgagcctagattgtgctgctgcactcca

SEQ ID NO: 198162 - DNA, 941 bp, Homo sapiens
gtgaattttggtgatttttagctttacagatagtaaaaaatgccaaaagggtgtccttttgatctatcaaattagtaaaaataaaatttttactcatccttactcatcagtgctaataacttgtgtattagcactgataaactgttggtctgtaaattggtaaaagtgggtaaaaattgattaaatttttcggattataaaaaagcttagatggcctggtgcggtggctcacacctgtaatcccagcactttggaaggccgaagtgggtggatctcttgaggttaagagttcgagaccaacctggccaacatggtgaaaccccatctctattaaaaatacaaaaattagccaggtgtggtggcaggcgcctgtaatcccagctacttgggaggctgaggcaggagaatcgcttgaacctgggatgtggaggttgcagtgaaccaagatcgcaccactgcactccagcctggggtacagagtgagactccatctcaaaaaaaaaaaaaaaaaaccccgggggcctcaatgtggcgggcgggcgggaccacacgggtttagtggaattgggccttgtcaaaaaagtggttctgggaccagggttttctggtcaccaaggtgggaaaatcggcggggtcccctataaggggggccggataaatcgatacagcccggttaacccggttagaactcggagaacacaagagaactaaagcaaaaaggagaaacgaaatgacaaacggcgataaacaatggtccccagacgcgggacactaacgaaagcacgacaacaacaaaccacaacaaaccagattaaaagcgtacaacagggaaccaagaacaacgaatagggagtatgtatgcccatatccaacgcacgacgccatagaaacagttttcacggaaacaagcaacaacaagcgagcacacaacaacaagtacc

SEQ ID NO: 198163 - DNA, 408 bp, Homo sapiens
ttatctttttatctcagctatatttgtgcttatttgaaagtgatttacataccatgataattgaaggttatgaggatccccttttcgcagataagttccacgtaaagccgtgtttcccaaattgtgttttgtagactgccagtcttagagagattagttgtttgtaggagaggttccagggtgagatttcaacttgggaaaacactgggttaaacatagttaaacagagttttatttttgatggtgattgtgttactgtttttctgcagagcttgtcagagtttttagtagtgtgtattggcaaattgagaaatactgcacattatatttccttccttcaagtttatttggtcaaaagaacacaccctcccccccaggaaatacccacaaacatcttgaagaaaggtt

SEQ ID NO: 198164 - DNA, 673 bp, Homo sapiens
ccctcctggagtttgggaagaccctgtgtgtcaggtcagcctggtcccgcagttgccatttccatgtagcaaggaggcacctgcctgtgctgggtgggaggtgtcctgagctgtggcatggtggggattggagtccacaggggtgctgcttccactcagtgtgggaccctcagtttctaatcgagctcaataggcggatagcgtttgcctttctacggggcatattgagctgctctttggggcttgttgagttcagaaccccatgggcaaccaggtggaccatgtttcctcctgagactccacgaggcagagtgggtgtcgccagagcttccatgcaagagtgggacctggaggcatggtggcatggtgtgctgggccgcctgctgggccgggtgagggctgtggagcctccccactgagaggtggttgctttataggttatggcagaaaagggtctgggtattagagtaagatatggaaactcttgtctccaaaacatgaagaatccaaataaatgtgtccgtcaaagacctgtgggtggtaacagtgtcagcagtttatgtttaacgattaataggatctgctgcaccctgaccagacagtgcccaagaattttactgaaggcaccggcccctgtattttatgtggggtgatagcataacccttttttttt

SEQ ID NO: 198165 - DNA, 394 bp, Homo sapiens
ttcttgcttatagctggtggcctattctctgtgaggttaactatcagctcaagactccctaggtggtaagttgggggctgggggcagtattcaaactatgcttgcagagcaccatgctgtcctgcctggggttacagctgggcctctcaggcattgatggaagaattgagatatgacttggcatcagtacaatccaagactttgttcagaaacttgtatttgactgtgtccgattattacattgataataaaactcctaggaatacattatttagaatgccattttctcccttttcagtgaatattgaactactgagcacccaggatatttcagttgactggtcataatactttctcctagcagaatgatatatgtgaaaaatatgaatattaa

SEQ ID NO: 198166 - DNA, 178 bp, Homo sapiens
aaatggtcagtggagaggcagtttgggaaaatagacatacaaaatagagctgcagcctggagctctcaagcagctccgtgctatcttagtcggacttgctgttattctctttcagttatgaccaaattatttttctaactttctaagttagcagtgttgttttttattcctaagtctg

SEQ ID NO: 198167 - DNA, 459 bp, Homo sapiens
  misc_feature (1)..(2): n is a, c, g, or t
  misc_feature (4)..(4): n is a, c, g, or t
nngnattcggcacgagggtttaatttcacgtatgtcacaaaacatggtgaaatctctcaccattttcctctcatctgtgggaccagagctgccttttctccctttctccccaacagctctgaacagctgtcctggggaccagaggctcacccttccctctgcagaaccagtagaaactgggcagaacagtgaatccatttacctccagaggacactagagactgtaggtttaaagacataagagaattatgtggcagatggccttgattatttgtgtggggcagatggtatgtacggggaaacacagagcgggggcttaggcgggagcttcccttcgtgggcagcatcttgcatctgcaagcttaatcctgggcacgaggcccaattctatgctcctctttgttgccttctccagctgtgagacattcactggaattttcagtaaataacttcttagga

SEQ ID NO: 198168 - DNA, 392 bp, Homo sapiens
ggagtcggctcagtcactgacagaaaaacgacactgagtactttatctcttaaaaacggtgaagaaagaggaagtttgagacaactgcaatatacttaataaaaaaatgagaaaggcaagaataaaccaaaatgtcaacatgaattctattatggcagaatcataaatataactttatccatcagtgtttgcaattcttctgaaatgcattatattgatttataatgaaaacacttttaaaataaggtaaacaggttattgacagaatagtagattttctggtcaaaataagtctttttttttttttaaagaaggagtctcgctctgtcacccaggctggagtgcagtggtgtgatctcggctcactgcaacctctgccttccaggttcaag

SEQ ID NO: 198169 - DNA, 261 bp, Homo sapiens
cagcggaacaagcaaatgccttttatagggaagtagccactgaatcactaacttttagcctctttcttccttaaaacccaatctgccattcaatgcatctgaaaatagaagcgcaatatgttgctcccagagagaagggggtggttgatgtcagggagtaacttaaatgtaccttgtttttaaaagagcagttcagttgagagctgaagagccccagttataacaagtcgttatgctctagcactgttgcttgttccgctg

SEQ ID NO: 198170 - DNA, 878 bp, Homo sapiens
tcagtattatctaatcaggaagaaatctaactgttcttccagactttcttctcccatcctctcatctcgcctccaaggattccatccagtacttcccaaccacctgcagcggaagcagctcaaataatcctatgatcatctacaagtctgcaaggctgaccttcccgggctcccactgctccctgcttccagaacgtgaaggctgctttgcaatagactgacccccctttgtggccaggggagccatctttctgctcattccaggcctcccttactacagaggcacagagcaaaggcagcacacatcacgggggctctgtcatctgcttcctttgagtagataatcagttttcactcagaggaagatcacaggacacggaagaaccaaatgtgtatgctggctcagataccaggggccctattaagagatagcataatgggaaagataagtaggttgttttccccccacaaagtatctatttctaagctatgtttcaacagtgcgctgcagcagtttctggcttcctattcaagggaagagaaacagggttttgctcagatggatatactagatacggttatctcacttggcccctgcagatggagatggtaaattcctaatgacttttccaggggagatgtttgggggctcacttggcaacactaaacagttagatctatccctttctgtcaaaccaagagagttttccagttttttccatttccccagtgccattatgatgatcattgctccttgacaacacattaaaagataatgtgtggaaaatttttaacatcctttaaactttctttctttttttttttttttttttttttttttttgagacccagtctctctcttgttgcccaggctggag

SEQ ID NO: 198171 - DNA, 373 bp, Homo sapiens
aatctgatgaagtgttgcatgtccatgagagcacacaggactaggcttagtgactgccttctcgtccctctgggccaggcttcccagtcttgctttcctgtaccctggactcctggtggtatttctgaaaagctctggcaatatctcggcacaaacaagtcattgtgtataagccagcagtgcctggaagcccctggaggcataggggccccagctgttcttacttgcagaagtgactctgagggacaatgaccctggagggccatgcaaaatgcattccagttgtaacttaagctctggagctgagctgtttgctttgttgattctccccgaaggtgcaggatggaaaggaggggaccactttagcaaaaag

SEQ ID NO: 198172 - DNA, 596 bp, Homo sapiens
gagaaatgaatggagatgtagacatgagatgtaaggaccagaatttggaggtcaattaaagcaattagcaaatagaaatcatttaagctattaagactgatgctgtcatatatatatacacatatatatgtatatgtgtgtagatctatacatatacatatatgtatacatataaacatatgtgtacatatacatatatgtatacatataaacatatgtgtacatatacatatatgtatacatataaacatatgtgtacatatatacatatataacatacgtatattatatatgttatataacacgtatattatgttatataacatacgtatattatatatgttatataacatacgtatattatatatgttatataacatatgtatattatatgttatataatatacatatattatatatgttatataacatacatatattatatgttatataacatacgtatattatatatgttatataacatacgtatatgttatataacatacgtatattatatatgttatataacatacgtatattatatatgttatataacatacgtatattatatatgttatataacatacgtatattat

SEQ ID NO: 198173 - DNA, 306 bp, Homo sapiens
ggtggagacgctgttactgggcaaatgttcctttaagagcatcttatctgaactgctgcagtcctgaagaatgtctagtgataaaccctgtctagaaatacgtgcatacatgcaagacatggatcatgaaaagcatgagatgcatgaaggacatggaggaatttcttgtgggattattttagaaagtccttgagacagtcgttatctcagaaatgcaagcatgaactccctgccttcgtgccatcctggctccaatttcttcgggtctaatcagtgatttcatcctggtatctgcaactttcacac

SEQ ID NO: 198174 - DNA, 534 bp, Homo sapiens
atattataatcttataggataactggtatatgcagactgtcatgacagaaatgccattatgcaatgcatgactatatattacagacatcagtatgcttcctcataagcactttagcatgcatataactaactacagttcaatatattaaatattttctcctcctagaggtaaaatgtatattaacgaaatgaataaaacttaaaacttaaattatgttttctgagcttgagaaatgcataagactatgtaaaccaaatttctatcaagatatacaccattaactttactctagaatatttttaaggtctattcccagtcaatccctgcaccttcttccccacccaagaggcaatcgctattacaattttttttcattatagattaatttgccttttatagagcttcacataaatagaataatatattctgtactcttttgaataaggcttcttctactcagcataatgttttggaaatccatctatgttgtgtgtatcagtaatttcttcctgatatttctattttctgttata

SEQ ID NO: 198175 - DNA, 315 bp, Homo sapiens
acagaactctttcttgatttctcttttgcctttacctttggtctcaacacttggactggtcctgtaattttgtttctctttttgcaatccctatccagaatcactggaggtcaaatgtctttgccaatttgagtttttccacttgaacaagaaaagactgtcaagggaaagccaatcaatttcacaatgtttagatgctgaagatacagggcacagcttccttcttgaattgcttgttgtttacctagttgacaatctactgggaaaaagaaattccttttccagaaaaggttttcaccaatttcaaggaatcct

SEQ ID NO: 198176 - DNA, 499 bp, Homo sapiens
tggattttgatagacatttttcgaaagaagatataaattattaataagcaaataaaaagatactcaaaagcatttgtcagtggagaaatgcaaatcaaaattacaatgagatacaactttatacccactggggacagctatgataaagaaaaatagacaattaaaagccctggtaataaagtagagaatttagaaccctcatacattgctggtgagaaggtaaaatagtatggccacttcagaaaatagtctggcattatctctattcaaaagaaataaaatcatatgacccacacaaaaattgtacagaatattcacagcatatttttcaaaatggtcaaaatcgggaccaatcaaagatgaatggagaggaccaggtgcgctggctcatgcctgtaatcccagcactttggaggcagagatgagtggatcaccttaggtcaggagttcaagaccagccttgccaacatggtgaaacccctgtctctactaaaaatac

SEQ ID NO: 198177 - DNA, 180 bp, Homo sapiens
atgattggtgctgcctcacgttccagtatgagcttttctccttgcctcatactcttctaaagtgtttgtagcatgcactccatgatggctggccatcagtatccatgctttcagtggcattcttcccaaatccagagatgccttcttcattcactaccagcttctactcatccaccagtc

SEQ ID NO: 198178 - DNA, 493 bp, Homo sapiens
acattatccgaaacctccaatggcatcctgactcctagacctggctacttttcttttttttttcttggaggtagaaggcaattaaggcttgaagtaaaagagctgagaatagggaaaccctggtatgttgcacacctgttatgtgctagacatggtgctgggccctttttgtgttcaagagcttttagcttttgaagatattactttgtcctctagccccaaggggaaaaagtctcctagaaatggaatagtcttagcagtcaagtccaaggacacttcatcatgatgttagtaaggtgcatgtgtctccaggtttcaagtagatagaaagaatcataaattgcctctggttgctttgtagaaaacgctgattagagaagccgatggccagagtaagttccagtgttctgtaccactgtagggtgactacagttgactatatgatacagtttcaaatagctagaaagaggacgttgaatatcggtccccccac

SEQ ID NO: 198179 - DNA, 243 bp, Homo sapiens
tatgtgaaaaaaaaactccctaagcatgagaacctataaaataaaagggataataacaatatatatgagtacataaaaatattgtctctaaaattcaaaggtcaaatataaaattacaaagcaaattgggtaaaaggttaatatcctgcacactgagggcttccacataaatgacaaaggaataaagcagataatttgtagaaaaaacacagaggaataaattgaaaacactcagaatcatta

SEQ ID NO: 198180 - DNA, 347 bp, Homo sapiens
atgctgctagactgaggacaacactttgagaaccactgggcgtaggcctgcagtagctgggattttgcactccttctgctctaggcctcagctttttcatagacagtgttgtggcttatggctccagaagagagctgggaaggggctggaggatggtccctcctccccactcttctgacgggttgctcagcccccatttcaatgacacgctgtcctgagggcagcagctcctttcacaagtgtttttctgcatggccatgttatatattctttaggggaggggatggcagagatgctttctacatctacacacatgctcccctttccctgcggcaccctggcagaca

SEQ ID NO: 198181 - DNA, 682 bp, Homo sapiens
tgcctttccacaggcatgttgcacaaccaatgcttcaaaagttgaacaaattgggctgtgacattttgcctcatccgccatattcacttgacctctctccattgactacgacttcttcaagcattgcgacacctttttgcagggaaaacacttccacaactagcaggatgcagaaaatgctttccaagagttcgtcgaatcctaaagcatggatttctacactacaggaataaacaacttaaaaatgtgttgattgtaatggtttctattttgattaataaagatgtgtttgagcctagttataatgatataaaattcatggtctgaaaccgcagttatttttgcatgaacgtaaatgatgaattttagatgctgaaatttctgggcatctaaatcttctttcacatccctgattatttttggaataaactcccagaagtggaaatataaggctgaaggcctggtgtggtggctgaagcctgtaatcccagcactttgggagaccgaggtgagcagatggcttgagcccaggagtttgggacaacatggtgaaacctcatctctacaaacagtgcaagaaatcagccagcgtggtggcgtgcacctgtgttccccgctaatcaagaggctgaggtgggatgatcacctgagtccaggagatcaaggctccagtgaaccatga

SEQ ID NO: 198182 - DNA, 545 bp, Homo sapiens
tgattacattcgattccatttgatcatgattccattcgattccactcgatgattccattcgattccattcaatgatgattccattcgagttcattgactcttccattccattccattcgatgattccattcgagtccattcgatgattctattcgattgctttcgataattccattcgattgcattcgataaatccattcgattccatttgaggataattccatttgagtccattcgatgattgttccattcgattctattcggtgattccattcgattccatttgataatgattccattcgagaccattcgatgattccattcaattccattcaataaagattccattcgagtccattcaatgattccattcaagtccattcgatgattccatcagattccattcaatgaatccattcgattccattcagtgatgattccattcatttccatctgatgatgattccattcgattccattcaatgattccattcgattccatttgatgatgatttctatcaatttcattcggtgactccattcga

SEQ ID NO: 198183 - DNA, 588 bp, Homo sapiens
ggctctcaggccgcttcactagagattctattccgggggtctggggaaggacccaggaacctgtattttttagcatgctctcctgttaattctggatttgttggtgtgaacctgagctggaatcatcaggggtggcttcctagaggagatgggcctagaattggcatccctttgcttggtggtagagtccccactgtgggccaagtgttatgctgggggctgggcctccgtggtgaatcacatgtggttctgggccactaggagctcatggtctaatgtggaaagtttccaaacaagtagttacagttcaatgagattggtgccaagaaaagtatatgcaaaatgagtccaggtactgaagagtcagcacacgatttccagggtggagacatctgaacctctcgcaggtttttagggagaggaagagcttgtaagagcacacaaaagggaaacaacatggcgcatctagggaaccagaaatagtttggtatggctggaatgtggagtaaatacaggaaagtagcacgggactgtgctaggaaggcaaacagggaccagactgcactctggcctgatagccaaggggag

SEQ ID NO: 198184 - DNA, 519 bp, Homo sapiens
aggtggatgggagagagaaacaattttgaataacatagctcaactgtctctgagaagttgatctttgagcaaagacttaaaagaatacagtgatcaaggaatgcatatatctgtggggggaaaagagttccagaccaaggatagtataagtcaggcactacggggaatgggagaaaagtggaagatgtggatcttgtcctagagaaacttaatctctggttggatagaacaacaacatacacaactgagcactcccacagcaccctgtgcttatgtcttggtgcttttcacatggtttctttttcatattgtattttaattatcccagttacttctctctcttcttcccactagactgtaagcatcttgaggtaggggccatatctatttttggtatcctcagtgttaagtacaatacccaacagaatagatactcaataaaccaataagtatgagtcaatttaaggaacaatactgaagaccataggattgtagtgtctctaagccatacatttccct

SEQ ID NO: 198185 - DNA, 348 bp, Homo sapiens
agatgaaagagaggccctcttcctccacctcagccctgaccgtgttgaacccttccccacttggagtttctttccctttttcctaagggaagggggaaaaacaaggtgaccttttccatttctagaaatggaaaaactagaccagagcttattgacagatttcctgagggaaagatgcggtcttgcgtcacatcagccaccatgtgggatatgtctttcaccttccatggttgtgaggagtccccagccacatggaactgtaagtccattaaacctttttttcttctcagtcttgaggacgtctttatcaacagcatgaacatggactaatacaataccctatttact

SEQ ID NO: 198186 - DNA, 524 bp, Homo sapiens
agcccaggagtttgagaccagtctgagaaatgtggcaaaacaccaactctactaaatataaaaattagccagtcctggtgatgtgtgcctgtagtctcagctatttgggggcttgaggcaggaggatcacgtgagcccaggaggtgaaggctacagtgaagtgagatcatgcaactgtacttcagcctgggcaacagagcaagattctctttctaaataaataaataatttaaaatatatatatatatatatatatatatataatagatttcagagcttttaaaatgtattaatgtgcattttaaaaggattctgaatcacttttccaaagtgcgtgctagaatccaacctcagtatatcatgttagaaaggtctaatctatctttctagagcttgatctgtttcttatgcccatagtgcttggactgaattcttttccaacctcaaaagtggatccacatgtctcaaatattgctcatggcaaggatttcctgcttgaaaacctacttggccaaaatattacc

SEQ ID NO: 198187 - DNA, 487 bp, Homo sapiens
gcagggtcaaagaacagtgtaaacacacacacacacagagtcatcttttggtatctgtgggggattgatggtttcaggacgccccatgggttccagaatccacagatgctcaagtccctgatataaaatgacgtactatttgtatatgacctatgcacatccttctgtatgctttaaataatctctagagtacttataatacctaaacaatcctacacatcacttcatttgtgtggattcaacatagtacttgacacatggcatattcaagttttactttttggaactttgtagaattttttttctgaatatttttggtcctcactcagttgtatctatggatgcagaacccatggatatggaggaccaactgtgtgtgtgtgtgtgtgtggtgtgtgtgtacacatacatatatatgtatatacatgaatatacttctcttgtggctatatttgtcttacggatattaaaaataagaacaaatatt

SEQ ID NO: 198188 - DNA, 124 bp, Homo sapiens
cacttcaccccggcagtgagcctgctgagctttgtgaacatacagaccccatccaggctggccagtctcagaaaaaagggcagctttacttccagactgcagcagaaaaccccaaatatcccaa

SEQ ID NO: 198189 - DNA, 505 bp, Homo sapiens
ccaccaccacaacaacagaaaaggttggagtcacctttaatgtaataataatgcccacgtatgcaaaaggactcaagggaagatggttggaactgggtggcatataacaaagtcagaaacttatctggccaaacaatacagctgaaaatcagatttagttatgctgactcactgaagccagaaaaaaaacacctccagatagctagcatccaaaaaaatttgtcaggtcacccatggtagttcacacctataatccctgaactttgggaggcagaggtgggaggattacttgagcccaggagttcaagcccagccttggcaacatggcaaaaccctgtctctacaaaaaattttaaaaatagctgggtatcatggtgcacacctgtggtcccaactattcaagagacagaggtaggaaggctgcttgcgcctgggaggtcaagggtatagtgagccatgattgtgccactgaactctagtctgggtaatagagcaagatcctatc

SEQ ID NO: 198190 - DNA, 455 bp, Homo sapiens
aaacctggggcccaattgtggatcaagggaagatggttggaactgggtggcatataacaaagtcagaaacttatctggccaaacaatacagctgaaaatcagatttagttatgctgactcactgaagccagaaaaaaaacacctccagatagctagcatccaaaaaaatttgtcaggtcacccatggtagttcacacctataatccctgaactttgggaggcagaggtgggaggattacttgagcccaggagttcaagcccagccttggcaacatggcaaaaccctgtctctacaaaaaattttaaaaatagctgggtatcatggtgcacacctgtggtcccaactattcaagagacagaggtaggaaggctgcttgcgcctgggaggtcaagggtatagtgagccatgattgtgccactgaactctagtctgggtaatagagcaagatcctatc

SEQ ID NO: 198191 - DNA, 164 bp, Homo sapiens
gtcttcagttctcgtcagcatgaactaacttctcatcatggaggcacatagtaactgcattctcagaagatttatgcagttaaccaattgatacaagttttctttttcttgaatttttttttttttaattgaggcacagtcttgctctgtcacccaggttggag

SEQ ID NO: 198192 - DNA, 465 bp, Homo sapiens
gtattatgcaacctctcacatctttagttttccaactgcagaatggagataatagtacgttataggacttctgagaaggttaaattaaaattcttttataaagcacttgacttggcatatcatagaggttcattaagtattaggtttatttcccgttagaatacacataggatagaggagcagttaatttttattattactatagaaatcttcagggaggaaatgatatttaaattgtgccttgaaggtggagtagggttttgatatgtgttagatgggttccaaggacattctacttttaaggaactaaatgagcaagggctcaaaggtgtaaaacgtggggaaggctgtaaatacacttatgaatgtcagcatagtccagaaccttaggaaaagcaatttaggtcttaaaaacaaacaaacaaacaaaaagacaacaaaaaactagtagtaggaatgtaaaaa

SEQ ID NO: 198193 - DNA, 183 bp, Homo sapiens
taacttctttaacctgagagccatgaagaagagcaaagtgataactgacaacttgggacccagagcttccaggcaactgctcaccctctgtcctccctaggccaagggcgtgccctgttttgagagaagaggaaagcagccatatttccagtctgaaccacacatcacacttccgcctgcaca

SEQ ID NO: 198194 - DNA, 332 bp, Homo sapiens
ttggtctggtgtctgggatgagactggggcctaataaaaaggagcttaaatggactgtaccttgtagcattctgaggacaggtctgacttctgagaagggaaagtggtaaaagtattgtccagttctttttaagttggtggctgagcttggtgaggtgtgtttttaaaagacctttagtccgttctacttttcttgaagacagaggactataagggatataaactgaaaaactgcttggctaatttgactaataaagcctggtctgttatcagactgtatagaggtgggaaggctaaactgaggaattatgtctgacagaagggaagaaatg

SEQ ID NO: 198195 - DNA, 545 bp, Homo sapiens
  misc_feature (22)..(22): n is a, c, g, or t
  misc_feature (32)..(32): n is a, c, g, or t
  misc_feature (50)..(50): n is a, c, g, or t
  misc_feature (81)..(82): n is a, c, g, or t
  misc_feature (84)..(84): n is a, c, g, or t
  misc_feature (88)..(89): n is a, c, g, or t
  misc_feature (297)..(297): n is a, c, g, or t
  misc_feature (341)..(341): n is a, c, g, or t
ccacgcgggatgtccaaaccanaatgagacancaaccccatataaaaagntgaactggcggcttcacacactcacacacanncncatnnacacggatgaaatgtttggacagaggcaaatttcacgtggtcatttctgtttctttttaaatacaggtttgtagggtggtattttgttttttccagctataaaaaaaggcccaaaagtgcatgtgtgaggggggcaaggcagaaattaagcaataaagtcattttccctggagggacatgagagggagaaaacaggaggcagtgctgngagaacgcactttcctcaccactgggcttcttgttattcttagnatgggggttcggcgtgtgcatgcacacgccgaggacccaaaccctacagctgtccaggagtggtatacagtgacagcacatatgactaaagaggactgaatagagtcaccttgataaacgatgacatttcctcatagaatctctctttaaatcaggggttatactcatcagaataatcctgcacacttttgcaaaatgtacatg

SEQ ID NO: 198196 - DNA, 422 bp, Homo sapiens
ctcaaatttctaatggatttgtcttagacacttattgccactccttagatagtcattgctatctttgaagttctggacgatacgtgtattacagaggaactggagacattccatcaccatagttagcttgattggataccctttaaaagcatatactcgcgcctgtaatcccagcactttgggaggccgaggcgggtggatcacttgaggtctggagtttgagacaagcctggccaacatggtgaaacctgtctgtactaaaaatacaaaaattagcctggcatggtaccacatgcctgtaatcccagctactcaggaggctgaggcaggagaattgcttgaacctgggaagtggaggttgcagtgaaccaagatcttgccattgcactccagcctgggtgacaagagcagaactccattaa

SEQ ID NO: 198197 - DNA, 567 bp, Homo sapiens
aggatgtggagtggctacctctaattatgtggtggagcttatagaaaaaaaaaaatgacaggcttcagattttaaattcttatctccaggaaatgtgaattaatcaggagtttctaagactgttgttaaaggaaaggagcagctccagttctacaaattacagtacagaagaaattaataactttgctggacctcttatctgaaagttaaggcaaagactgggacccaaagagttcaaatggaggagtttgggagaactagctgactccaagtacctaaatctctaaattccctgagccttgcttgctagcagaagcagtttctataatgacctcatcagagatagtcaccttgcagggtaatgctattttcccctaggttctaacccatcatccctcttcgcttccagaaccacagctagagtcagatcaaggactgtccttatggcattattacaaaattggatgcaacagaagcacatatttgaagaaaaaaaatggcaagatttgctaatgtgttatgctagttttctattgctgctgtaacaagttaccacaacctcagtgg

SEQ ID NO: 198198 - DNA, 676 bp, Homo sapiens
gggtggatagatagggtaggcaaagtctttggaagttttcttttgatgcttccattttctcattaaaggtaaagaagaggaggtgcaggtattggtgggcagatagatggtgtaggtaaagtctttgcaagttttcttctgatagttcaattttctcaggatgcaaggtcacctactgaaggtgaaagagaggtggtgctggagttcctaggataagggagaaagtaagaaacagtggtctaaatgaatggaagactaaattaaactaaggaaatgcagcattttaactactggtcagcattaaagggctagggaaatctagtaaagctactgtcagcataaaagggttcgttgtcacacatttcaagtaaaattagtcataaagattgttttttctcgacacgtttagttactgaggttcatgtgagaataagaagaaaggagtaagaaacaatgaaagggtagtatgacataaatggttcttaccatttattggtcggtggtgttggcaggattattaaaagtagaattctagagggagtaaagttgaaaagatagaaagcaataatcagagaatgaaatgtgtgaaaccgagaatgggataggttgtgtttgaaaaatatactattacctagctccctaaaagtttaccaaaaaaaaaaaaaaaaaaaaaaaa

SEQ ID NO: 198199 - DNA, 1138 bp, Homo sapiens
gccactgtactccagcgtggtgatacagcgagacaccgtttcaaaaaaaaaaaaagtgtgaatgaacgtggagggctgtatgggggcgggatgggctgggggtgcaggaagaagccctgagaaaggatagataggaggctagaggagcagtgcgcaggagagtggagctgctgacagaggtggatctgagcctcacccgggttgcggctcaggtctttctattaatccagttctgccagcacagtagtgccatgctctgtggaaacagccctggagccagcactgcctcctctcctcccgctgcccatctgcatcccagccactgtccctgaggcctcaagatgtgttgaaccttagggatgagtctgcagaatcctagaagttgggtgcctccttccctgccatcctgggctgggggcttgagaggcacctggttgtgagggctgggattagagtgcttccattgcgaaactgtggagcctggagagttaaaaaataaatgaagaagctctgaccacagagcaatttgagggctgaattatttagagcctctgctccctctggcttctcctggggaagggccaaaggaggaatgtggagccagggagggctgagcttccctggccaggcttgtgcactcaggggccctgggagtccacactgtcctgccatgtcctcagccgcttttgtccttgggtcacaaggcctctgtggtttcccgcagcccacagggcctgacagattcaggttgaggctgagaggagagaccctccctttcctctttgccccactcctggtctggcctcccctgatgctgcttggctccaggacatagcgataatgaatgacataaataagtcattctcattagcagcgggtgggtcactggcccaggagacaggacagcaacagcggaggtgggtgtggacagggctggtcaagtcccctggtctttctctcaggagccccagagggaggcttaatcctctttcagtctctccaggattatgttttcagcttgggggacttgatgaaaatccatgcttccagcagtcaagggggcccaggagaggggtgccagtagggtcccctaggaaggaattggggtgggacggccaggcgctgaggctgctccagg

SEQ ID NO: 198200 - DNA, 243 bp, Homo sapiens
ggtgtgcaccactacgctctatttttatcatagaataagccaaaggcagccttttataacactgtttagagctgagttagggataatgaaagctttaaattgggggtaattatgtacagtacatggcaaaggcataataatgagctcttacaagtcagtgatacctaggcaggacccccagtggagatgaagtttagctattatcagtttacttttaaaagtttaacatcactaaatgcagtc

SEQ ID NO: 198201 - DNA, 636 bp, Homo sapiens
aaactggcttggtgcaggtggagtggtggaaaacaaaccagagaggaatgtccattcccgtcccatggccacagggcctgcaacaaggcagctgggcagggaagcagagtctatgtgactccatcctggcctctgtgctttctcttgtgtccccagccagaaggaagtctttgtcgaggctttactttcttggtattcttaggaaaatgatggctactggagatgcttcttcaagtcagggtctcacatctcctcctgctggcctcaagtgctgccacttaaagaggtcttccggacacttttccaagttccggaggagccccagaagcagctctggggtcatgactcttgggtaacttttctcaggccaggcctgtgccctgggtcatgaagtcacagctggaggagtggtctgccacagcattgaggccagggccatagaggagagcaagggtatacacaggctcagtcccctaggcagcctgcctctgctctgggccctgcagcccatggtcttagcacttactccctgcctcatagcaccctggctccccactggccttatgggcagccacatctgatcccctccacctccttggctaggccctgactgccccaggtgtctgggcacttgct

SEQ ID NO: 198202 - DNA, 538 bp, Homo sapiens
ctaattttttgtattttcagtagagacagggtttcaccgtgttagccaggatggtcttgatctcctgacctcgtgatccgcctgcctcatgcctcccaaagtgctgggattataggcatgagccaccgcgcccggccacgtctggctaatatttttgtgttttcagtagagacaggatttcaccatgttagccaggctggtctcaaactcctgacctcaagtgatctgaccgcctcggcctcccaaagtgctgggattacaggtgtgagccaccatgtcccaccttgtatttactgtttataaaagaaaaaggaattttatttgtatcaactggctaattaatgcaaaatttgtttagtgattttgctaagctgaactcacactaataaaggtagttataaatatgtaatttatggaaacccattattttgttgctctttgagatccttcttgtttttcttgtttgcactaatacagattttaggctatctgaaaactgtcaggaaatgaaaagtcatgcagtgaatcataaaatgaa

SEQ ID NO: 198203 - DNA, 546 bp, Homo sapiens
gaaagagggaaaagcagaggaaatttttgaaagggagtgtgggggcaatcatagaaagagggacagaaggcaacaacggacaagaaactgaaaacatatagggaaagaaagggtccttcgtggatttgtcatttcacagatttacaactggaatccaccttttatcaaaatacgtgtgttgagagacatggcattgcatttcttactacatactgtgctaaaccctaggtgacctcttatttttggtaataaaagttataatttcagcaaataggttttatccattaactccatagcctccttgatataacctgagattaagttaaatttaaagtccaagtgagctcaaaggtgtaggtgaaggttgttgctattaggtctaactgaataatagctctctgcaaaatcccagccacataaaagcactgctctggcagtcatagcaaccttgccagctttggatgtgattgctgacagagagttcactgatttttccatggagaatcctgaagcttgctgttcgggttgacatttttacaactgtgt

SEQ ID NO: 198204 - DNA, 442 bp, Homo sapiens
cagaattcagttggtacagatgtttggctttattaataattatcaaaactggaacaatccaaacatccctcattctaactgtacaaacaaactgaaatactactcaggaatagaaacacactattgataaatgcagcaacatagatgaatctgaaatgcattatactaagtgaaagaagccaggctaaaaagactatgtattgaaccatttcatttatatgatattctggaaaaggcaaaatgaaaggaaccagaaaccagatcagcggttatgggggctttggggtaaaggaaaggagtaagtacagaggggcctcagggaatttggggaggttacggaactatgctttgattatagtggtggttacatgactggatgcatttgtcaaaactcatggaactatacactaaaaagggtatgctttaccttaaatctgatttt

SEQ ID NO: 198205 - DNA, 171 bp, Homo sapiens
gagttcgaggcaactacctctgacatagcggtggggggtggggatcgacacctcaagcattctaaagactggagcgctgggtctgaaattcaaaagtgccgcctccagagaagagtagaaaggagttggagtgtaccaatgcgaggcgagagaggacgctgggctgaaaca

SEQ ID NO: 198206 - DNA, 431 bp, Homo sapiens
cagagtcttgaccacagggagttcacaatttaacaggacagtgaagtgatacaataattaaaaccgagagggttttctcagccttagcagtgttgatgtctagggctggataattctttgttgtaggaggctgttctgcgcattgtaggatatttggtagtatctagtatcccaggcttcccctcactaaaggtcattaagcacgtgctctaccccacccaacagtcctgataataataataaaaataattactctagacattgcctaatagccctggagtaactgggagcaaaatcactccccagttgaaaattgactgcaatagtgtgataaggcctatgcacatgggacatgaatgacttcttgtgggggcagttctcaagctgagtcttgatagatgaggagaaatttgctggatagttaaggacag

SEQ ID NO: 198207 - DNA, 334 bp, Homo sapiens
atgcatgaatcttaggatatatacatataggtactttaggttgaaacgatcactggagatatttaaaaatatttttatcaaggtcaaagctactcccaaagtatagctaactgaaatgaatatccaagatcccattgtagggacggggggagctgtgttactgatgatttggcagcatcttaagaagactactaatggtggcatcactaccaatgaatttatttaagtgccagtatgtatctaaattacccagaaataactcctagcctcctctgaaagcaaaaggggtagacacgccctccatacctttccacaaatttccatctatctctcc

SEQ ID NO: 198208 - DNA, 293 bp, Homo sapiens
atatcatttgctttaaatattttttcatcaaaactttggcatgacagattaaagcattcaaattatggaacacatctgtcatataaccaaataggcaaaggtgtgtttcactatcaaaccatttaggtaagttagaattactttctctcagacaaatctgatctcatttatcaattcatgtaaatgtgttaagacacactccctgatatctcacttcttaatgttactttagaatagacagatcacagagccttactaggagttattgcctaaataaaatacagttccactgc

SEQ ID NO: 198209 - DNA, 4093 bp, Homo sapiens
  misc_feature (15)..(16): n is a, c, g, or t
ccagcgcctgtccgnnattgcctgccgcctccgtgggaaggggacacaggtccctgcggatgtgatggcccagctatggctgtcctgcttcctccttcctgccctcgtggtgtctgtggcagccaacgtggccccgaagttcctagccaacatgacgtcagtgatcctgcctgaggacctgcctgtgggtgcccaggccttctggttggtagcggaagaccaggacaatgaccctctgacctatgggatgagcggccccaatgcctacttcttcgctgtcactccgaaaactggggaagtgaagctggccagcgctctggactacgagacactctacacattcaaagtcaccatctccgtgagcgacccctacatccaggtgcagagggagatgctggtgattgtggaagatagaaacgacaacgcacccgttttccagaacaccgctttctccaccagcatcaacgagaccctgcccgtgggcagtgtggtgttctccgtgctggccgtggataaagacatggggtctgcaggcatggtcgtgtactccatagagaaggtcatccctagcactggggacagcgagcatctcttccggatcctggccaatggctccatcgtcctcaatggcagcctcagctacaacaacaagagcgctttctaccagctggagctgaaggcctgtgacttgggcggcatgtaccacaacaccttcaccatccagtgctccctgcctgtcttcctgtccatctccgtggtggaccagcctgaccttgacccccagtttgtcagggagttttactcggcctctgtggctgaggatgcagccaagggaacctcggtgctgacggtggaggctgtggatggcgacaaaggcatcaatgaccctgtgatctacagcatctcctactccacgcggcccggctggtttgacatcggggcagatggggtgatcagggtcaacggctccctggaccgtgagcagctgctggaggcggatgaggaggtgcagctgcaggtcacggccaccgagacacacctcaacatctacgggcaggaggccaaggtgagcatctgggtgacagtgagagtgatggacgtcaatgaccacaaacctgagttttacaactgcagcctcccagcctgcaccttcacccccgaagaggcccaagtgaacttcactggctacgtggacgagcatgcctccccccgcatccccatcgatgacctcaccatggtggtctacgacccggacaagggcagcaatggcaccttcctgttgtcgctggggggccccgatgcagaagccttcagcgtctccccggagcgggcagcgggctcagcctccgttcaggtgctggtgagagtatccgcgctggtggactacgagaggcagacggcgatggcggtgcaggttgtggccacagactccgtcagccagaacttctccgtcgccatggtgaccatccaccttagagacattaatgaccacaggcccacgtttccccagagcttgtacgtcctcacggtgccagagcacagcgccaccggctctgtggtcaccgacagcatccacgccacggacccagacacgggcgcgtggggccaaattacctacagcctgctcccaggaaatggggcagacctcttccaagtggatcccgtctcagggacggtgacggtgaggaacggtgagctgctggaccgggagagccaggccgtgtactacctgacgctgcaggccacagatggcgggaacctgtcctcctccaccacactgcagatccacctgctggacatcaacgacaatgcacccgtggttagcggctcctacaacatcttcgtccaggaggaggagggcaatgtctccgtgaccatccaggcccacgacaatgatgagccgggcaccaacaacagccgtctgctcttcaacctgctgcctggcccctacagccacaacttctccttggaccctgacacagggctcctcagaaacctggggcccctggacagagaggccatcgaccccgccctggagggccgcattgtgctgacagtgcttgtgtctgactgcggcgagcctgtcctcggcaccaaagtcaatgtcaccatcactgtggaggacatcaatgataacctgcccatcttcaatcagtccagctacaactttacggtgaaggaggaggatccaggagtgctagtgggcgtggtgaaggcctgggacgcggaccagacggaagccaacaaccgcatcagcttcagcctgtcggggagtggtgccaactacttcatgatccgaggcttggtgctgggggctgggtgggctgagggctacctccggctgcccccggacgtgagcctggattacgagacacagcccgtcttcaacttgacagtgagtgctgagaacccagacccccaggggggtgagaccatagtagacgtctgcgtgaatgtgaaagacgtgaacgacaatccccccaccctggatgtagcctcactccggggcatccgtgtggctgagaatggctcacagcacggccaggtggctgtggtggttgcctcggatgtggacaccagtgcccagctggagatacagcttgtgaacattctctgcaccaaggccggggtcgatgtgggcagcctatgctggggctggttctcagtggcggccaacggctctgtgtacatcaaccagagcaaagccatcgactacgaggcctgtgacctggtcacgctggttgtgcgggcctgtgacctagccacggaccccggcttccaggcctacagcaacaatggaagcctcctcattaccattgaggacgtgaatgacaatgcaccctattttctgcctgagaataagacttttgtgatcatccctgaactcgtgctgcccaaccgggaggtggcttctgtccgggccagagacgatgattcagggaacaatggcgtcatcctgttctccatcctccgagtagacttcatctctaaggacggggccaccatccctttccagggtgtcttctcgatcttcacctcctccgaggccgacgtgttcgctgggagcattcagccggtgaccagcctcgactccactctccaaggcacctaccaagtgacagtccaggccagggacagaccttccttgggtcctttcctggaagccaccaccaccctgaatctcttcaccgtggaccagagttaccgctcgcggctgcagttctccacaccgaaggaggaggtgggcgccaacagacaggcgattaatgcggctcttacccaggcaaccaggactacagtatacattgtggacattcaggacatagattctgcagctcgggcccgacctcactcctacctcgatgcctactttgtcttccccaatgggtcagccctgacccttgatgagctgagtgtgatgatccggaatgatcaggactcgctgatgcagctgctgcagctggggctggtggtgctgggctcccaggagagccaggagtcagacctgtcgaaacagctcatcagtgtcatcataggattgggagtggctttgctgctggtccttgtgatcatgaccatggccttcgtgtgtgtgcggaagagctacaaccggaagcttcaagctatgaaggctgccaaggaggccaggaagacagcagcaggggtgatgccctcagcccctgccatcccagggactaacatgtacaacactgagcgagccaaccccatgctgaacctccccaacaaagacctgggcttggagtacctctctccctccaatgacctggactctgtcagcgtcaactccctggacgacaactctgtggatgtggacaagaacagtcaggaaatcaaggagcacaggccaccacacacaccaccagagccagatccagagcccctgagcgtggtcctgttaggacggcaggcaggcgcaagtggacagctggaggggccatcctacaccaacgctggcctggacaccacggacctgtgacaggggcccccactcttctggaccccttgaagaggccctaccacaccctaactgcacctgtctccctggagatgaaaatatatgacgctgccctgc

SEQ ID NO: 198210 - DNA, 690 bp, Homo sapiens
  misc_feature (15)..(16): n is a, c, g, or t
ccagcgcctgtccgnnattgcctgccgcctccgtgggaaggggacacaggtccctgcggatgtgatggcccagctatggctgtcctgcttcctccttcctgccctcgtggtgtctgtggcagccaacgtggccccgaagttcctagccaacatgacgtcagtgatcctgcctgaggacctgcctgtgggtgcccaggccttctggttggtagcggaagaccaggacaatgaccctctgacctatgggatgagcggccccaatgcctacttcttcgctgtcactccgaaaactggggaagtgaagctggccagcgctctggactacgagacactctacacattcaaagtcaccatctccgtgagcgacccctacatccaggtgcagagggagatgctggtgattgtggaagatagaaacgacaacgcacccgttttccagaacaccgctttctccaccagcatcaacgaggtgacacctgccttaatgtggttgtggggcagggggcatcccaaagtgcttctcagagtaggaagagccagagacagtcagtggggcattcagagttgggaaaaacctctcctagcaggggcagcttcaagaaccaaagccagggggatgtaaccccacaaactggttacagcaatattttgcaatcagtcaggttaggaattctttcagtgatgaaagca

SEQ ID NO: 198211 - DNA, 683 bp, Homo sapiens
aatgcagaatcagagatgaacctggaagggttccgactggtgggtgtcccgatagatggaaatgcttcccaaggctggttcaggtgagaggcaccagaggagcaaaggttcagccactggaacatacacaggtgtttccatttgcctggacagtggggcatgtggggaagcagagggaagcaggtctggaaaagtgaggagggtcttgcacatcagctgaccggaatggatggatttggtctgtggaaacagactttattggacagtgacttaatcacatgtgttcttccctgactctgggatggctctagttttaagcagtaaggcagacaaggtttgccttgggaagccctccctacaatcccgtctaccagattcctggcgtcctcctgtccccaaagccctcagcctgagtaggccccctcctgggagatgctcagtgaatatcaaatgagggaatgaacgaatgctcccgacatgtaagaccctcatccgcatatcaaaactaacccgtccagtgtcccatcccttcaggactctgctagaaaagagccagattatctactcacttgttctcatgaaggcattatggcaagttaaaggtaacccccccaggtaaaggtaactgcgtttgtaaattgatgatctggagaagatcttaacacatgggattctgatggtgg

SEQ ID NO: 198212 - DNA, 145 bp, Homo sapiens
acttggtggcttaaacagcagaaatttattctttcacagttctagagtccagaaatctgaaatcagtatcacacttcgtccagaggatgtctgcctgtgtcttcacattgccttcttttctgtctatagccaaatctgtccctgt

SEQ ID NO: 198213 - DNA, 674 bp, Homo sapiens
cttacttaatactagaagctgagcaatgaagaaagctgcatgacagacagatttattctggtgccatcaaagctgcaatataggtgaaaatccaatggaatgggctttggctattgagagaagaaagcagctgataactgagacaggcaaactttctgcaactgacaataaaggaaaagaatgtgacatgcatggacatgcataatacaaaactacagatactaccttcctagggatgtttggtctaaattaatttgaagtctaaagtagagaccacccaactggtgccactgggaagtggtttagcaattgtggaaaatccagagtatataattctacaggtagacagcttagaattgagtgaagagattcagcatcacctttgattttattatttctccaatgccagcagaaaagcacatctttgattttttaaatacaaatttttatcaaaaaacagcattcaaccccaattcagtctacttgacaacacagtttgaagttcttgatggcatatatttggcttcatttttaggtattctaatttaagacagtattggtttgcaaataaactcaaatactttgggggggattatggaaaagttttactcaattccagataccaaaggtcttggaggacactttgaaacaatttagcacgcctctactgtgcc

SEQ ID NO: 198214 - DNA, 305 bp, Homo sapiens
agcaacatactgtacatgagaattaaaacactagtttatggctataaactttaaaaatgatagtactgagaagggcattagaagaaagtggccaaatcagaaatctggaactgtgtcttccaaatttcagtcgttacatataatcatctttagatttctgttaattccttgtacctaatttctatatttttttgcccttgaaatttgacttgtttaaacaaaaacaaatagaaaggaaacactcaacactgaataaaatgttttaaaatttttgctacatagtgtttccagctaaagattatata

SEQ ID NO: 198215 - DNA, 176 bp, Homo sapiens
cgatactaaggagcaagccaagagattttttttttcccctgctaacttgctcatgattggtcttttgtggatatgtttacattggtgaataaagtcaaagtactttattcattttgcttcagtagtgtttttcatactgtggttgggctatattattgggtaatgaaatcaattta

SEQ ID NO: 198216 - DNA, 215 bp, Homo sapiens
tgtcttcacagtttatgcatttatccaacaaatttaagcatgtttgtgctatggactaactttatagatattatagttgagttttgtgatcaagtttggaaaacacatttaactagtggtcttctcaaaagcctttaatatactcctaacagaaatgaagtgtttctcgtattttttgaccagtaatccctgttcttcatgaagttttttttttt

SEQ ID NO: 198217 - DNA, 572 bp, Homo sapiens
taaggaatcagccaattcatatggtaatattattctacttcatgaatgactatgttcacgcagcataggaagattcagaattgaaaagatctataggcatttagagaatatgggaggaaatgaagaaagagagaagtcagcactatcacaaggtccatgtagggagaaggaatccaggtgcccacaaagagagaatcctggacaggaatttgaggttttgccatctccatcaagctacaccatcacctgggctttacttgtctcatttgaacaacaaatttgtttaactgaatggtctgtaggtctttcagctgtaatagagctggtatttcctgattcaaacagcaggcagatagagagcttaagagaaaaccaccccaggttttatctacaagggccaattaaagacaaattagagtcgtagaaagtctttcaccccttccgaagtactctgaacatttccacactcttgagactcttgatatatatagtctggaagtgactgaaggtttaaacctttatttgctgttaacacatactgcctaagaaataaaatgatccctaagtatgat

SEQ ID NO: 198218 - DNA, 423 bp, Homo sapiens
tcagattgccaactataagaacctaagaagtaagctccatttgcctttttatttttgtattcaatacccaagggagaggagaaagagaagatgataaagaggggaaggaagagaaagagaaggagaaggaggagaaaagaaaagctatgtttctacatcagaactcatcctaaatcagtctgaatgtcttctcttacttttgctaatattcattaacaacattccaaagcatactatgatcagcaacaaggcaagaataattaatacttcattattttatttaatactggcattttccaatataatttcaggccaagaagtattagtacataaagaatggaaagtactagtacataaagaatggattacatgctttcatataccatagcaaaggacaggctttcataaagattttgtgtgtat

SEQ ID NO: 198219 - DNA, 371 bp, Homo sapiens
gttctaggggctcagtaggatgcctgtggctgttgccatcctagcctccacatgtggccatgggggttctcgaccattactgttgcctggggtgctatccagcagccatgggagtgggaggtgggggctgcagtaagacagggagaaaagaaaagagaaaatagcctttgtttcatccttctcgtttgccagtcacatgactgttggccagtttacagtttgttcaactggaatgggaaaaaattacacagaacttggtttctgtctgaggatggcacttaaaacacacatgactgcttacaaatctagaaatggacacgggagcctgaagtaccggcaactgtgccaagcccctcctttcctctgttgta

SEQ ID NO: 198220 - DNA, 513 bp, Homo sapiens
cagccatggcaaaaccccatctctactaaaaatacaaaaattagccaggcatggtagcgggtgcctgtatctcagctactcgggaggctgaggcaggagaatctcttgaacccaggaggtggtggttgcagtgagccaagatcgcaccactgcactccagcctcggctacagagtgagactgtctcaaaataaataaatagattaattaattaattaatttgcactggagtcaaggaacctcttggaaagaaaaaacaaattgagaactaactcttccattctgagactccatgctaccaggacttctattcaggaggtcccctgactgaatctgatgacagaacaagaccctgttccagagaggagctcacccaaagggaagggtcactaggaaagcagagcagggtccaggggcttggcaggaggtggaggaggagggtggtggtcagttctggtatcttccagggccctgcagggcagcctctctggactggaagcagcccacaaaagca

SEQ ID NO: 198221 - DNA, 398 bp, Homo sapiens
ttatttattttgagacaaggcttgttctatcacccagagtagagtgcagtagcatgaacatggcttactgcagcctcaacccagtggactcaaggcatcctcctacctcagccttccatgtagctgggaccacaggtgtgtgccatcatgcccaggtaattttttgatttttgtataaatgaggtcttactttgttgcctaggctggtcttgaactcctgaactcatgtgatcctcccgccttggtctcccaaagtgttgggattatagacatgagccactgtgcctggctggagctgtgttttaataaaactttatttacaacaacaggcagaaggccagatttggcctgtaagtcatggcttattgacccattttctagggcagcttccactaact

SEQ ID NO: 198222 - DNA, 768 bp, Homo sapiens
ctttatatcacactctctcttatgggaaccatgtgctttacccaaagtggactattcctcatttctaggtacatttggaattttctgtatactcacttaagttactctcttctcatgaatacctgttagtctccatattctcccagggaaaactctttccattttataaccagtaaaacatcatgactcttcacggtctccttcaacaagggaaaaaggcaaagatttttttccaattccaataacactatgatgtacctttctagcacctcttacaatattcttgcttttactatcatcgtatttatgtaggatacttacctttatttatctattaaatttgaagccaggtcttgttaattcgatgattctcagcaggcacagtgtgatactcttaaagaccctcctaggaactttttaaaaaacatttactcactagcaacgctatagttctctacttcctaagaaagtatgctgttttgaggctgttagatatcattagctacacaaatggtgatcttcagtataatcagagacaattctgccactcttaagtatgtagagttagtttttttaaattttagtgcaatattaattacacgcttaaaaattatcatgtacttcttttagaaaacagaaaataccactaccagtttctgccatttcaagaatggaaaatgctcacattaggaaacacaaaccacaactcagtcctctaatggcccttaagcaacttttaaatgtgggcaaatacaccattcatgctta

SEQ ID NO: 198223 - DNA, 504 bp, Homo sapiens
ccaccccacccccccataactgggactacaggtgtgcgtcaccacacctggataatttttgtatatttgtagatatggagtctcaccatgttgcccaggttggtctggaactcttgatctcaagcaatccacctgccttggcctcccaagggtgctgccaatgcacccagcatgttgctgattttctttgagacatagtggcaaagaaaattttctcagctctgtcttaccaccgtgaaagactgccttcagagtgtttcagttacctcttcccatcaatatgagaaaagatgagtgtgaggaataggtagagggaaaaattaaagttttttgtgtagcatgaattatgggaggggattatataggtaattctagcatgcacatagctcttgtataggcattgtgccagtaggtaggtattagagtagacatggttctttgtagtagccttttataaaattgacttgctttggtgaaacagctcctggcatcattcagacattt

SEQ ID NO: 198224 - DNA, 404 bp, Homo sapiens
cttgggggtcttctctatcattctgctgctgggggcttgggagagaaagctccccctccatattccccaccccaactgctcagccctcacctggcacagagaggcttcaggtactctcagacccagctactcaataattgcctctgtgagtgttcagccagttctaggaggtcttaagctgctaactggtagtcccctagaaaagggacctagaggttctctcaagtcctgtgaaattttcccatcttcctaaaaatccccatctcacagtgctgcttgagaaaggttgaacctagattggcacccagcaggtgcccagtcaatgttggatcctttctttgccttgtctgtgactgtccctctgtcagcctaagaatgtggttccttttagttaaagagattct

SEQ ID NO: 198225 - DNA, 445 bp, Homo sapiens
cagcttcatgtatattcatacttatcagatagggtcaacgcctcttagtttggtttgaaatctcactgggaaatgtacttcttcctttgatagatttatcaggtgatatagtccaaccattcctgaaacaatacatgaaaaaaaatgttaatagttacctattaactataaatataactaaaaatagttaatagttaatactgaccttgaggtatatattgtctgtttcataataacaacaggcaaaattgcaaaacacattattaaagggatgatttgtgggttcatagattaagtatctgtaaataccacagccctacatgtgtttactaaatacaagccatgtaaggataaccttcctttgacagggagatgtgacagggactggggctccagcaaagactttccacgtttttaatgtctttctgggtagctttaggggcat

SEQ ID NO: 198226 - DNA, 454 bp, Homo sapiens
aagtgaattataattgcctgccacaggactgtgtggcgctgcctgtgacagcagcaaatggggaaaataggaaggcattagagaaggtctgttgtactgatgaagtggaattcctagaacacactgtgctataaaatgagatttggctccacagtgctgggagcaaacaatggactcaatagtacccggccttggttgctgggcatattctagctcctttagtcagagcagcctttcattcaaaggagcaggagccacactagagaatgggaaagagggggtggattcctggtccagagaaatcctgagagtgagatgttaggggggaaaaaaccaacatcctttcaaccaggatgaatagtaccatgataagatagcttctcacactccatacgatacagcaaccatgtataccattttttaaaataagtaattatagaaatgactgataaaa

SEQ ID NO: 198227 - DNA, 305 bp, Homo sapiens
tgtaacatttgtattggtgccttaccaataagaattattttgtctgacatgtggacataggctcttatttacaggactttttcacaggttgaaaattgctaagtaactacccttactttttaaaagttgaaaattttcctgactcttcaagagcttccctgaatattttagaaaaagataatataaataaaaacacacatttcataattaaatacaaaccttttgtgtcagctctaaaaactatcagttgactggttggggggaaggaaatttagcataaaggaaatgaaggagcagcaaaaaaa

SEQ ID NO: 198228 - DNA, 883 bp, Homo sapiens
tcacatcaataaatatatgataggatattttacatttgatgtatcctgaagattaattcaacaaatgtttagtgagtaggcttgttgtaggtgctgggaattcagcagtgaacaaaacaaagtctctgcctcatggagctcatattatagtagggaagactgtcaataagcaatatacacattactaaatgatagataatgcccagtaatgtggcaagttttatggaaaaataaatcaggataaaaggataagagtgatatggggattctcttagttagggtagataaggaaggcctcttagctaaggaggcacataaatatctgatcatttaatgagagaaggagcaacatggatttctagagggaaactatcctagaagagaagcagcaagtgcagtgaccctgaaatggggatttgtttggcatggagaaagggcaagaccagtgtggctggagcacagcaaatgagagaaattagatggaaatcaaggcagatcatgtatcatctggtaaggtttggattttattgggaagtgacagaatatgacgaagggttgagagcaaaggagtagctttgctgtaaaaggatcactgtgggctgggagcggtggctcacacctgtaatcccatcactttgggaggccgaggcaggcggatcacttgaggttagaagttcgagaccagcctggtcaacatggtgaaacctcatctctactaaaaatacaaaaaaaattagctgggcattgtgacgggcgcctgtaatcccagctactcgggaggctgaggtaggagaatcacttgaacctgggaggtggaggttgcagtgagccaagattgtgccactacactcaagcctgggcaacagagtgaaactgcatctca

SEQ ID NO: 198229 - DNA, 330 bp, Homo sapiens
aaacagcagctgtacatattataacttggaaagcgtaagaccttccaggtgttggagtgttgggacgcttaggaggcattcttgctgcccagcgctgtggaggttgcaggaggctttgcattcccttccacttagggtggctggccgcgcagattcctttagtgtagcctgctccgaacttgccgctctccgcggccgtcgacagcactgcgaccagaaaaccaaacctttttgtcctaactttttttttttttccaacgtggtgtttaagaacaccgcttcacccccgagaactcattaattgaggtgtttcagtggttaacagcaaga

SEQ ID NO: 198230 - DNA, 330 bp, Homo sapiens
tagaacaatataatgacctccgcaccatatcaggatagctacaaaaagcctgcattttctaagccctgaagttctaagccatgttatatttgtgcataaagaaattcaactggagtttttattggaattaggataaatattcaaatcaatttgggtaggactgtcatcttttacaatgtcttcatattgatgactatagaatatattactccatttaatcaagtcgtttatgtcaataaaatcttacagttttcttcatgtaacttctacatatttctaattaagaatattcctacagattttatctggctattttgttattgttattgc

SEQ ID NO: 198231 - DNA, 105 bp, Homo sapiens
tggccctgcactctgtttattaaatgcctacaaattattaaaaaccacagatgcttataatatttactattttttacgtgcaagaaaagggatggtaaaaatttg

SEQ ID NO: 198232 - DNA, 476 bp, Homo sapiens
ccaatcccttccaatagtgttctttttcaggtttcatttctgacaccatttattccaaccgaaataacaaacatttggagaggaggtggtgtaaattattcaactcggaaaatataaatgcaaacatactaaataaattcattgggaaattagtccagttgatatatgtggtcatgaatataaatgaagaccatgcctcatggttgttggttttgtcccagccatgttcccttattctgtaggcatggaacagggagacggttgccttcatctcatacatgtttgcagaaagaaagtgggccaagggagtgaggtagtgcaggggagagatgataattaaccacggaatctgcactaggtaaagaaacatgcaagagcatgtcaggggtggtggctgtaaaaaaatgatagcgtcaataaactggaagaccttatcatatctgaagaaatattggggttattgaaaaggtgaactg

SEQ ID NO: 198233 - DNA, 579 bp, Homo sapiens
ctatttcccagtgattctcaaacttgggtaaaggaaaaggattattgggtgggattacaagcatgagccaccgcacccggcctctgagggctttttctattacacatatttgacaggggcacaaatatataaaaatatacataaatgactaaagagggagaaaatctggaagaatgcacattcataatttacgacagcacagcttcgtgtctaacactgctttctttctctctgtgagcctctcaaatggtggccatgggtaggggtggagtctggcaggaagagttcagcagcgggggagagggaaagtgaaatggaggcaggactgaatcacccgatgtctgctctgtagggctctgagtgaccattcacggctctcagaggctggtgctggttgtgaccagtgaaggacatgaaaaaacacagacagggccctgaatttccactgagctcacttgaagggactggccttaattctttcccactctccccggggtgatggcagaatggcgaggatgggaaggtagttgtttttctgacatccttatttggcaaaataaaaatctgacaattgtgtgg

SEQ ID NO: 198234 - DNA, 276 bp, Homo sapiens
aaagcattttatcaactatgaagcaataaacaaatgtacgttttgtttatagatttcttacattggtttttcggaaacgaatttcttgtagcactttgggaggctgaggcaggtggatcacatgaaaccagcctgggcaacatggcaaaaccctgtctctacaaaaaacacaaacattaggcatggcgatgtgtacctgtagtcctagcctcttgggaggctgagctgggaaatggaggttgcagttagctgagattgtgctactgtactccagcc

SEQ ID NO: 198235 - DNA, 413 bp, Homo sapiens
tatctcacatctgttctatagaagtcattagaaaaaaactgtttccatcaaccagtaggcatttaccaagttgttctgcaaggtacttggtggtggtagtgtatacaaatgaatataaaatgagatcctttcctgaagttaggtaaagaagattcgtgtacatgacagaaaattagagactggcttttaaataaaataggagataagagaaagatgattgtgaattggtgtggttacagaagtttcaacaaagtagaactatctttaaggataggtaaaatttaggcatggagaagggaacaagatgaatagaggcatgaaaattagagtgtgctttgtaaataagtgaacaagagttttcacatgttggtattgtctatgaggaataaaagtcggttcaaatatacagtgta

SEQ ID NO: 198236 - DNA, 359 bp, Homo sapiens
agtcagagaaatgcagttagttctgaaccatgatgagatacctttattcacttatcaggcagacaaaaatctgtatgaaattatgtgtaggaaactcagtcatgctctttggcaaatttacatcacatcttaagtgattgtcactcagttcaaaaaagtcttaattaatgggtgtaacctttcctctctggtttaaaaaggtcagaaaaccatcacctgtatttattgaaaataagtagctcattcttgaaaagtacatctggatgatgagaagtagaaagaacagcaaattaaccactgcttccagcttctgattttttcttttacttgactcttcacagttgtgagtcatctacttt

SEQ ID NO: 198237 - DNA, 314 bp, Homo sapiens
ttctagaacattctagaaaaatattggtgaggctacagggcctgggtgatacctatgaagagtactcactcaaaggcaaagttggactaattcaccatatctcacctggggctacaactagaacattttattgttattgattttatgtttttgtttctgcatgaagctgctacacagagaagtgattctcacattggagagcactgactcccagaattttaccatgttactaagatgtttttaacatgatctacatggatgctgtttctttgccttccgaggctgattttactttggctttgggttaacttcca

SEQ ID NO: 198238 - DNA, 281 bp, Homo sapiens
tataattttagatattgttaagtgctatgaagaaaataaggcagaatttgtaaagccagccagaacattccagagatagtaggactgctgcaaatagaagagtgtaaatctaaaccctgtaaagcctgtgactagaagagtgaaaatcacttaataggaagcagctgtgtgttccatgctgttcctcatctgctgtgaacatctgggccgattcctaagacatacaacacttggacatgccatccaacatgcaatctttatttctcagcagagtttctggc

SEQ ID NO: 198239 - DNA, 112 bp, Homo sapiens
catcataaagcacctgcagtgtgccaggacccactctgacaactgtgataaaataaataaagccaactgtgataattgctagttagggtgcccaaagctaaggctggtcact

SEQ ID NO: 198240 - DNA, 576 bp, Homo sapiens
tggatggatcacctgaggtcaggagttcgagaccaacctgaccaacatggtgaaaccctgtctctgctaaaaatacaacaattagcctggcgtggtggcaggcacctgtaatcccagctacttgggaggctgaggcaggagaatcacttgaacccagggagaggcggggtgaaggctgcagtcagccaagattgcaccactgccctccagcctgggctacagagtgagattctgtctcaaagaaaacaaacaaacaaacaaaaatgtttttaataaaatgatttctgcccaaaggggaacgatcatggaaatttaaagctaactccatttggctgcttttaaattacaagagataatctcccatactttttttttttcagtgaagaaaaaaaatatccaaatctcctttggatagcagataaattaaaattataaaacctgaactgcggcttttaccagtggccagttgccatcaggaaagaaaattatccactgaataatgagggagaaaaaaacctacaaaattttgcatgtgtgatcactaaacaggttttgcacatgaccagcaaaagtagg

SEQ ID NO: 198241 - DNA, 447 bp, Homo sapiens
agtaatgtcactagcataagcagatgccagcaaaatgtatcatatcagtcacacataagtaaattgctataggacccaagaagtaaattgtgatgaaaatttccttctgagggaaatatgatctcaaatgacatgttttttagtgttcaacttttattttagatgcagggggcacatgtacaagcttgttacatgggtatattgtacccaggtagtgagcatagtacctaatagtagttttcaagttacattttatatttgtaagtagaatatttgattttattttgtgacttctactttatagaatagttttagatttatagaaaaattgtgaagacagtagagagaatttccatgaaccccatactccatgctgattgtttcctttgctgtgcagaagcttttatacttgatgtcatcccttttgttcatttttgctttggttac

SEQ ID NO: 198242 - DNA, 561 bp, Homo sapiens
tccttaccaagatattcaagcccctccacgatcattctccaatttgccttattaacctcatgttcccactcgagccctagaagttaaccagaaatttacttactttcccactcaccaccacccctgaacctggactcatttttctgcaactatagatctgctgatatgatttccatgtctgtaatgccatttaattattcattcatttaataaacactttcaaattcccaactatatgccaaactctgtattaagcccctactatgtatcaaacacttgagctacaaaggtaaggcatatatcatctatgcccttaaaaacctcacaatcttttgtatttttttttgagatggagtctcactctgtcgccatgctggaatgcagtggcgcgatctcggctcactgcaacctctgactccctggttcaagcgattctcctgcctcagcctcccgagtagctgggattacaggcacacaccaccatgcccagctaaccaaggcaggcggatcaccaggtcaggagatcgagaccatcctggccaacatggggaaatcccctct

SEQ ID NO: 198243 - DNA, 403 bp, Homo sapiens
taaaaaagcttgctgaacaccaccctcagtgtttgattcaagaggccagaggtagggcctcagcacttgcatttctagcaagtttctagatgatagtgatgctacaattccgtcactactctgaaaaccactgaaagcccctggagcttactggaacgtgtgcgtgaacagtgtgaatgagttaccccctcacactatagcaagactatggtggaattcactgagaggcaaactgcaaaatctcagggagagattctgtacccaaatgttgacttccattacctgagtgaatgtattttgaactgtcactttcaaaatgttttatctgaacagcagcacagcagcaaaagactctgaacaaggtcaaggatgagcggcacagtgcataactcacacttcaaca

SEQ ID NO: 198244 - DNA, 1188 bp, Homo sapiens
ttcatgctggctgccatttctgagagtaaattgtgtctcaggaacttcacatgcatcatcttccattctcacaactgtcctaagaaatagatttgattcctaatgtgcagatgagtggttgagactcagtgagacaacacaccttctccaggatcccacggtaaatacgtggtagagctcagatgctatcacaaagcccagtaaggcaggaaagcaggaggcataaaagggaggacatctggggctcaatagaagtggggaaccccaagagggcccatcaacccctcccagcagcaggaaagatggttttcagaacccaagtccattcattctctttcctgtgctccttcccacggctttcagctcaaagacacaattggctctttaagaccaagagggagcaatactctcattaaaaacactcacttttcctctagctcatggccctccacatgacttctctagctcatggccctccagacagaacaaaggggtcccaaaatgcctagcgtggaatcacagaatggcccaggcttgaaccatctctattcccagagatagtcacagagatgcacgctatgggacagtcttggcagggtctttgaggaggaagtggattcagcaggatgatggggctggcatcgtggatgccagcaacgtggatgcctgttggtggtgtgctgatgctacacacatgcattcacacatatatgcagacacatgtacacacacatgcacacacacactaaaaacacccacagacatgcatgcttttacatttatttatgataggtgtgccccagagaggagtatcttttaccagttgctctggttgtttctgaattctggaagagtctggacagagaaattcccagcatatcctgcatctcattcttggtgtgaagcaggaacacgcactcattcctatttggctatagtcttcacagctttctactgtttcttttaaaagaaggaaactaaaataatataattcaatgttgtccagtcagctttgattactgtcggtccctgtgtgtgaagtgctgtgctggcttgaacgggacatgcaaaaatcaagaaggcaaggtccagtccttaaagccctagagcaagggttgacaaaccacagtacttgggctaaacccagcccaccacctgtttttgcaaataaagttttattggaacaca

SEQ ID NO: 198245 - DNA, 481 bp, Homo sapiens
atagctggtaaagcactctttctgggtgtgtctgtaagagtgtttctggaagagattagcatttgcatgggtagactgagtaaagaagacctgttctcaccaagtaagtgggcatcatccaatccactgagagcccagattgaacaaaaacacaagagaaattcccagcatatcctgcatctcattcttggtgtgaagcaggaacacgcactcattcctatttggctatagtcttcacagctttctactgtttcttttaaaagaaggaaactaaaataatataattcaatgttgtccagtcagctttgattactgtcggtccctgtgtgtgaagtgctgtgctggcttgaacgggacatgcaaaaatcaagaaggcaaggtccagtccttaaagccctagagcaagggttgacaaaccacagtacttgggctaaacccagcccaccacctgtttttgcaaataaagttttattggaacaca

SEQ ID NO: 198246 - DNA, 460 bp, Homo sapiens
agttaaaatatcccttatgggaaacgaagggatgggccaaattaaaggaataggttgggccagttaactgcagcaggaacatgcccttaagacacagatcactcatgctattgtttgtggcttaagaatgcctttaagtggttttccaccctgggcgggccaggtgttccttgccctcattcccataaacccacaaccttccagcttgggtgctaagggcattatgaacatgttatggtgctgcagagattttgtttatggccagtctcagggccagtttatgaccagattttgggggacttgctcccaacagtctccttctggaggatgactgggtagcagcccagggtagttttacagtttcgtgttttacaccagtgctgggcaccctgggtagttacttgattataattccttaaacagagttttccaaattaaaatattacctgttttttataga

SEQ ID NO: 198247 - DNA, 424 bp, Homo sapiens
gcaactgggaataattgaaattttctgccattagctattcccagcagagtattctgagtcacatagaaagtgtcagaagcatataaattactgatacattttttaatcccatattccctcagggttggcgtttttctctcttgaaagtttcccccttaaggctgggcgtggtggcttacgcctgtaatcccagcactttgggaggccgaggcaggcagatcaagaagtcaggagatccagaccatcctggttaatacggtgaaaccctgtctctactaaaaatacaaaaaattagccacgcgtggtggcgggcgcctgtagtcccagctactagggaggctgaggcaggagaatggcgtgaacccgggaggcggagcttgcagcgagctgagatctcgccactgcactccagcctgggcgacag

SEQ ID NO: 198248 - DNA, 431 bp, Homo sapiens
ctcaggaccagaagtataattcatgagtgaattatactaaaaatttaaagaagaattaatgtcaatccttttcaaactcttccaaaaatttgaagtggaggtaacaccttcaaactcctttcatgggaccagcattatccttacaccaaagacagataaggacaccgcaagaaaaaaaattagagaccaatatccctgatgaacattgatgcaacaatcctcaacaaaatactagcaaatctaatccagtgccacattaaaaggagtatataccccataatcaagtgggatttattcctgggatgtaagcatggttcaacatatggaaatccaaaaatgtcattctccacattaacagaacgaaaggccaaaaccatatgattatctcagtaaaagataaaatgttcaacaaagttcaatatcctttcaag

SEQ ID NO: 198249 - DNA, 276 bp, Homo sapiens
cagggtgtctagggcctgcgctgcacaacatcagtctttgaacttggtattttggggactttctgaatccaaggctgttgaggaacatggaagagttcttatcaaaggtggttgactaagccaagtgtcttcccaacattcactttggtgtctccacgtgtagcagagaaaggaagaccagcaaattgtgatgtagcaaaaattttttttaaaacaccgtgggttgaacttctcataccttcttaacttcccaaagccccttttctgtctctgtta

SEQ ID NO: 198250 - DNA, 518 bp, Homo sapiens
cagtggcttacggctgtaatcccagcactttgggaggcccagacaggcagatctcctgaggtcaggagttcgagaccactccggccaacgtggtgagacctccgtctctactaaaaatacaaaaattagccgggcgtggtggtggctgcctgtaatcccaggtactcaggcgactgaggtaggagaatcacttgagcccaggaggcggaggttgcggtaagccaagatcgcgccacggcactccagcctaggcaacagagcaagactccatctcaaaaaaaaaaaaaaaatgctgaattcaggttgtggtgttttgcattggatgaaaattcagttttacacaggtaggtaggtagaaaagggaggaatattttgattcgggtaagtgtgaataattttctttgatactataccaaagtcatagtttcttaaagcttagctgggattacaggtgtgagccagtgcacctggccttggccctttctctttttatttcctcgcagttctctccctttttt

SEQ ID NO: 198251 - DNA, 345 bp, Homo sapiens
gactgagacagcaaaggagatgtaggtttgtaaaaggaagggcatgcctgcagggaacagaatgagcaaagccgcacacatcacgggtcccctgttgactggcctagcctcctgcagcccaggtgccagctgatctgggcccactttaccaacatcatctgtgatcgttgatgctattttaggttcttagcttcaattctcagtgacagtggggagcgggccttctcaaggttaaagaggccagcctggaaagcgtaccaggactcccgcactgcagaaggccatcctatccctgtactcgcatttcctgtcggtgctcggcagagccacactcttcccggccct

SEQ ID NO: 198252 - DNA, 392 bp, Homo sapiens
agaaaggagagtcattttgagagatatcagcatgacttttggtgatcttaactagaggaagggacagattctgcagtagacaatgcttttgggtctggcttcttggtagacaccccaggatcaggtctaaggtatgttacccatgtattcccataacagcatcatttctctgtgctttgagtttcaccatttataaacctgcttaaagagcttatcttcttcctaatcataccttgagacaaaatgcactttataccagtaaagtatcatgagatgttcgtttggaagccgttatgccaaaagagcaagcatttacagccttgctttttatttaccaagtgtattttacactggaaaaggtttcaatatggccccatatagtatttattttg

SEQ ID NO: 198253 - DNA, 311 bp, Homo sapiens
gggaggggaactacacacaatggggcctcgtagaggggaaggaggagggaaagcatcaggataaacagctaatgcgtatggggcttaataactaggtgatgggttgataggtgcagcaaatcactatggcacacgtttacctgtgtaacaaatctgcacgtcctggacatgtaccccagaacataaaattttaaaacacgtacagtcatttttgagacatgcaaccccaaattcatcaagataaaaatgtgtctggatacatgaattccaggaagaagtggctttctaatatattggcttggaaaaaatat

SEQ ID NO: 198254 - DNA, 496 bp, Homo sapiens
gcctgcaggtgtggccgagtagggtgggggcattctcaggaatgccactggagtagcactgggggctcaggtgaggtggctgcccccagggctccgcagcagaccttgtcccagggctgggggaggatctgagaccccttccccagggccaggagtgcccctacttctctcgggctgccactgacccctgcccccgacccacctcctctggggctccatcaccctggagctgggtgggcaggggctctggatcttggattgtccctggagggcagccagagcctggtgggacagaggctcctccacggccctcccctggcgagccacctccttttaccctcccctccactcccagactgggcagctccctcctgtggattcaggacaggacgtgtttgggggtggggtgccgtctgacctgttgcagggaggaggactacgtcacgggcgggtgcccgaaagatgcccagtaaataggagtaagaaatgaatgatg

SEQ ID NO: 198255 - DNA, 418 bp, Homo sapiens
catgctattccatagttatagcccatgttaataggagggactgtggtgctgcaacaagagctcttgaaagaaaactaaaagaattgagttataaatctgtcactgagactgtgaagtttaatcctagaagaaagttttgtcacttctcagggcctcccatttcctcacctataaataaagtgaggatatgagactcaagtatttcaatagggatctactggcatttgaggaggcacaataatttcttatataggactgcccctggcatcacagaaatttagcatttctgacttcaggcaccaaaagcctacaactctttccagttcttataataactgtatttcccaatgtccctatgcactacctagcagaaaggagtggcttggttgacagccactggtagatgatctcaagttct

SEQ ID NO: 198256 - DNA, 592 bp, Homo sapiens
ataactggtttctgcctcctattgccagtcaattgaattagagttccccaaacttgcttcctgggtctatctactgagattttgctttggtcagtttgaggggattcctataaacttgtgtttttactgcataaccccagaaagactgttcttgagcaccaagagttatgatttttaaaattatggttgcaagtttgtcagggaaaaggtggtaccttgtttgaagttgcatgttagtattgtagtggacaaattttctaaaactttcttataggactgtatatcctgctttgtaaactttatgttcaggttctttgtctttctcaattgatattttatcattcatattgatttataatgtcttcttttatcagatatattaaccttttcgtaagacatatttgtaaattgatttccagctcatttgccttttaaattaggctgtattcttcttggatatatggaatattcttatatatgtagataactttcatctgtgatttctttcactgcttttaaacttagaaagttcactctcatccagaatttaattattatttacacacttcctttttattaaaaaacatttttg

SEQ ID NO: 198257 - DNA, 522 bp, Homo sapiens
ttagaagcaagattgggtcggttaagttagatctctttcactgtctcagtcataattttgcaaaagcggtttcacaagcagtcaataccaggagcctctgaagaccaccatagcagtcctcagtgccaggcaaatccactaaaatagaaacaccaggctttgccaagaagggaaaacaaaaagaaaaacaaaacaactttatcgcacatttcattagaatttcagggacaggctgggtgtggtggctcacaactgtaatcccagcaatttgggaggcccaggtgggtagatcactttgaggccaggagatcaagaccagcctggcctcccaaagtgctgggattacaggggtgagccacgaggcccagcccataatttctaatctcgtggctaatgttagtcctccaaaggcaacctagtccccaggcaagaaggaagtctgccttgggaaagggctgttaacatctttgttttaaactataaaataaaatataaactaagcttctcccaaagttagttcag

SEQ ID NO: 198258 - DNA, 470 bp, Homo sapiens
tatctgctgggcctgtggcaaccatttcaaaatatgtgaatgaaatatatgtgggggtaaactatttttatttacttccctaaagaagggatggtgttctctcgggaattctgtgcatagagagcctgtggcttaggcactttgatttatgtatatctcttcctgtgattggctatctagggactgctatctccagcaaatcttctaaatgtctgccatgtagaattcctttctcatctttctgtctcacccccttatctagctgcttctctaaccctagagtgacactgcactccccacaatctcctatgtcctgaatattttaccccatcctaaactccatctctaacacagatgcactttcttgtgctgcctactgcattgtacatcttccccttagttcccatgatgcaactctgccctaccccagaaaatgtaatttaattggtctgggataaaacctgggacac

SEQ ID NO: 198259 - DNA, 487 bp, Homo sapiens
actcagtaataagagaacaacttgatttcaagatgggcttaagatttgacagatacttcagcaaagaagatatatgagtagcaattaaacacatgaaaaaatgatcaacataattcatcattggggagatgctaattaaaaccacaatagataacactacacacttgtcagaatggctaaaatttaaaaaacaaataccaaggactgataagaatgtgggacaactggaacactcttacattgctttttggaaagcagcttgacaatgtcttataaatgtgtcatttgaccaagcaatcccacttctgggtatttacccaagtgaaataaaaacttatcattattcacacaaaaacctgtatggaatgtttgtaataaccttatgtataacctccaaagactggaaacaaccatcatgtcttccatctggtgaatgaatacatgtagtacatggcatatccatgcaataaaatactgatatgcttgg

SEQ ID NO: 198260 - DNA, 737 bp, Homo sapiens
ttcattctggattctttggacgttacattgtattggctctgggttctgcctcctctggagaatggggagttttcttctcacaggcagttcagtacctggcagtcctccttgatcctgaggtggcttggtgccaggctttctaatgattttttatttgcccttagccctggttgtggatccttaattctcaaggatttagaatctcttctgggcgtcactggaagccttgacattctcctccccacctctagttggttgagcttgagcctcagatgctgtcctggccctgggcagctggggagcccctgcagccttccagcggtccctttgtgccgagcgcaggctcttcagtggtgcttcagtttagattcagctgtagatttgcgggtagtccgtccgcatatttcgtggttttccctctgtggtttctttctcaggcgggctttccctcacattctggttgctctggcaggccgggaccccagcccctgcagtgcaggaaggtgcgccgtctgtggttaaatgcgcgtcttacctgcaggcttctcggtgtcaggggttgtgcttgttttattgctgattgcgtcagctgttctccagtgccctcaagcagttttaaaaaatattttatccagagttcatgattattatcagccaagggttagtccaatgcacccctcccttgtttcatagatgctccttttgaccttttcaaataaatatggatggcaagctca

SEQ ID NO: 198261 - DNA, 433 bp, Homo sapiens
ccgatatcatctccgcttacaataagtggtctccatacactgtgcattgtctttgttttgttttgttttgttcttccatttatcattaccattaattgatactacctggaaatagtgtcccgaggagcaattatttattttgttactatagtcttgaagattctgcctatcccccaacccccacctcctgtttagacagaatgtccaagagaaggggaaataattgcatcatctttttctcagttaacttttggcagtctcctgaatgcctgcccctagccaacaggcccagtggttccagcctctgtacagatgatttctagattattttgaatttaaatttatttctatcatgcctaaacatagtaatgaatagtgacatattttccaggaattttattttcggttgtctggtaattattttttgatgatt

SEQ ID NO: 198262 - DNA, 506 bp, Homo sapiens
tacagccattttcggtactggtgccatcacaactgctgatcgtttctgcaggattccagaaaataatgtatccatgatacagagtgtatacaagttttgcgattacgccttctgcgtaacagtcagtcccaccgcagtttaacccacaaggaattttctcttgtcctaaactattatggccttctttgtccgattgaacggaggtaacgaagtctcgtcttccgccagtcgtccgggcgaagccagtctggagccgctccggagcgcgcgttgtgattggctcttacattacttttctacctaattcgtatccttggggtgacagattttccccactacaaggaagactgggaagttctaagcaccgtcctttggcaggaaaaaacaaacaaaacaaaacaaaaaaacagaaggccgaatagacattggcaccactgtccatctacaagcatcaaaaataaaattgctggtggtggttagtagaataaaattataaaatctgaaaa

SEQ ID NO: 198263 - DNA, 496 bp, Homo sapiens
cttggagctggagatgaggggctgggcacccgtggaataggcatgaggccagaagagagtgacagcgagctccttgaggatgaggaggatgaagtgcctcctgaacctcagatcattgttggcatctgtgccatgaccaagaaatccaagtccaagccaatgactcaaatcctagagcgactctgcagatttgactacctgactgttgtcattctgggagaagatgtaatccttaatgaacctgtggaaaactggccatcctgccactgcctcatctctttccactccaaaggctttcctctggacaaagctgttgcttactccaagcttcgaaacccctttcttatcaatgatctggccatgcagtattacatccaagataggtataacttcctgttgaccagtgagatgggtggctttgggatcatgcgtgttcggggaacccactgtgagaggggcagagtcaaaccaacatgcctaatttttgtaccataat

SEQ ID NO: 198264 - DNA, 635 bp, Homo sapiens
aaaaggttggggactgctggactatacaatctctgtcacaaccactcagccactgtagcactaaagcagacacagacattgaatataaatatgtaaagcactaaacctggctgtgtttcagctagatttgcacataagcaatagtttgccaaccagatgagtagacaataggttagaccaggtaattagaagcgtgaactgggaagagtactcatattcaaaagatatttagcaggtatcatccagaagtattggtaactgaaaatgtgagattagtgtgaaggtgaagaactctaaaccctgacttcagtactttagcaattcactgaataggaaaggtaagaaaatgaaaagtattgggtcatgggaggaaggtcacattcagctcacattccactggccaagcaaatcccctgactaaggtggaagtctgtggggccaggaagaattcttctcttataggaaggcactgcaactcacatgacagtaagtgcagccatataatcttcttacaggtaagaataattacaggtagtgaataattaggaaaattactataatatacagttcagtccatctgactctaaatttcttgcctaaatgctaaggagatttgttggttttggcaccggtat

SEQ ID NO: 198265 - DNA, 133 bp, Homo sapiens
tgctgagattacaggcatgagccaccgcgcccggcctctatatttgttttattcttccctcccccatataaagatttttggtttgagagttaatttatagatctgatttttgagagttcagcatattatatgt

SEQ ID NO: 198266 - DNA, 125 bp, Homo sapiens
tgctgggattacaggtgtgagccactgcgcctggcctcttaatccacttctaagcacaggcactggtgctatgtctggttcactttctattctttgttcagattattaatatgtcatttgtgatt

SEQ ID NO: 198267 - DNA, 626 bp, Homo sapiens
tgaatataagcaactaaatattgtatattagcagtaaagacaaagtgccatgaagaaacagggaaagatggaatgaattcttcctataagcctggaatgcaattttagaggtagatatttgcgaaggaggataagggcttgacacaccaaggagcagaaatattattagtcaagccataagtgtatggcatgtttgcagaatgatgaagaatccagggagacaagagagaaagctggtgtctgagtcagcacagaatagagccccattaacttgatcctgtaagaaactcagcttttaattttaagtggggcagaatggatcagagggggaaaactgaagagagagagacttcctaaggaggtcactaggatctacacaagttaagataatatacagatgtcagaatccaggaaccaacatttcttctagtattctctattctattctgaagagccgttcagtgggtcaatgtattgagtgaaggagaaaaaagtccttataaaagccaaattttaacttttagaatcccaggctgttctactggtctgagaccactcaccaacatctaccccgccagtcttcctccacaatggaccaaagtgacctttctaagtataaatctgat

SEQ ID NO: 198268 - DNA, 583 bp, Homo sapiens
gaaaattatgtgaagacaaagggagaggacggccatcgacaagccaaggagagaggcctcagaagagactaacttgccaatactttaatctcagacttctagataagaggagacacaggcatttacagaggaaaactcatgtgaagacgagggaggagacagccatcaacaagcaaaggagagaggcctcagaagaaactaaccttgatcttacacttctagtctttagactttgagaacaaataaatttctgttagttaagccactcggcctgtggtatgttatggcagccctagcaaaccaatacactgtataacaggaaaaaaaaaatctagatctgggtcgggcacagtggctcatgcctgtaatcccggcactttgggaggccgaagggggtggatcaccagcctggccaacatggtgaaaccccatctctactaaaaatataaaaattagctgggtgtggtggcacgcacctgtaatcccagctacttgggaggctgaggcaggagaatcgcttgaacctgggaggcagaggttgcagtgagctgagatcgtgccattgcactccagcctgggcgac

SEQ ID NO: 198269 - DNA, 456 bp, Homo sapiens
cactcatggggagatagaagagtgttgcggtcacagcaatggcagagcagttttgtggctcaggctccttccccaattttgggtttccctgagagtcacatggctgggtgatctaaatcctcctggtcctggggcaggggtttgcctctgccaccctgcaggtgcagggccactgtcccactgtgctgctgttgtctggccacctgcagtcacagtgccggcatccaggacgccctccccctctcgctttgacatcaggagaggggctgcctccagagccttgggagaaggccactcctacggcccagagcggctgctttgttgtgccagcaagtgttccccaaaaggcagggacaatggccttactcacctgtgaaattctgttctggaccagcattgtccaacaggaatataacgagagacataaatttaaagttttgtactaaccacattaaa

SEQ ID NO: 198270 - DNA, 235 bp, Homo sapiens
atattttcagtttgccacaagtggctggagagctgcggcttaaatcccacaggaaaatcctgtgtcccagaaaaagtccaattcttgcctctactcatggagtctggtcaagagcctggaaaagagaaagaatccacctgtcagaagctgcctgggtggatcagggaaagtctgatgagaaaagattatgcacacatgtgggtttcataataaacatggaatattgacagttaaa

SEQ ID NO: 198271 - DNA, 304 bp, Homo sapiens
tgacatttctatactataagaacctcaatacagaatgagaattagtagcaacagattacaaaagatctcaaaataaagttctacaaactaacacttaaacaaaccctgtgaactactaccctgaaaaatgaagaagcacaaattcatagcaatatagtcccaaattagaaaattgcaaaacagtctaaacatttgcactaaacacataaatcactaccttttcaagtaagaaaagtatagtctagtcttaccttattgctgcaaaaggctggaataaaaaatactgacttatagaagcaacttt

SEQ ID NO: 198272 - DNA, 324 bp, Homo sapiens
catgtggcattgtgggtgctctgttgtcctgtgcttcctatagtggatgcctagcggtgtccctggcctctgctgactagatgccagtagaaccttgcttccccattcgtgaccatgaaaagtgtctctagaccttaccaaataaatgtgctctggaggtgtggaagagggcagaattgtctgggttgagaaccattgccttggcgtgagactgatgggaggtgcttttcaatctgttgctcccttagatgatcactgtttgaggtccttgttgatcattgtagatcatcattcatagatcatcgtcgcctttctatgattgaa

SEQ ID NO: 198273 - DNA, 483 bp, Homo sapiens
tggtaggtagagatgtccttattcttagaagatgcacgtcaaaatatgtaggaatgacacctgcaactcagtttaaaatggttcacaaagaaagtaaatacactaaaccaaattgttaacaacttgtgatctaatgaatggtaaatggtgtaaactgtattactttttaatatgcctatggcttttcaaatttctcaaaataaaatggaaaaagactgaatgaaagcctattttctaataaaaactgacatcgtatatttgaagaatatgagtagataataacagttacaatttccaataccatgttcaatgagttttagtcaccattttttcgtttctaatgaaatcaggatgttttcatcctaaaaggatgatgctaaacagtaagtgtaattctgtttttcagatggtacaaacaggaatttcttaattatataatgagtgaaagaacacaactgccttaccagattatcatgacattct

SEQ ID NO: 198274 - DNA, 369 bp, Homo sapiens
agccctcctgacccccacacagtggtaattcagccagctattcaggaccactggcgtaggggcatcccgaaacttatctcaacaaacacagctcctacccccaggcacgggcaccttaagtgtctctgcagagggccaggcaggagtaagcgctgacctccttggcatctccaacttggggccttttcttctggtccactaggcaacatcatgtccctcaacttttgtttggaaagcaaacgctttcatttatgctgttaacaggaggcagcagcaccccccgacacaccccaaattcccctaggattaacgaatggatctagactattaatactccaagtgtggtccatgggctggcaacatcagcac

SEQ ID NO: 198275 - DNA, 443 bp, Homo sapiens
ctggtcttgacctcatgatctgcccgcctcggcctcccaaagtgctgggattacaggcatgagccaccgcactcggctgagataaggcagtttttgtgaagaggacaccctgacatactggtgactggacgtaaagtgtgggttccagcccctctgagcaaactttgaagcccattttctggaataatggtagtacccaggaagtccctactcctgttctagggtgaccagcctacaccagcccttaagtaggtgctcagcctcacagaagtcttttagcacagagggtgctactattgggtcttttctgcatcactgctcaccatgacttgccattggagagaccaaatttttcccgtaaccttctgaatttaattcatatttgtcaaaagaagtttgttttgtttgtatctgtttagcataacacacctgttgaaaaggta

SEQ ID NO: 198276 - DNA, 236 bp, Homo sapiens
gaagccacgcgatcctcaaaaataagctgcacgtcttcgcaacattcgctgagtgaccccagaaataactgcattctgtcccctactacatgtggcatcgttattggtttttttaacccacaatcttccaaccattccacagctttattgcctgaaaccattaggtgaaatgggtggatccggttcaaaactgcctcctctcacaccctccaagtttcctatagggttaccgagtc

SEQ ID NO: 198277 - DNA, 593 bp, Homo sapiens
ccactaatacccgtgagcatcagagcagtaagagaattatatccatactttggtgatagcatttctaaaagcctgccttctctattattttgctgagcagaatttatattttccagatgtctcaaggataaccgttgtgagcattgtgatttacactaaaaacaaacaaaaacaacacgcctctctaagctttagtttccttgtcttaaaatggagatgagacattgccacccaattcacaggttgctgccaggatcaagtgagataattcttatggggtgctgcctctgtgcctggctaagtagttaagtcctgaatgaatgatggctgctagagtcaccattactatcatcatcctctggcctctccagctgtttacctctgcctgccttatccttttccttcatagcctttgcataatcgtagtttttgtctcacctgggttgtatctgtccttttcacacttgtgacaaatggtagacactcaataaatattgataaaatgaatccttgaatacatgactattttgttcttgttttaaatgaaaaggcattctccatttgttgctggctgaatgatttctttgtatata

SEQ ID NO: 198278 - DNA, 133 bp, Homo sapiens
ctagaacccagctgacttcccccacagccgttcttacctattttattactgtctggcataattaccagcatgtaaactccaagaaggtgcttcatcttattccagtgcctggcataggcatagggtgcatagt

SEQ ID NO: 198279 - DNA, 232 bp, Homo sapiens
atttcacatcttgtgcctaacagcagtacgcagaacagagtggcccttcttggggagactacacagtaaaccatcatgacataattaatcctttctagattactgcaactctactgatttgctgaaacagaataaaaacattgagaaggcataatatacatgcacacttttttaaaagcatttctcaattgcatgttaatgtctatcgacatgtaccaccccttcttctcaa

SEQ ID NO: 198280 - DNA, 425 bp, Homo sapiens
aaccagggagcaaggactgccttccattaagtgggcggggctagcaactgggccaaagatgcccaatggcccagagagaattcagagggggcctgtcaggtggaaggagccaggctggatgtgggtaggacctgctgtgcccatgtggccaggcaggcaaggcagatcaactcacgtgcagaccagaagccagcaaggcaggtcctgcaggggtgaagaagctgaggcccggggatcctgggtactccctcaagaaccttgagttaggagtggcctcacatcttcaggattcctggctctgttcgtttccttggctttctgaatttcttaagtatgcttagatgatgtacatcttacaagacaaggctggagggaatggcttgtatcaggtcccagagctggaaggtgggggtcccagaggccca

SEQ ID NO: 198281 - DNA, 187 bp, Homo sapiens
cctaaattactcactgccatgtcagtcttattgatcgagctaatgtcataaaaacatgtattatgggtagctgcccaactaccctgtcctctcttttagctctatggccatttatttcttatgctttatataccaactttcctttcctagttttgtgagatcctcaaggattagttcttgtcacttt

SEQ ID NO: 198282 - DNA, 463 bp, Homo sapiens
aattcttcttaatttattctatgaaaccagcattatcttgacttcaaaaccagataaggatacagtgaaaaaagaaaagagcaagccagtatctctgatgaacataaatgcaaaatcctcaacacagtactatcaaaccaacttcataaacacatcaaagagataatgcatcatgagcaagtgaaatttattgctgggatatgaggatggttcaacatcaaaaaatgtggtacagcacatcaacagaatgaaggacaaaaaccatatgatcatatcaatagatgcagaaaaagcatttgctaaaattctatttttcttcatgacaaaaactctcaataaattaggcctagaaggaatatacttctacataataaagtccccgtagagcaaacccatggctgacatactgaatggagaaaagaggaaagcctttcctttaagaagtggaataagacaaaggatg

SEQ ID NO: 198283 - DNA, 453 bp, Homo sapiens
atttttcaaaattagcaaatgagatgcaagacacttcacagaagaaatcattggtcaatatacatggtaaaatattctcaactttactaataacaggaatacctattatcatatctaaatgtttcacctatcagtttggcaaagatttgtttttaagaacacaatccttggccaggtgcggtggctcacacctgtaatcccagcactttgggaggctgaggcaggcagatcaccagaggtcgggatttcgagatcagtctggccaacatggtgaaaccctgtctctactaaatatacaaaattagctgggcatggtggcgcatctgtaatctgaactacttgggaggctgaggcaggagaatagcttgaacctgggaagcggaggttacagtgagctgggatcgcaccactgcactccagcctaggcgacagagtgagacttggtctccagca

SEQ ID NO: 198284 - DNA, 466 bp, Homo sapiens
cgtctctactaaaaatacgaaaaattagctggtgtggtggtgggtgcctgtagtcccagctactcgggaggctgaggcaggagaatggcgtgaacccgggaggcagagcttacagtgagccgagatcgtgccactgcactccagcctgggcgagagcgagactctgtctgaaaaaaaaaaaaaaatagaattacatatgtggcttgcagtatagttgtattagacggcactaccctatatgatagttactctcaaaaccaagtttcatcaatctagaccttactgttgacttcaggatccatagtcaactgtctttttcatcagtttcacattgttgttccgtaggcattttaaactgaataggtccaaagctgaatttattcatctctcatcatatctgttttgaaaaatggcccaaccatttcccttgatgctcaaactagaaaggtagaagatatttgaaacc

SEQ ID NO: 198285 - DNA, 279 bp, Homo sapiens
ctgggagttgatggagttgatctgctcaagtgctgctttactagcaaagcaataagtacatgccagaaagtcttctaaggttctcggtgcatactgggatctccactgtaggttccaggagaagacagagtagctgaaggggcaatctacctgcagcccccaggtaaagtccagcttagagcatgctttggagtgggactaagagtttggtcaggtgctagggtggagtcagatttcttcgtttctacctcaagacactctcaccagaagagaaggaag

SEQ ID NO: 198286 - DNA, 971 bp, Homo sapiens
ggagagagactcgagaggcctggaacaacgtcacagtgtggggctctcgctacgtggtggggcagaccccagtctacgtgccctatgagatccgagtccaggctgaaaatgacttcgggaagggccctgagccagagtccgtcatcggttactccggagaagatttacccagtgcccctaggcgtttccgagtccggcagcccaacctggagacaatcaacctggaatgggatcatcctgagcatccaaatgggatcatgattggatacactctcaaatatgtggcctttaacgggaccaaagtaggaaagcagatagtggaaaacttctctcccaatcagaccaagttcacggtgcaaagaacggaccccgtgtcacgctaccgctttaccctcagcgccaggacgcaggtgggctctggggaagccgtcacagaggagtcaccagcacccccgaatgaagcttacaccaacaaccaagcggacatcgccacccagggctggttcattgggcttatgtgcgccatcgccctcctggtgctgatcctgctcatcgtctgtttcatcaagaggagtcgcggcggcaagtacccagtacgagacacacagaaggatgttccccttggccctgaagaccccaaggaagaggatggctcatttgactatacgtgatgaggacaacaagccctgcagggcagtcagacatctctggacggcaccatccaagcagccaggagagtgacgacagcctggtggactatggcgcagggctgggcgaaggggtccagtcaactgacacgcacggttcccttccttcggggcagttaacacggtgtcaaaagcggaccacggacgtacacccagcagggccaagcgaacagctccgcaagccccacgttacctcgcccactgtctatctaccctctctggcctacggagcccacccaggcccagccaccaccttcgcatgcg

SEQ ID NO: 198287 - DNA, 813 bp, Homo sapiens
tttatttggctgactctctgtatcctctgctgtctccaaattcttgtgtcttctcctggaatatatttttggttaaacagcagaggaatgaaagaggtaccctacccccaccttcatcactcctacccctccaacctcaacagtttcccccacattactcccatttcttttctgagtgaagattttttggacaagactaggatcagccaccttccaacaactagaaccgtcctacaaccatttacctttcccctggcccctctctccaacttctcggagctccaaccctctccccctaccccaattctaccatccctgattctaagccacgcctcagagagacctgcagttcagaaaagcagagctgccaaaattgctggtgcctgtggacaagcaaaagctgttcacaggcatcaattattgtcagttttttcttgatgactctgaactgaccgaatcccttcctttttgcgcagtaagacagagactatgacactgggcaatgcatctccttttgcccagtaaaaccgcacgtggtttcctttccttcatcctcttcatccaccccatcagaaaggccacttgtttgtagcactgcctcctggattaggtttctctccctggtccctttcattcccttctccacataagactatgctcctcttcacaatttggaaacagctagagaaagcagcatgattgggcacagttgctgtgtatcagagacatgaacgtgcatttgaattatgagagccaggtcttttctcaataggcaggaggaaggcatcttttgacacctgtattttatctgct

SEQ ID NO: 198288 - DNA, 655 bp, Homo sapiens
atctttgaagtgaggattttacttctatgcaaattcttttctgtcagaggtgaatccctattttagtcatgaatatgatatttattcccctttcacaacaggaacttcatatatatgtatataagtgctgtgtggtgttctaaactatttcagtcttgcattagcattgtaatacataatgtagctaatctgctatgaatttgggaatgcattttatgacaaatttacagagctgtcagggaagatggaaagttgctgatttctcatataaaactgtcttcatagagcttgatgtgaatctcctgcacttctggaagcaggtatttaactcatccccaggaaatcaagcctgagagaagttctggtgagctgcttggctcctgtgttgagactggtctggtctcttagcatttgttttggcaaagaatgtttggatgtttatagaggacagatgagagctctggtcaagtatgagagctgttggtgggagggagaatccatttgggatcccatatgaaaagtcctgttaagggtgtgagcaggccttagaagagggtaatccaaagtggatctgtggattccttaggagctaagaggaaagaaaggccagagtggagtgcattcattcaggtcaaggcaattgcaggtgaaaaca

SEQ ID NO: 198289 - DNA, 771 bp, Homo sapiens
gctaaccctggccaggcaaggtggctcatgcatgtaatcccaacactttgggaggctgagttgggcagactgctcaagcccaggagcccaaggccagcgtgggcaacttggcaaggctgtgtctctgcaaaagaatacaaaaattagctggagtggtggtgcacatgtgtagtcctagctactcgggaggctgaggtgggtggatcgcttgagcccaggaggtccaggctgcagtgagccatgatcgagccactgcactccagcctgggcgacagagcgagaccctgtctaaaaatattacagagataggccgggcgtggtggctcacgcctgtaatcccagcactttgggaggccgaggcgggtggatcacgaggtcaggagattgagaccatcctggctaacacggtgaaaccccgtctcaactaaaaatacaaaaaattagccaggagaggtggcgggcgcctgtagtcccagctacgcaggaggctgaggcaggagaattgcgtgaaccccggtgggtggagcctgcagtgagccgagatcgcgccactgcactccagcctgggcgacagcgagactccgtctcaaaaaatatgtatatatattacagagatagccataactaattaaaggggttagagaagccaactcttgccacatgcttgggagaagaactagaaaacctgtggacagcccttatgacaagcacagcttcctgcggttcccaggggaagttagtgccacaggatggaggctttttctgggatac

SEQ ID NO: 198290 - DNA, 401 bp, Homo sapiens
ttagggtcagggttagaataagggtcaagctcagggtcaggataaaggtcagggttaggctgagagtcagggttagggtcaagattagggtgaaggtcagggttaaagttagggtgagggtcagggtcagaatttgggttagccccagtgagccctgtgtagaaactgtgtaagctcctaagtcacctgagttccctggctcacctctgagactgcagtggattggatctaagctccttaatgcttttttactttcacagtcaagaaagtgaaaaaaaaatgttgccaatcaaactattgtacaatgaagaatggaggatgcatcctaacttcagggatgttgtaatgtgaaaaatgtatatcttaggattttagtacatggtacctgcgtggctctggca

SEQ ID NO: 198291 - DNA, 226 bp, Homo sapiens
tggatggatggatggattaatggatgaatgtatggattggatggatggatggatggatggatggatggatggagagatgaatgcatgggtggatggatggatgggttaggtgggtcaatgagtaaagtaatgggtcttaactagctggaaggaaactggcatcctttccattttcttattatcataattttaccaaactatccatatctcaaggcatctactgaat

SEQ ID NO: 198292 - DNA, 276 bp, Homo sapiens
tttgagacatgtgaggtttgaggtccctttgaaacacccaataaagcagttagatgtctgagtatgatgctccagtgagggacctgtatgaaaatagaaaccgagcaatcattagaatatctgtgtcaagtatgccatcggagtggtgcggtcactcgatcactagacatttccgcctttcactcacattaggttttgtttatcatcaagtaagagagctgaaagtgcaggctcaaagtatcctgtgggtgcttccctccctgagctgcaggtggg

SEQ ID NO: 198293 - DNA, 361 bp, Homo sapiens
gggacccaccagaggatgaaaccggaggccccactcccatcagcacgcctctacctgccctccacctgcacctcaccggtctggccatgccaaagagatcgtctcccacccgctaagactgttccaggttccctgggcccagacagcatggcttttctctccaggtcccggggctctgtggtacaagctcccttcactacactctccacaggcagctatagcttcgaagagccacgcggaggctggtggtagagctatctcctccatcagaggactcatccatcagactctgtgccagaaacagtggtgctgccctcttaaaagaaactgcaactacttaagcctgaaaaggagaagacca

SEQ ID NO: 198294 - DNA, 241 bp, Homo sapiens
tctgctccagcaaagaccctcctgggggggtcctttccctaattctctcagcagaagcttcctcagtggccgccagaattcactgggagctggatgcgcccccggagctcagcgcctctccgaggacagtcaagaaaccgtgaagggctctgggtgcctccccagacccggggcccaagactcttctgtcttactggggcttctggaatattaagaaccgaaaaaggtgaaagtggagcta

SEQ ID NO: 198295 - DNA, 413 bp, Homo sapiens
ggaactcccatgacattgacactcttgaaaataaccagttattttgaaggatgtcctttaatgtggatcatctgatgtttcctcgtgattaatacagttaggcatctttggcagggacataaccggagtgatgctgtgttcgtctcattgcttcctatttgttggtgcacgattttgatttgtcccatgactgatgatgttcactttgatcaattgattgaggttgtgtctgccaggtttctctgatttttccctttgtaattcccttgtaattaataggtattttgtggagcagttctgtgaaactaagtaaatatcccattcttcatcaaactttcaacttattcatttattgtgtttatttttatcagtatgggtttgtatatattcattttattcaataggttataaag

SEQ ID NO: 198296 - DNA, 171 bp, Homo sapiens
tttagcttcctcaaacaaactaactgccagccaagaatttagtatccagcaaaattaagtgtcatatatgaaggaggcataaagtctttttcagacaaatgctgagagaatttgccaccaccaagccagcactacaagaaatgctaaaaggagttctaaatcttgaaacaa

SEQ ID NO: 198297 - DNA, 364 bp, Homo sapiens
catgtaatctttgtacctactctctgttcttataccccctccccttttgaaacccttaataaaaacttgctggtctgagactcaggcaggcatcacagtcctaccgatatgtgatgtcacctcctggtggcccagctgtaaaatttctctctttgtactgtctctatttctcagccagcagacacttacagaaaatagaaagaacctacgttgaaatattgggatttgcttctcccaatatctggcatgccaatgtggttttctttttcctaagtgcatgtgggaacccaattccctctggtaggtttgtagaaacgttcatcagtccggttcacagaaatgcttgtccagctccctgacgatt

SEQ ID NO: 198298 - DNA, 245 bp, Homo sapiens
aaatgatatggcccgctctaggagctaaacataaggatttgtggaaactattaaatgcaaactttgggaaagaataaaaaagcatctagaaggacactctacaaacttgtttttggatatagcaaaattaaagaacaaatgtttaaagcatcccagggacacctgaccttaatgccaagaactggagtgcttaaaggagctgcagacaaattagcagctagtaacccattaaaatggataaaaac

SEQ ID NO: 198299 - DNA, 811 bp, Homo sapiens
cgaagtctcattgttctttccaactgaacactgccggtgtggtgtgcctcacttctcagtctccattcactaacccaaatatccccaaagatgtgcaccaatttttctgtctagcattcatcagagtgctcctgtgtgccaggccctctgctaagcactgggcatacagcagtgaacagaaaccccagggggctcatagaccagttgggaagattggcattaaacaaatgaatatgtaaatccaaatcaagaggtatgaacaccatgaaagacaaaatcatggttgaaagttgagtgggcctggggttggagagatactgccctaagcatctcccctccccacctggcttgccacttgcccctttatagaataactaatcgttgttcagtctttgatagtttccactgaaaacatccctcttctacctgacagaggagggtcaagacacccagagcacaaaggagctgatgggtttagttagctgttactgcggaaagccaagaggatgagcttgagagaacagactgagggctttagatgggtgaatgtgagaaagtctacagtgcttgctgtgctgaggaaaaaatccaggtggatcacctggaggtgacccaaagtgccaatgaagtgcatgtcaatggccctcttcacatacttcactactgtatctggagctctcctgaacatctttctcccattcctcactgagttttgctagacatggcaaatgttaactcattaccaactcttaattgtattgctgtttctttgcccctgtctagctctttctatttgtacattttgtaaaga

SEQ ID NO: 198300 - DNA, 381 bp, Homo sapiens
tgtatccatctaaaaatggcttccacaaaaaaatacttcttatattttctctttttaattaaacaaatagaaattttatttatttatttttaacagcaaaacaggccaggcactgtggctcatgcctgtaatcccagcactttgggaggctgaggtgagaagatcaccgaggccaggagtctgagatcagcctggacaacatagcaagattcagtctctaaaatttttttttaattagctgggtgtggtggcttgcacttatagtcccagctattcaggaggctgatgtgggagcactgcctgaacatacgagcctgaggttacagtgagctataaccataccactgcactctagcctgggtgacagggcaagaccctgcc

SEQ ID NO: 198301 - DNA, 266 bp, Homo sapiens
catctcaagcaaaatggaatgcctaatctccagtctcccctattcccaaacctaattgcctctgtcttggtaaatggcaactccatccttcaggatgttgaagcaaaaacaaccggagtcatcattatcacctctctttcatagcccactagtccctcagcaaattctgctgacttcaaaatacacccaaaatctgatcatgcctcatcacctctaagttacctatccaatcaatattaacaattaatcactaagacctatctatt

SEQ ID NO: 198302 - DNA, 585 bp, Homo sapiens
ccacctcacccggctaatttttgtatttttagtagagatggggtttcaccacattggccggggtggtctcaaactcctgacctcaagtgatcctcccatctcggcctcccaaagtgctgggattacaggcatgagccaccacacccggcccaatgagctttacttttctacataaggaaaataatggtagaaatgaaatagctgtgaaacttgttttgctatttttgtaccatgctaaaatgttaactactgcttatgtcggcatacacctgagagctgctgtgatttaagcctttttatttttctgggtatgatgtaactcctcccctacctcatccaagtagataagttcatggaggataaacatgacagctgctgtttcttttatagctggttccagggaatatccactgaatataggaaagattgtcagttgctgtgtgctgccctggtgctggtggagctttcagccttcttctcagaggaaacaatttaaatgtttttgtgaaaccctagaggtctggggtttgtaggacagtcttgagcagagcaggcaaaggtgaagggagtggagcccagacgtgc

SEQ ID NO: 198303 - DNA, 351 bp, Homo sapiens
gaggcggagtctcgctccgtcaccaggctggagtgcagtggcgcgatctcagctcactgcaacctccgcttctcgggttcaagcaattctcctgcctcagtctcctgagtagctgggactacaggggcccaccaccacggcgggctcatttttgtatttttagtagagacagggtttcatcatgttggtcaggctggtctcgataatgtgacctcgtgatctgcccacctcagcctcccaaagtgctgggattacaggcgtgagccaccgtgcctagccaggctgtgatttctttaggggaaaagacaggtaacagtatggcagtgaacatagaaacagttcaaaaattag

SEQ ID NO: 198304 - DNA, 254 bp, Homo sapiens
attcttcccttcccttttcaaccaagcgccttgagaaaacattataatgtttctgaaacttgagttcacccaaactatttttaaagaaccttgttctgtatcttgtaacctatacaaaaataactaaaaatggaatatagacctaactgtaaaacttgaaactataaaagttcttaagataacacggaagaaaatctttgtgactttgggttaggcaaagatttgttagctgtataaccaaaatttgagccata

SEQ ID NO: 198305 - DNA, 585 bp, Homo sapiens
ttccacttcctttggtgcctggaagagatgaccaaaaacctcagcccagactctgctgccctagagttatttgtattctagctgagaaggtcaaaaacactgccctcaaacttccaggcatcagtggataacccggcctcacacaaacacatgaaggagtacattaaacattgactcatctgtggtgctaccagaaggaaggacaaaggaggccatctggatcctgtctgcctgagctctcatttcagctctgccacttggaagttcagtgaccttgagcaagttacacaatcactttgtgtctcagtttcctgactgtaaaatggggataatgatggaactttccttcttaactctttgtgaggattctgcaggtcagtgcccaggacacccaggccctagccatggcaatgtccacagatgccagtcatttcttcctcccaaggccagggttctgaccctttttaatggcttggtccataaaaaatatggatcatgccataaaaaaggcatggttgaaaaaattcaaccagcctagtgaagcacacgaatccttctcaaaataatggtataaatgtataaaat

SEQ ID NO: 198306 - DNA, 1160 bp, Homo sapiens
gtcccagttcctcaaaatatgagacaaactttgcaggattataaaattggaaaaaatagatcagaaaatcacaaaataatttctctttccaattcacattactgtgtccccaaagcttcatttgctaacagtattaatggccaggcttaggattgcctttacatacattcaatatttctttatttagttttctaggttagttgagtgtattaacctgaaggtgaatcacaaataatagtgaattactattaaaccaaaaataaatgggcgtaggagtacaaaatttgaaaagtaatttttatgaaaaggtaattctagaatggaggaaaaaatgattgtggagtggtattgtcacttagtgtttattttaatgtaaatatgaatggatttcccattggtagttaaagttcttgctccattccaaatcttcatatagttaacacaactttcaacaggtttatctttcttcacaagatttcttccacaaactagtaaggtatcatttgagggaccttagagacttgtggtcagtgaaggatgcaaatagatgaaaatgagaaatagtttatattgctagccactaccgatattcctctgagaatgctggaggatttcacttttctgttattttgaggtagcacgattgtgtaatttcctttggccaatgaaatgtgaatggtgtgtcacttccaagcagaattatgtaactgccagtgaaagactcttctgctatcttttcctgttacagcaattacataagcactggttgatactgagacaccataaagtcaaagcaatccaggatgctgagccaacatgtggagaaaagctgtcataggaagtccccaataactacaaaggactctgcagcagcaagaaataaaattatgtttattttagaggaaaaactgaatgttaactcacaacagcatatgtattgaggtcccactgccattaagctaatatgaaccagataaattttaagaggggggcattttttttacaacaggaaatacaactgtaggagaacattattgttgacactttttactaagacatctgaccgttaagcagattagataacttgaattccatggaaaaaatctactgtgttttgatttctttttcttaaatataaaaggtagcagaagaaaaataat

SEQ ID NO: 198307 - DNA, 604 bp, Homo sapiens
atctaaacaagtacaaaagtctgttgctgttgttttctaaagatttacttatacatgagtgcatatttagacaattgaaagaaactaaataattgtgttctttttttttttttgagacagagtcttgttctgttgcccaggctggagtgcattggtgtgatcttggctcactgcaatctccacctcctgggttcaagccattcttctgcctgagcctcccaagtagctggaattacaggcgcgtgccaccatgcccagctaatttattgtatttttagtagagatggggttttaccatattggccaggctagtctcgaacgcctgacctcaggtgatccgcccacctcggcttcccagagctctgggattacaggtgtaagccaccgcgtccagccagaattgtattcttttatataaactgagagtttgggatattggctggttaaaatgctaactatgaatctgaacacaggaactcactgtcgctcttgaaaagattactctttcctgcttagagttttaatggtctgaattatgttttaaacaaatttgaaattatgttctgatttgctctaaatggaggcaaatcctttgttaagcaat

SEQ ID NO: 198308 - DNA, 311 bp, Homo sapiens
aaaataatatttcattttatttttaaactactacattaaaatattttgtggttcagcattttctaatatatttaatgactctttgtatgttctgtaactttttcctttttttttttattatttttttattttttatttttaatgttttttttttttttattatactctaagttttagggtacatatgcacattgtgcaggttagttacatatgtatacatgtgccatgctggtgcgctgcacccactaacgtgtcatctagcattaggtatatctcccaatgctatccctcccccctcccccgaccccacc

SEQ ID NO: 198309 - DNA, 472 bp, Homo sapiens
atgctcaaatatttgtatgtgtttttttcattatcacaattactgtcatgtggatattatttcaaatttatagataaggaaagtaaggctcagagaagttaggctatttgttcggagtcatgcagtgataagttatgaagctggaaactgaacacgttataatctggcttagatgggagagtgtggaggagaaggagaatggcactgagtgtcaaagaacagcctgagctgaagcactaggagacctgcgtggctacagcgtcaaacaggacaataaaaagaaagttagcaacataagatggcagaaaacctcaaaaatcagtgagagaaattctctggatttttaagcagaaaaaaaataatgaaaatcattgatggtcatagagagcttgaatataagatttttgtaagaatatgattttttattctatgactaaagcagaagaaccatacacatcaaatttgtaaaaaa

SEQ ID NO: 198310 - DNA, 274 bp, Homo sapiens
tggagttagaaacatcagtataaactaatgtttagcttaacacagacatagttaagtatggataaatttatagacatacgtatatagtattcacatatatttccttgttctatcagctgagagagcttagaagcagataccccagtagtaaagagggcacattatgttcagctcttagtttctaacactgttctccaataaaagggaccagttcccttggagaaatgactgatcctaggatgaggtaagaaatacacaaagtaagccttgaata

SEQ ID NO: 198311 - DNA, 482 bp, Homo sapiens
cttgccatcccctgaggtccttcctttggcttaggagctctgccagagaagtaggggtgggacaagggtgcctggcctgtgtgcccagggtggagggagatgattttggattgtgtttgtggtggttgtaccagcaagcagatgggtgggaccaagacagcactccaaggctgtgagtcatgggggaaacctggcctggagtggagaggaaaagctaatggtgaaataccctctccagagccagcctattggacatcatcccaggattcaggtcaagttgtttcgtctcctgtcccctgaccttccaccaagaaggcagctcctatggtgtaagccgtcactccaggggaagcctacgatgaatggggttagagcccccagatcccttactggtctggagagatttctaaatccaggaataaacctccccttggccaggcacagtggctcatgcgagaaatctcagcactttgggaggccga

SEQ ID NO: 198312 - DNA, 453 bp, Homo sapiens
acatgaaggtctgcgtattctttcacatgtgcacatatgtggcacttttccatgatgcaacagcagcgggtctctagctaagctacagcagcagctctaagaggcaggggaccctgaaacgaggctgaaaaaaagaatagtccataactgacatcaggcaggctgctgttgtaagcaaagaaaggaggctcacaggggcgtggactcaggccagatcaggctattgtgggagaacacggagcacatgtgtcagctggaaaggggccggctcaggagacaaaataggcacgagaggaaacccaaaaattgacatacatgactatccttgtagaaatgtataaaggtttggattattttgcttatcgagttataataaagttattctaaaaatgtttatgtaaagtattatgtacatttttgttaccttataaagattatttatatttgagttgt

SEQ ID NO: 198313 - DNA, 264 bp, Homo sapiens
tgtaagaaacctccatcatgaaataatttagatatttgaaatgtgaataatgaaagtagagtcaaataaaagtatatttgctttaactttagtaaagaggggaaatataaaagttgcataaatttaaaaattaatctggagatattccatgctaagggcttgttaaataagcaacatgaagagcatcaatcaggttggacatttttattgtcaatgtttagttacttccagtgtagattagtgttttttgaaacagaagtaggc

SEQ ID NO: 198314 - DNA, 352 bp, Homo sapiens
agggggtaatgaaaatgttctgtaattaaatagtgatgatggttgtacaactttgttaatataataaaaaccactgggggccaggcgccagtggctcatgcctgcagtttgggaggctgaggcgggtggatcacctgaggtcaggagttcaaaaccagcctggacaacatggtgaaaccctgtctctaccaaaaatacaaaaattagccgggcgtggtggtgtgtgcctgtaatcccagctgcttgggaagctgaggcaggagaatggcttgaaccagaaggcagaggttgcagtgagccgagattgtgccactgcactccagcttgggtagcagagtaagactccatctca

SEQ ID NO: 198315 - DNA, 236 bp, Homo sapiens
tgttgggattacaggtgtgagccaccacgcctggccctgaaaaatatttttaacggttacattatcatggagaattggatggtataaaacaatagcagttctcatatttgaaaataaattgatgtaatgaaacaaatgagaggatcaaataatattgtaaaaagaataaaaacccacatatggacaggtctgtggaaattgtattaaagactacctctcccagattgtttccgttg

SEQ ID NO: 198316 - DNA, 237 bp, Homo sapiens
catatttagccatcaaaactcagctccagctacacttccaccttagcttctcccccggtttgcctcttacctacagctttctgtcctcttcatagtttcaaccatgactacatcacatatcttgacacatcactacttttctgtacttgtggtttactcattcatttgttccacaaaaatcattgagaattttttgtgtgccatgttcatgggaatagaaagattgaaaacatgcat

SEQ ID NO: 198317 - DNA, 269 bp, Homo sapiens
ggtagaaagttagcagtgaatgtggtgagacacagtcaaattctcagagaagaggatgaaagaaattcctgacagaatctttggcaggggtgcagaagtagagaaggcatctgaaatggggcaacagtgagaagtgggcctggaaatgaaggtttgccaaaagtctttaactaaaacaatcaactcatataatggtactgccctagtccttagccatctagatttgtctctctctctctctctctctctctctctctctctctctctct

SEQ ID NO: 198318 - DNA, 480 bp, Homo sapiens
tgatgagacagaaggagaacggtggcatctctcactgtaaaggaaagaacactggggccacaaagtgtcatcagccatgttcctctccagtccaaggactcccagacacttagtgttccagctcctgagtgaaaatgttaaccatcagcacactctcaaagatcactcactctaggaagtcagctgccatgtcatgatgatgctcaagcagccttgtggaaaagcttcacaaggagaggaactgaggcctcctgtcaacagccatgagagggggctgtcttaaaagcagatcctccatccccagtcaagccttcagatgacggcagcccctgtggacatcttgaccacaacttcatgagaccctaagccagaaacactcagctaaactgccctggatttctgactctcagaaactgtgagataataaatgtgtgttattctaaactaacagtctagaataaactgttatgcagcaataaa

SEQ ID NO: 198319 - DNA, 395 bp, Homo sapiens
tggaacagcagaagaggaatgtggaaacataagcaagactatttcttgttaaaagtgtaagttgtggtaatgagttggattttattcagggtatatgagaaatttatgaaagatttcaacaggaaaattccatagatatgaggctgctctgaggaatattggtctatctgattacttaaatgggaaaaacagttggaacctgaggatgtctatttctgctgtagggaacggaagcaaagaaatctgatttgtaaccacagcggaatggacatgcagagagaagcagagatgtaagactgagaaggaggtgtttgtttgttcactgtggtactctattctgttgttccagtttattcctgactgtattctgaccttgaatgtaaagagatgacacc

SEQ ID NO: 198320 - DNA, 466 bp, Homo sapiens
agagtttccctcattctggagcttctgactccccactcccaactctgagagtcgttctccttcccataggctatgcagtctcatacagctgggctgcagtgccacacctcaccagtaggtgctgccttcagctcaatgtgactccagcctgagcttcgagctgtgggtgctaagaagtggctacccctggctgggcgcggtggctcacgcctgtaatcccagcactttgggaggccaaggcaaatggatcacgaagtcaggagttcaagaccagtctggccaagatggtgaaaccccatctctactaaaaatacaaaacttagctgagtgtggtggcaagtgcctgtaatcccagctactagagaggctgaggcagagaatcgcttgaacccgggaggcagaggttgcagtgagccaagatctcaccactgcactccagcctgggcaagactctgtctcaaaaaaa

SEQ ID NO: 198321 - DNA, 810 bp, Homo sapiens
tactttgactattttagatgccaggcgtgtgtcttgaagagaccagtgaagaggggcttgaagttctgattcactcgaacttttttgggttttatgtctttcctttctcgtcagcatcaaggccatctaacttcaaggctgaatgaatgagttctgttttccttaatagggagagggaggagatggcctaggactcattcacagctgtgtgtgtggaaagtgcattggtgatagatcttgacttatttagtgatttttcagaagattgttggtttttcactggtaagaccaacaactatccttgttaaccagctttaaccagaaggactaaggaagttggacatctcgtaccactcgcaattgattttctaatgcagttctcttgtttaaattctgtggctgtgataatctaggtagccaattactcttttttgttaactaagaagatttatactgctgttgtgctagggtttgtaatttaaggtgtggacatgtccaggatgttaaatttagcttgtgtctcaaaactagagctatccaaactcttttttgctctggttgccctggtcccttgatgttcagcaagcagctttgcagtgcccacagcactccggcctccctccttggtactgcagggccactgtgaagagggaatcaggacaggatccttcaggtcttggcttaggcatctttttttcctaaaagtctttctggaccaatagtctgtcagcagggacggcttcacagaagagatgaaactcaacttttaagactggctgggtttgggggagggaagagaccaagaaggaa

SEQ ID NO: 198322 - DNA, 608 bp, Homo sapiens
cagacatgttggagtgaggtaagattatccgaccactgaattgtagatttccactataattcccatttctattacagcactcccaacttcaactgcgctttgtgtccttgtgcccagaactctctgtttctactttttcaaagagtaaaaccaccaacccttttagggtggagagggaaaggtaggatggccatgtactatgcacggaatgagggatgagggagaaggtctcagggtctacgacttctaatacagaatttcagctaatcgtactgtgttttagccccatgtgcaccttcatcatcagaggtacctagtgcctccaattcctagactctttaagattttcttttttttgggacagagtcttgctctggtggatggagtgcagtagcacaaccatagctcactacagctttgacctgggctcaagtgatcttcttgcctcagccttctgagtagctgggactgcgggtgcatgccaacacacccagctcgttttgtcaatttttcgtggagaccgggtctagctctgttgccaggctggtctctaactcctggtgatcctccctcctcgggttcccaaagtgtagggattatcggtgtga

SEQ ID NO: 198323 - DNA, 319 bp, Homo sapiens
aaatattattctcttcctacttatgttttcattgaaccaaaacattgctggctaatgagtggctggtacaataaagccttggttgaatttccagcccatgctggacaccctggggttctcctgcactgcacttatcacattggaatttgtcttttcttctagatgccagcttcatgaaatcaagagttttgtctattacattcattgttatatccttagtatgatgcctgcctcagagtgacaaatatttttcaaataatgattaaatacatgcacttatgattgattcatggacatatgattacatgcataactgaat

SEQ ID NO: 198324 - DNA, 110 bp, Homo sapiens
aaattcctagaaacatacaactttctgagattgaaccagaaatagatagcactcctgaacagaccaacaataagtagaaaaattgaatcagtattaaaaaaaattctacc

SEQ ID NO: 198325 - DNA, 277 bp, Homo sapiens
ttgccaggtcacttgagaacagatgaagagctaactggaagctattgctgaaaccttacacagtgtcctgggaagttttagcaaatagtaacttacgcagaacagaacacaatcatccatcatcataaaacagaacccagaggggttgaagttagcttgtagaaacagaacagttaaaagattaaaactgttatcctcatttaataattgagtaccataacaaaccagacaagccttatggagattgggtactgttattggttctgtggtatgctat

SEQ ID NO: 198326 - DNA, 199 bp, Homo sapiens
tcatccacatcagggtgagtagtggaaatgaatgaggttaggaagaattattgcattaatttttagggctcaccaactcagtgcttacaggatccaaatgaaagaataaacactgcccattctaggatgataaatgacagccgaaatttggcctcagtataggggcagagagtggcagcctggagggcacatgcctcat

SEQ ID NO: 198327 - DNA, 534 bp, Homo sapiens
tgtaccgactggctggctaattttgtggtttctgtaccatcacatgcctattttaagacactctccagcactgtcggttagggagtgtaaattttgcaatattttctgaaatgtggcaatatcaaaatgtaaaaggcacacatacttggtcaccatacaaatggcactatttactctgtgggcatatttgtaaaagttgccaaagaattatatacaaggatgttcatcagagcatttcttttgaagagtaaagaaatggacatgaacctgtggtccgttcatacggtggaatacctatgcagctgtaaaaatcagtgtggtagatctccgtatatgagttgatgtggaaggttggccagttcacatgataaggtgaatagaataagttacagaacaggctgtagagtatgatcttatttgtagatgtttaaaactgagtcataagtatgcttatatacagatcgtttctggaagtatgtactggaagtctacctctggggtgtgggttttcggcgtgtgcagtcttctatactg

SEQ ID NO: 198328 - DNA, 1397 bp, Homo sapiens
ggtttaactaaggattaagcttaaaagagtcctcctgtggcttcactggctgctgaccacggatattaggtctttatcctatgggcttctccattaggacagtttgcggtatggcagctgtactctctttctctttttcttggttgctgtgaaggaagtcagctgccatgctgtgagcttccattgaagacagaagtcttccttctaaatgccacgtgagtgagcatggaagtcaagccatgcaatgactgtcactctggctagcaccttgattgcaatcttctgagaggccctggtccaaagtcaccctgcaaaaccaatgcccagaattactgacatatttatttcaagctaataaattataggcgtaatttgtaatatgcagaaatagataactattacgtagatcaaatgaaaagattttccaatgtgtagaaactacataaattcttttcttacaggacaatcttattctaatcaataacatttgcttttaaggcagataatcctccaagttttctaatgatatctgaaactattaactgattctgtgaattatgaaatctgaaaaggaattggaagttgctaaaaatctatcatttgcattgaccagtgtgaagcacagtggaatgagaatgcgtgccctgacaccaaagaaaaataagtgactggaaagctgaagaatcaccggcttcagtgacatggaacccagtgatttgatttttgacgagtatcgggtgactttgaggtggtcaagaaaccacactttaagaacaatgtccaaaaaggggaaaaaaaagagcaaccaaagaaaaaaaatccataaaattgcacagaagaaaagaaagaaaaataaaatacacaatatggacgatggagaaaaacagttacatttctttatggatcaagaagtttgtgtacacataatctcattttgagatatataactatttttgtctttcagaagtgaatcaaaatatttcaaaatgctgtcttatgaaactacaatattctcacagattagaaaagtttttctgtaaaagtcagatagtaaatattttaggttttgcagtgtcttttgcaactactcaactttcctactgtagcacaagagtagctgtggtactgtgcaaataaattgcttgtgttccaataaagcttcatttacaaaaacatgccatgggccatatttggcctgtacactgttgtttgccaagtcctaatatagttgcttagcaagtattgtgagctatttgaggaagacatgaaagttcattgggttgctaaaaagtatgtagaaattcaaaggaaaattaaaatttaggctaagttataatacactgttttaacaattgtaaaatgtaagagaaatttacaaataaaaatcccaaataaaa

SEQ ID NO: 198329 - DNA, 345 bp, Homo sapiens
cggcccatgtcgcgactgtggtcggaaacggagcaggtcaaaactcccgtgctgatcagtagtgggatcgcgcctgtgaatagccactgcactccagcctgagcaacatagcgagaccccgtctctaattttgaaaaaaagaaaagaaagagaatggttcaatttcccaacttctttttgcctgtttacccactttagtatcagctgtaccaaaggtaattcatcaatagttttccttcatcttcccattttaccctgatactgatgctataaatggaagagaatctgctgctaacttaacttctgtttcagttactgtagcatcatgttctgcccatatctaaa

SEQ ID NO: 198330 - DNA, 1433 bp, Homo sapiens
cttacagatactgggaaaactcaaagaataaaacatctgagcagggaccaagagcaatcggggagtccgtatcatgtcacagagaagcgtacaagcttaggaatcttgttttctgaattcgaatcgcaggttgccagttacacctgtatgcgactcaacaagtactttaacctgtctcttagctgttatactacaaacctcaggcttgttaagagaaaatgctccgcaaggaactaaacacagaaggttctaacgctgagccaagactgggaaacgaactctgggaactcaccccaggctccccaagaacatcgcccctctggctggagcgcaattggtgattggctacttaacccgtccgtcctttcccgcccaggggtccaatccaatccagcccggctccgctcggagacagttcgccgagtgggcggtgtctatgacgttttctgacgtgttacgtcacggtgggcggaagtcgcggccgctgttttgaaatcgggccgcggggggtctctcaagctggttccaacgctgaggccccacagcctcccaattccgggcagacccctgacacctgctgtctggccccttccggcctgaagctgcagccgcgccatgtccacccctccgttggccgcgtcggggatggcgcccgggcccttcgccgggccccaggctcagcaggccgcccgggaagtcaacacggcgtcgctgtgccgcatcgggcaggagacagtgcaggacatcgtgtaccgcaccatggagatcttccagctcctgaggaacatgcagctgccaaatggtgtcacttaccacactggaacatatcaagaccggttaacaaagctacaggataatcttcgccaactttcagttctcttcaggaagctgagattggtatatgacaaatgcaatgaaaactgtggtgggatggatcccattccagtcgagcaacttattccatatgtggaagaagatggctcaaagaatgatgatcgggctggcccacctcgttttgctagtgaagagaggcgagaaattgctgaagtaaataaaaaactcaaacagaagaatcaacagctgaaacaaattatggatcaattacgaaatctcatctgggatataaatgccatgttggcaatgaggaactaagctgatatttaaatttcctgctttacacatgttataccattgttttttccctcaagtattttttccctgtgaagaagattatttatctgcttttattttagtcactaaaactaaagtttttatttttacattgtgatttttacattaaaatattaactttttttaatgctattttatgaaagattattgtaataaactttgatggggtttgtattttggttaatcttcatgaattgaataattgtttttttaaagcaaaataaagttttttaaataaatgt

SEQ ID NO: 198331 - DNA, 593 bp, Homo sapiens
ttatacaaataaaagtataaaaattgaccttaatctgatatattctctatacaagtgattagaaaacttgaattatatttttgccttttaatttttgttaatcattcccagcaacttattccatatgtggaagaagatggctcaaagaatgatgatcgggctggcccacctcgttttgctagtgaagagaggcgagaaattgctgaagtaaataaaaaactcaaacagaagaatcaacagctgaaacaaattatggatcaattacgaaatctcatctgggatataaatgccatgttggcaatgaggaactaagctgatatttaaatttcctgctttacacatgttataccattgttttttccctcaagtattttttccctgtgaagaagattatttatctgcttttattttagtcactaaaactaaagtttttatttttacattgtgatttttacattaaaatattaactttttttaatgctattttatgaaagattattgtaataaactttgatggggtttgtattttggttaatcttcatgaattgaataattgtttttttaaagcaaaataaagttttttaaataaatgt

SEQ ID NO: 198332 - DNA, 1169 bp, Homo sapiens
cttacagatactgggaaaactcaaagaataaaacatctgagcagggaccaagagcaatcggggagtccgtatcatgtcacagagaagcgtacaagcttaggaatcttgttttctgaattcgaatcgcaggttgccagttacacctgtatgcgactcaacaagtactttaacctgtctcttagctgttatactacaaacctcaggcttgttaagagaaaatgctccgcaaggaactaaacacagaaggttctaacgctgagccaagactgggaaacgaactctgggaactcaccccaggctccccaagaacatcgcccctctggctggagcgcaattggtgattggctacttaacccgtccgtcctttcccgcccaggggtccaatccaatccagcccggctccgctcggagacagttcgccgagtgggcggtgtctatgacgttttctgacgtgttacgtcacggtgggcggaagtcgcggccgctgttttgaaatcgggccgcggggggtctctcaagctggttccaacgctgaggccccacagcctcccaattccgggcagacccctgacacctgctgtctggccccttccggcctgaagctgcagccgcgccatgtccacccctccgttggccgcgtcggggatggcgcccgggcccttcgccgggccccaggctcagcaggccgcccgggaagtcaacacggcgtcgctgtgccgcatcgggcaggagacagtgcaggacatcgtgtaccgcaccatggagatcttccagctcctgaggaacatgcagaaactcaaacagaagaatcaacagctgaaacaaattatggatcaattacgaaatctcatctgggatataaatgccatgttggcaatgaggaactaagctgatatttaaatttcctgctttacacatgttataccattgttttttccctcaagtattttttccctgtgaagaagattatttatctgcttttattttagtcactaaaactaaagtttttatttttacattgtgatttttacattaaaatattaactttttttaatgctattttatgaaagattattgtaataaactttgatggggtttgtattttggttaatcttcatgaattgaataattgtttttttaaagcaaaataaagttttttaaataaatgt

SEQ ID NO: 198333 - DNA, 1115 bp, Homo sapiens
cttacagatactgggaaaactcaaagaataaaacatctgagcagggaccaagagcaatcggggagtccgtatcatgtcacagagaagcgtacaagcttaggaatcttgttttctgaattcgaatcgcaggttgccagttacacctgtatgcgactcaacaagtactttaacctgtctcttagctgttatactacaaacctcaggcttgttaagagaaaatgctccgcaaggaactaaacacagaaggttctaacgctgagccaagactgggaaacgaactctgggaactcaccccaggctccccaagaacatcgcccctctggctggagcgcaattggtgattggctacttaacccgtccgtcctttcccgcccaggggtccaatccaatccagcccggctccgctcggagacagttcgccgagtgggcggtgtctatgacgttttctgacgtgttacgtcacggtgggcggaagtcgcggccgctgttttgaaatcgggccgcggggggtctctcaagctggttccaacgctgaggccccacagcctcccaattccgggcagacccctgacacctgctgtctggccccttccggcctgaagctgcagccgcgccatgtccacccctccgttggccgcgtcggggatggcgcccgggcccttcgccgggccccaggctcagcaggccgcccgggaagtcaacacggcgtcgctgtgccgcatcgggcaggagacagtgcaggacatcgtgtaccgcaccatggagatcttccagctcctgaggaacatgcagaaactcaaacagaagaatcaacagctgaaacaaattatggatcaattacgaaatctcatctgggatataaatgccatgttggcaatgattccctcaagtattttttccctgtgaagaagattatttatctgcttttattttagtcactaaaactaaagtttttatttttacattgtgatttttacattaaaatattaactttttttaatgctattttatgaaagattattgtaataaactttgatggggtttgtattttggttaatcttcatgaattgaataattgtttttttaaagcaaaataaagttttttaaataaatgt

SEQ ID NO: 198334 - DNA, 1392 bp, Homo sapiens
cttacagatactgggaaaactcaaagaataaaacatctgagcagggaccaagagcaatcggggagtccgtatcatgtcacagagaagcgtacaagcttaggaatcttgttttctgaattcgaatcgcaggttgccagttacacctgtatgcgactcaacaagtactttaacctgtctcttagctgttatactacaaacctcaggcttgttaagagaaaatgctccgcaaggaactaaacacagaaggttctaacgctgagccaagactgggaaacgaactctgggaactcaccccaggctccccaagaacatcgcccctctggctggagcgcaattggtgattggctacttaacccgtccgtcctttcccgcccaggggtccaatccaatccagcccggctccgctcggagacagttcgccgagtgggcggtgtctatgacgttttctgacgtgttacgtcacggtgggcggaagtcgcggccgctgttttgaaatcgggccgcggggggtctctcaagctggttccaacgctgaggccccacagcctcccaattccgggcagacccctgacacctgctgtctggccccttccggcctgaagctgcagccgcgccatgtccacccctccgttggccgcgtcggggatggcgcccgggcccttcgccgggccccaggctcagcaggccgcccgggaagtcaacacggcgtcgctgtgccgcatcgggcaggagacagtgcaggacatcgtgtaccgcaccatggagatcttccagctcctgaggaacatgcagctgccaaatggtgtcacttaccacactggaacatatcaagaccggttaacaaagctacaggataatcttcgccaactttcagttctcttcaggaagctgagattggtatatgacaaatgcaatgaaaactgtggtgggatggatcccattccagtcgagcaacttattccatatgtggaagaagatggctcaaagaatgatgatcgggctggcccacctcgttttgctagtgaagagaggcgagaaattgctgaagtaaataaagttttgggagaagctttttgatttggcttttgttattttttcttcaaacatgaaaatatttaaatatttgtgtgcctgctctctgacaggcattgtcctcagtaccagaatttcttccatgaagcagctggatgtgttgtcggctatatactcatttcacatgagtggacaagtttcttcttggagaacataagactccagtggaaacaaagcagcacctgtttcatgtacccatttcatgttttgatgaatatttacagaaacaaaagtattgtgccatatttttaatacattggcatttggttgtattaaataagttgctttatagatctgtgt

SEQ ID NO: 198335 - DNA, 880 bp, Homo sapiens
aggagataagcaggagaagaaggaaaggcccaggcaggaatgaaacaggccatgaatgttggagtgaagccactggcctcctcgtgctaagcagctactgtgagttctttccactcccccaagacattgcataaataatgtcactttctgacaccccgctgaatgtcctgcttattcgagatatgcaggacatcgtgtaccgcaccatggagatcttccagctcctgaggaacatgcagctgccaaatggtgtcacttaccacactggaacatatcaagaccggttaacaaagctacaggataatcttcgccaactttcagttctcttcaggaagctgagattggtatatgacaaatgcaatgaaaactgtggtgggatggatcccattccagtcgagcaacttattccatatgtggaagaagatggctcaaagaatgatgatcgggctggcccacctcgttttgctagtgaagagaggcgagaaattgctgaagtaaataaaaaactcaaacagaagaatcaacagctgaaacaaattatggatcaattacgaaatctcatctgggatataaatgccatgttggcaatgaggaactaagctgatatttaaatttcctgctttacacatgttataccattgttttttccctcaagtattttttccctgtgaagaagattatttatctgcttttattttagtcactaaaactaaagtttttatttttacattgtgatttttacattaaaatattaactttttttaatgctattttatgaaagattattgtaataaactttgatggggtttgtattttggttaatcttcatgaattgaataattgtttttttaaagcaaaataaagttttttaaataaatgt

SEQ ID NO: 198336 - DNA, 1047 bp, Homo sapiens
cttacagatactgggaaaactcaaagaataaaacatctgagcagggaccaagagcaatcggggagtccgtatcatgtcacagagaagcgtacaagcttaggaatcttgttttctgaattcgaatcgcaggttgccagttacacctgtatgcgactcaacaagtactttaacctgtctcttagctgttatactacaaacctcaggcttgttaagagaaaatgctccgcaaggaactaaacacagaaggttctaacgctgagccaagactgggaaacgaactctgggaactcaccccaggctccccaagaacatcgcccctctggctggagcgcaattggtgattggctacttaacccgtccgtcctttcccgcccaggggtccaatccaatccagcccggctccgctcggagacagttcgccgagtgggcggtgtctatgacgttttctgacgtgttacgtcacggtgggcggaagtcgcggccgctgttttgaaatcgggccgcggggggtctctcaagctggttccaacgctgaggccccacagcctcccaattccgggcagacccctgacacctgctgtctggccccttccggcctgaagctgcagccgcgccatgtccacccctccgttggccgcgtcggggatggcgcccgggcccttcgccgggccccaggctcagcaggccgcccgggaagtcaacacggcgtcgctgtgccgcatcgggcaggagacagtgcaggacatcgtgtaccgcaccatggagatcttccagctcctgaggaacatgcagctgccaaatggtgtcacttaccacactggaacatatcaagaccggttaacaaagctacaggataatcttcgccaactttcagttctcttcaggaagctgagattggtatatgacaaatgcaatgaaaactgtggtgggatggatcccattccagtcgaggtaattttttgtgatagagggaggatgaatataaggtgtgaactagtgtcaagacagttgttaatctttttcctctctctcctgttttagcaatat

SEQ ID NO: 198337 - DNA, 625 bp, Homo sapiens
cttaccattacaactttgattctgcttgctatggggccacgctcagattaaaagtaatgattttcatctttgccttataaactttgttaactctagttaaccgatataagttaattcttgaaatatttatatttcatctgaaaaattctggcgtatatgagttcatatttttttacttgtgataaaaatctcagtcaccttagggatagaacttccagagtgcctttcaaagcgatatctcggctttttatctcctgacaggttaagagtgtagagttttgtcaattattcatttgaaggagtttttatgttttcttttaatgtgcttcttatattggaaaaaaattcatgacccaataattgaggtagtgtctggtttgtgtcataatatgcaaatagcaaaatggaagataatactccagcctgataacatgtgtgatgtatgtggtgatggtgaatggtaagggttgtgtctatgtgctgatctggggaaactgctagaggaataatagagtcaccaaatttgagcaatatgaaagtgtaaaatctgaatcaagtacgttgagatcaaagttagcagtgactggcaaggaaatgaaagaaaataaagcgacataccaaataa

SEQ ID NO: 198338 - DNA, 479 bp, Homo sapiens
catccctgataatcagaatgagatctttttggtgcagttgatgctggtgagaggacaggcccaaagggaccttctggctcctccagtcaccacctgatgacttaaactatgagcatccaatgccttatctgtgccatgaaaatgatattggcacttctccaggtgtggcagagaagctgttagaagatgatgtgcataaaacagcatagcacagagccttgcccaagagtgggggcttaagagcaacgcaagaaggaaaaataaataaacaaataaaacatctgattgcagttagtactccacctccaccccgttcacaatttctgaaaacacgctagatactggcaaggtggagtattacattttgttgaatctaagaacgcagaatggttctgatcagggagatggaaagagaaagctaatcagcaatgacaagtaaaaagtgtatgcagaagacagagcggagattcaagtctcag

SEQ ID NO: 198339 - DNA, 651 bp, Homo sapiens
ttgtatagctgtctagagttcccttcggatattggaagcaagatcgtgatcgtcctatgggattgcaggtgactagccccaaatctcacactgtttctattccaagtctttttatcaccacttgcaattatgttttccagtttggcatgagatgtcagggcagtgtagtattttgggctgttctgagtaacagaataaccagtgtttcacagttcatctttttcaaaatatagtaaaatactctttccaaagaaataccacataagtgcttggtttgtcattgtttagtaagggagtgtgagatgcctcattttgtgtgattgaagaggcctgttcaatgctcgtgatgatcttgcaattgattcatcccacaagcattccctcttgattgaatgccagagacagtgccagacatgctgcttggcattgagagggacagagaaggtgacctgggatggggaaggctagggagaggaggctggccccctacagacttagtgacacgccagaggtcactttccaagaggaaattgcagcaccatcttgacgtatcctgctcctcatttcagcgtcaagtgctgagcacgcggctgcaagaggcctgtgagtgctgtgagtcctgtccaattcctgagagatggactttccttg

SEQ ID NO: 198340 - DNA, 412 bp, Homo sapiens
aggaagttttaggtgccaagataactgctagatcattgaaaaactgcagctggaccaggcctactgcaagcagcttccacagctgatactggggaatgtagtgatacccagaatcttgcagatgccggaaaaagtaaagccccaaagggtgtgatggctctccctggctttgagagctcctaggtctgtgaacactgaaaggccacagctcttgttttatttttgtcttaccacaatgtgataagcaaggggaaacttttatccctgtttgtgttccaggtcattcagctctgccattcagataatctcaaattatgtttctgcttccaggaagaatgtggttcatgctgccatcagccctttcacttgtttctgtagagataatccctgtgctggttatggcaacagtcat

SEQ ID NO: 198341 - DNA, 372 bp, Homo sapiens
gcatgttagtatattcgattatctgctgcttatatgactgtacatgtctgtgaaagtacacagaactgtacacctaaaaagggtaagtttgatatgtatgtaagattatacctcacacgcacagtgctcatagaacgacagagaagggaatcttgaggggcaacagtacatcggtggatggatgggtgggtgaatagaagatgaattgatgagtggatgaatgggtggttagatgggtggatggatgagtagatgaatagttggatggatgagtgaatggataaatccatcggtgggtgggtatagacaaattatatatccttcctaggtatacttcaaagtgagctgatctattccaggaatcaaaataaa

SEQ ID NO: 198342 - DNA, 577 bp, Homo sapiens
agaaacatgcttcaaatgtatcctggagtgtctagcgcgactcagtgtctctgcacacgtgattccgtccattctcacttcttcacggagcctcttccttttaccctctggctctcagcacagtgtgtgtgtccccttcactgaactgccctgacagctggcactgtgctggtcttgtttatcctgcatgcacttggcctaacattaagtaactgttcagttaatatgtaatgaataatggaatgagctcctagatgcatcttcccagctaatttctgtaaaggcagaaacaatttggtgtttatgagaacttcaagaatatatgcagccaatcttgaaatcaaactgctcaaacagtctgacaatagccatggccactattctccatcatgctgttccatttaaaaaggacttacacacgtttctatctacttctcacactaaccttgtggagtaggtgggattatcctcattttcaccagtgagaaaacagaggctcatgaaagagaactaatctgctcaaggaaaatgactatacctgcagttctaaaccagggaaagagctgtttcggtgttg

SEQ ID NO: 198343 - DNA, 410 bp, Homo sapiens
atcagcacagattgtggaatgtttaggaccatttcagttcccaaagaaagagcccctgaagagctcatagaaagggctcgcaggagagtagagaaggaccagggagtgctggacacttctaacagtcacaggtgctgtgacttctaacagttgcaggtaaacagggtcccagaccttcccatctgggactgatggattgattgtgaagaatatatactcattccacaaatttaaaaagggaattaataatgaaagacttaagtgtaaagtagagcacccaagactctgctcggaaaggtagacgcaaatgataaccacataggtaaatcccctgcatgtggctgggaagagagggtgagaagtagtctatctatggttagtggccattttctctagttcacagaccatgc

SEQ ID NO: 198344 - DNA, 604 bp, Homo sapiens
ataaatgagattatttaagacttcagtgatgctaaactataagtttgaaaaatttgaggaaaaggagcaatatgaattaatggaaaaaattatctatttgatttaattcaagaaaacgacttttttaaaggaagaatgacaaaacaaatgatttaacaccccacctgtagcatagatgtgaggaaaagtatagcgttaatatatccagtgataagtttttgataaatattacatcttgcttgtaaggtcagggtatataattttacctgtgtgtcagtttaccaaaagattcacataagattaaatattaaattctgatatttgtctttatatttcactaaatcaaatagaatttgttttcaagctacaaatatataatgtttttcaacttatttttcatattttatctgttttttgttctataaacataaccagacatccagttttaattcttgtatcaaatatcctgcaattgttaaatataatttaacacttaatattttaaataatatgatttctatataatttgaaatatttctaattatatgtaagagtcaattttgtaatgaatttatagctaataaataatcacaaaaacttaatc

SEQ ID NO: 198345 - DNA, 357 bp, Homo sapiens
tctgtttctccctttagtttctgttggttttgcttatgtattttaaggccctgttattaagtacacacatttatggttcttataacttcctggtgaattaaatttttagcattttgaaatctctttttctttagataaatactctgtcttgaagtctgttttatcatatgttaatataggcactttagctttcttatgcttacagtttatataccttttcttttcattcatatgctttcactctgcctttttttacgaagtatatctctcgctttgcatgaagtaagattcatgctcagattctcaacatcatttagtggtggcccaagtcatatttgttttaatttgccttttaaa

SEQ ID NO: 198346 - DNA, 635 bp, Homo sapiens
cccacgttggtgatgctgaggtggtggtggggatgatgatggtggtggcgatgttgaaagggtggagaagaatgtgatgacagttatttctacctttcactaaatatctgcacttcaattcctgacctcactttatcctcacaacagctgtgtgggggaaagaatgcccagttcacagacgagaatactgaggctcaaagggtttgtgtaaaggcagtaagaagtagagtaagaattcaaactcagatctacgcaacttcagagcctgggagctcaccaccatgccattataaaattgtgttcctgagatgatggtgaaggttgcatatccccagcaaactgctagaacatgttattcaccagagagctgtgagcacataagaaggaagtggtgatcacccggtgccagtgctggtgtgctacaaacatcatagaccagcttgtctggtttccccttttgatgaggttccttagctggtggaccaggagcacagctggagttgtgatttcaacatgctttacatagacacagctttatgtattatacatatgattaaaaattatggcggaagttttaaaatgaaaaccaattcacccacctctgccaacaaatcacttttcacgcctctttcccc

SEQ ID NO: 198347 - DNA, 331 bp, Homo sapiens
agagctctctgtaggaaacacagaatatataacaggaaaataaatagtcaataattacacccctcagagatcacccactcagagataacattttctctcagtctttcagaaaaactaattttacaaaaagtcctggaaactgcctttttaaacaaacttgtgtcatgagctgttcccatgtctaaaatttcattagcttttttttctacataatggtctacatataaacataccataaattatttaacattttccctgttgctggatggtttcaacaattttgatcttagtgtagataatgctggattaaatatctttgtacctaaatctt

SEQ ID NO: 198348 - DNA, 379 bp, Homo sapiens
acagcagcagacctaaagctggacaatgaccagcatcaccttcacctgcccaaccaccagcagtagcctttctccttctccagcccaaccccagcccagtctctccctttggtctccatccagcccattccttcacagttctgggtcccaacaggaacatttgttatgtatacgtaactctaaggctttgaggaggctggaggggtttagcaatgagctttttgtttcttttgttcccctctgtttgccccctcatagacgcccatgataaccagcgctcagcctcttgttttctgcgttgctggcttcagctcacatgagggaaactgaagatccaaagatagcgggagtactctacatcaatacatcaaaggaaagg

SEQ ID NO: 198349 - DNA, 563 bp, Homo sapiens
tctcccaacgtgctgggattacaggtgtaagccaccacaccaagccgctatttatttatttttaattttttctttcataaattgtgtagtttccacatagaggtcttgtaaaatttctactgtgttcatttctagaaatgttatagtttgagttgttattgtaaattgaattgttttgtattacatttttataattggatattgtcactatgcaggggaataatatttatttgttgttcttattttaatctctattttgttgctatactcagagtttctaatataaacacagcatctgccaaaaatgttaactagttcctttctttcttttttaacttcatatctaatccctaattggatagatttttgttactattctttgttaatgtatctatttatatttttcttagtttagaaaacatagtctctattatttatgtatctttaactatgtgtggacattatttatagcctgataacaggatgaaaattattttataatccattggcattagaaaaaaatgtgctcttttgtttcagaataaagtttggcataaaaatcc

SEQ ID NO: 198350 - DNA, 473 bp, Homo sapiens
cataaatatgcatagatattaacttctctttaatattctcttaagctggccaggtgtggtggctcacgcctataatcccagcagtttgggaggccgaggaggtgggtggatcacttgaggtcaagagttccagaccaccatggtcaacatggtgaaaccccgtctttactaaaaatacaaaattagccgggtgtggtggcacgtgcctataaccccagctactcaggaggccaaggctggagaatcgcttgaacctgggaggcagagtttacagtgagctgagatcgcacccttgcactccagtctggccaaaaagagcgaaactccatctcaaaaaaaaattcttttaagttctcttaatatctcttaacattaagttctcttaatatctgtgcatgtttctgtttagatattattacttaatgatttcatgatgcctctacttcacagcaaatttattcatccaaaaaata

SEQ ID NO: 198351 - DNA, 435 bp, Homo sapiens
tgatatttatatttttaatgagagaaaacaaactccagaatttgggaactgtttttccggttttgctttatacctcttggacactccttcgaaggactggatctgaggggcattggggtgcgactacggtggacaagggatgattaattttcatccaaaaatctttggtggattcccccggctctccagctcaccagtctaacagtagtttaaaacagaagatcagcaacgtttggagagtttttttttctttgcgttttaatgataaacttgatttattcaattctattctgaggttgtctttctatattttgagtataaaacgatggccatactatgttggaaccactaaggttcttctcttcacttgttattcgtaaagtctctttgtaatctgagaatttcctgagtaaactgggaactgttatacataat

SEQ ID NO: 198352 - DNA, 791 bp, Homo sapiens
gaatgaagctcctaggtgcctcggtcctctcgccatagagcagggaacacagagaaaagggattttcctgtctgccgctttggttccgcatcagtagaaccccatgggaaagtctggactggtgagagattctctctgctaattccaataaatggctttcttgtctagaaaggaatcatgcaacacggtgtcgtctgggacttagagttatggacatgtgctgagctgggctagcgtaagcttgcacctcagcagataaaaatgccaaataacatacatttaaaaaatacatacgtagttgggcttacaagaggaagaaaaatccatagatgtctgaaatgattaattgaaagccagaatggggagatctcttactgaagcagttcccagtggaaaggtggcttggggtaaggaatgtctagaccagacctgaactgggcccacaggcttcattcatcagacaccagggcaggagagaaggccataaggatctggctctgagaaccctatgctaagctatgatcttcagtaaaaagaaactacaaaatctcctactcattcgcaaagggcaatgacctcagtaaaaagtgactatgcaatctctaccctccagctcagggagctggcagggatgtttgtctttacttggagttctgggtgggagaaggctcccatgagaaagcaaaaatctgcaaggctgtgttcaacaagactttggtgtccaaaaatatactatacacctgatgaagcgggacctcaatctagaaatgggtctgggccacgatcctcat

SEQ ID NO: 198353 - DNA, 606 bp, Homo sapiens
  misc_feature (14)..(14): n is a, c, g, or t
  misc_feature (17)..(17): n is a, c, g, or t
aggtgacctagagnatncagttccttctctaaatcttctcttaatctactaagatgcattgctttcatcttcctgacaaaatatgcttcattcttctgatggcctatttgtctttatacctgatgcataagacataaagctgtcatcttgggactttccctcaccatcattctggcctcactgtcttactctcctacatgtgtctcccaacctgggtgtatgtcctgggtgtgttgccctgatcttccactttattggtttaatttcttgttttggtgaagatggtaagttctggacagcttagttagggaaccctgatgttactgcatttaggttttcctcctggactgatcaggtaagattcttccaatctcctgtcagaagagtcaaagtctgctattactattttggatctgggtcaagcgagatagtggggtagagagaggtgggcattcaatatgcatgcattttcttaagctggctttgttcagtacagtgctcccaacttcaactctgcttgggatccccaagcaggaaacctgttctctctctcctgtgaatatgcttcctggaaagagaagggaaatagaagcggtagtgtacctt

SEQ ID NO: 198354 - DNA, 1192 bp, Homo sapiens
tctcctcatactggtttggaaattatatattttctttgcattctttcagtagttgccattaaaatatttttagttgaatatttcattatattcccattccatctttgtttttatatttagattttatttcaccaaaaattttaaaaactcatagttgaaaatatcaaatacttcctcatgagccttatatccctccctccttcccctgaaacaatcatttacatttcttttactggtcatgttggtatctacttccatgtctctaaaaaacattcatttctcaatttcttatatttctcaattttccagtttttggtattatctattgacttcccactctagaaaatgactgctcccaccatatatgtgccttctttcctcttcacgccctcacaatacagtcattttatgtttgcgtttgatatcaagcaatatatttacattaatgtaactatgcacaaactgttcacagctgagccatgtaggaaactatgataaatttttctttcctgagcagctttttgcttgccctggagctaattatcttgttttaccatttgcttagttttctatgtacttatcactaatttaatcccaaattatttaccagttctctaaatcttctcttaatctactaagatgcattgctttcatcttcctgacaaaatatgcttcattcttctgatggcctatttgtctttatacctgatgcataagacataaagctgtcatcttgggactttccctcaccatcattctggcctcactgtcttactctcctacatgtgtctcccaacctgggtgtatgtcctgggtgtgttgccctgatcttccactttattggtttaatttcttgttttggtgaagatggtaagttctggacagcttagttagggaaccctgatgttactgcatttaggttttcctcctggactgatcaggtaagattcttccaatctcctgtcagaagagtcaaagtctgctattactattttggatctgggtcaagcgagatagtggggtagagagaggtgggcattcaatatgcatgcattttcttaagctggctttgttcagtacagtgctcccaacttcaactctgcttgggatccccaagcaggaaacctgttctctctctcctgtgaatatgcttcctggaaagagaagggaaatagaagcggtagtgtacctt

SEQ ID NO: 198355 - DNA, 508 bp, Homo sapiens
aagaccagagaacaccacctttttgtgattatggggctgtccccaaacctgtcaggaaggcggatgacatggtctgcagctgttcacctcctgtggactgccctgtttcagatctgggttcatggagtgtttcacctgcctggctgaagaaggaacgtggccgtacttgtgaagctaatagtgagaggttcatttgtttaaacagcagttggtggaaaagcatggaatcaaggatctttacacgtacatattcaaaaccacttcacctcgcatcttgcatccatgtagccccttcacgctcacaatttttcctctcgtgatgtctattctcactcagggccaactccacgggtgtgcgaccagtgcagcatcccagggtctgcactcaggaggaggtaagggttggctgcatacatctcatgcacccagccacgaaaggggccccgggagcccgcgagaggctctctcctccaggaagtacccctctgcccaagggcacgatgttaca

SEQ ID NO: 198356 - DNA, 628 bp, Homo sapiens
tttcaaaaagagagagagagagagatggacaacagaagaagggttgacacctgtacagtgggtgtcctagaaagaagaaaaaataaagagaggagagaaaatatttggagagataaatgtatgagaactccctagaataaaagaaaaaaataagacatcagaatcaaagggtcagtaaagtgccaaataagataggtaggtggaagaaatcattatttagatacattttggtgacattaaagaataaagacaggccaggcgcagtggctcacgcctgtaatcccagcactttgggaggccaaagtgggtggataacttgaggtcaggagttcgagaccagcctggccaacgtggtgaaaccctgtctctactaaaaatacaaaaattagccgggcatgggggcaggcgcctgtaatcccagctactcaaaaggctgaggcacaagaatcacttgaacccgggaggcggaggttgcagtgagccaagatcgtgctgctgcactccagcctgggcgacagagagagagactgtctcggaaaaacaaaaagaaaaaagaagaacgatgacaaggataaaaagaaaaaagaatgaagacagggataaaaagaaaaaccagacttccctccaa

SEQ ID NO: 198357 - DNA, 150 bp, Homo sapiens
gggaatgatatttactctgtttactatcaatgtgagcacggacatgcggcatcatcgagtgagactggtgttccaagattcccctgtccatggtggtcggaaactgcgcagtgaacagggtgtgcaagtcatcctggacccagtgcacag

SEQ ID NO: 198358 - DNA, 457 bp, Homo sapiens
caccatagagctgaagtctgtagcctagtcaagttgtagccattgtaacatcataacacaacatattactcaggtgtttgtggcaaggctggtataaacaaacctactgcactgccagcggtataaaagtattgcacatggctggacgcgtggctcacgcctgtaatcccaacactttgggaggccaaggcaggcagatcatttgaggtcaggagttcaagacaaacctgaccaacatggtgaaaccttgtctctactcaaaatataaaaattagccaggcgtggtggcgtgtgtttgtaatcccagctacttgagaggcgcgtgtttgtaatcccagctactggagaggctgaggcaggagaatcgtttgaacctgggaggtggaggttgcagtgagccaggattgtgccatgcactccagcctgggcgacagagcgagactctgtctaaaaaaac

SEQ ID NO: 198359 - DNA, 281 bp, Homo sapiens
ttttttaataattatataactatacctgtattttatgtaaagatatctattccccgaacctttattttttttcataaggactttttccggtttgacctgaacctttttatttaaactaagtggccacccttacttcctcaattgtttgagattttccttttttaatcccaacaattttttttttttttttttttttttttttttggagatcttctctacttcctcgtctccttggaaatttttttcttacagtgaatctacaagtgaaaagttggacagta

SEQ ID NO: 198360 - DNA, 135 bp, Homo sapiens
tctcatttatgtccttttaagaactaaaacataccactgtaaaacaagaaatattcaatataatgtcaaccataaaaattctttcagaaacatagtagaaactgggttcttgaggaagccatgatgaaacggctt

SEQ ID NO: 198361 - DNA, 637 bp, Homo sapiens
gaaaaaaggataagtagaagatcctgattaccttttagtcatagatagtttcattatgttatcttttagggtctggaatacactgaccagtgtattagacaaaattttatgagaattggttaaagatatagggaagaaatgtatttggaaaaaaacaaaccaaaccaaaccaaaacaaaacaaaaaccattattttgagagtaaatacttggggggaagaagcttgcaagccacccgaatatggcctggactctggcgtgtgtgtgcgtgctggggagtatcttggtgttggactctggcatgtgtgtgcgtgctggggagtgtcttgatggtgatgttgtgtcattgcttcatttttggcactcagtcactactcaagaaaaccagattgaaaatttggaatctgtgcttcagtggattgaaactggcctccagtcactaaggaaaaaatcaaaacaaaacacacaagaatttagagagaatatttttctgccaaaaaataatttttcctttatgctatttcttatttgggtcaatactccaatggaaaaaatagatagattggtcaagagttcaatataattttctgtgacatttgaactaaagtaactcataaaaacttaaacacaggaaattg

SEQ ID NO: 198362 - DNA, 417 bp, Homo sapiens
ttctttttgagatggagtctcgttctgtcacccaggctagagtgcagtggcgcaatttcagctcactgcaacctccgcctcctgggttcaatcaactctcttgtctcagcctcccgagtagctgggactataggtgcatgccaccatgaccgggtaatttttgtatttgtttagtagagacgaggtttcaccatattcatcaggctggtcttgaactcctgagctcagatgatccatccacctcggcctcccaaatcagtttgatatttcaatagtcagaaactacatggaagggaaaggaggtagctgttatagtctttctgatgaataacatcttaatcatatgttaatgcatgaaagaaaatgggaactctgacaatgccaactttatcaaaccaaaaaaattccatcagctac

SEQ ID NO: 198363 - DNA, 161 bp, Homo sapiens
aggatgaggggggtgcaaattgctttgcttcttgtggtagaggtaaatttttaactttttggaaattgaaaacaacttcttaataataaggaacttgttttatcttcttattgccagtttcaaatcctttgaaggctatcatatatatcaatagagctgag

SEQ ID NO: 198364 - DNA, 88 bp, Homo sapiens
agctgcccgtgaagacagccacaccacacaccgcggcctgtgggtcaaacctaacccacaaaggtgttttgttggatccattccatgt

SEQ ID NO: 198365 - DNA, 349 bp, Homo sapiens
aagaaaaatagatgggaaagggaaagaaaggagcaatttgacaactaaaaatagttgggaaaagataagaagaaacaagtgagtcttagagcaaaggagtgaatggagccaacagatctctgttgctctttgctcagatggggtaggccttggctctgccaatgagtggtgtaaagtccaaatactgtaagggaagaggacgtgcgagcagccatgaaatattcctttctgagaaactaggaaactggacaagacccctccggatggtgcccaggatagaatgtgacttgaaaatgacaaagagcccaaagtgcagtacttctttaacctatttaagaatgttgaacaa

SEQ ID NO: 198366 - DNA, 592 bp, Homo sapiens
aatctctaaatagcttgtgggaaatgaggtagatagtattagcaccgttttgcaggttagcacattagggcagaggtagatgacccaaagctctgtgggagtctggctatgcctgccttgtgccctctgcctaacacacttttgcccagtgcttggggctcaatgaatggtgacttattcaatgacaatggaaggtgatttgtgcaaggccaccagtaaattagtaacttagtaaaagttagaatcaaggatgctccaacggttataacaagtcattgtatttccaaactagctggaaaaactaataaaatgttgttggggggggagcactaaaaataaatgggaaaaggaaaatcaattgaaggatgtcacaatataaaaggttaagattcacaaatgtgagatcaattctaagataaatatcatttaatattcagagaacatattacttgatgggtgtaccatggtttactcaataacctactattaaacatctactgggctacatttttgcacacagacctacctatttcacaatcggtcaaaagggccttgaccattctcagttcccacaaggtagaactttcagaat

SEQ ID NO: 198367 - DNA, 786 bp, Homo sapiens
atttagtgttaatcctgtgtatattacatatacacagccaactggaccttcttgtactccatcaccatctcctcgagtgataccaaacccaactacagtttttaaaattaccgtaggccgagcaacgactgaaaatcttttaaatttagtggaccaagaagagcgctctgcagcaccagaacctattcagcccatttcagtgataccaggctctgggggagaaaagggaagccataaatatcagagaagttctagttctggatcagatgactatgcctacacacaagccttgctgttacatcaacgagcaaggatggagaggttagcaaagcaactgaaacttgagaaagaggagctagagcggttgaagtctgaagttaatggtatggagcatgacctgatgcagagacggctcagaagagtcagctgcaccactgcgatccctacgcctgaggaaatgacaagattgagaagcatgaacagacaactccagataaatgttgactgtacactgaaagaagttgacctccttcaatctagagaagtatactacagcagaagctctcttaaactttcatttacccaactcaccagattagagatggtcttcattttctgtggaaaatatactgactgatgtccacagctgctgcatacttttgactagtaggctgcattctggaaactttgatccaaaagccatgaataatttttatgacaacatagaacctggcccagttgtactccagcctggacagcagaacaagaccctgtctcaaaaaaaac

SEQ ID NO: 198368 - DNA, 255 bp, Homo sapiens
ttccttttggttttcttccttgacccattggttatttagaagtacattttttacttcccatgtatttgtttgtctattttttcttttattgatttctgatttcatgccattctgatcagagaacatactttatattatttgaccctttaaatgtattgacgtttgttttatagcctgcctagcaggtggtctgtcttagaacgttccatatgtacttgagaagaatgtatattctgttgttgaaagtgttctata

SEQ ID NO: 198369 - DNA, 304 bp, Homo sapiens
gttgggttgtcttttcctctgcctgatatgtgaatgtgtaagtgtgtgtgttgaaaatattatttgcaaaatctgttgagacagtttgaggcctaggatgatgacatcatcctcattagtagactgaagtttgtttctgcctggtgcttgggggccctagcaatgagtcatcacttcagttctatttcaaggattacagagtcattagaagcagagctgcaattgttgagggtccatttattgtggagtctctttttttccctaggggttgcttccagatcccaacccacatttccctccttct

SEQ ID NO: 198370 - DNA, 307 bp, Homo sapiens
tgatattcatctcctccagtgtgggggatgttttcccctctctgacactgcacaagctggtttaggaggtcctgggcaggcactggcagaaggcaagaattatcttttcagtttttctcaatcctgctaacaatgcccaaagagaaagtctcagttcagtgctattgtgtcattaactcctctctactgcttgctaataatctgtccttgtaacagagtagacctcagagtcagacaatcttagttttctggaatttagtaacactattactaagtaaataaatgaattatttatttatttatttat

SEQ ID NO: 198371 - DNA, 556 bp, Homo sapiens
gcgcaatcatggctcattgcagcctctacctccctgggcttaggtgatcctcacacctcagctttccaggtagctgggactgcaggcatgtgccaccacacctggctaatttttgaattttttgtagagatagtgttttaccatgttactcaggatggtctcaaacacctggactcaagccatctgcctacctcagcctcccaaagtgctggaattatacatgtgagccctgtgcctggcccgttaaatctttttaaaagttttttaaagtttatgtacatttatattgctttttgtcttcttcaccttgtgtttttcattcaatgttctgtttattatatttatctatgtttatatgtatagctctaattcactgctacataaaattacattgtttgaatatatctaaatgtatttatttttccattttcctcatgatatattaatagaatgtttcctttttttaatttttacaaacaatactactgtgactgtgaatgaaaagatcaatggattcaattatattaaaataaatactgtaccaaaaatatcttat

SEQ ID NO: 198372 - DNA, 570 bp, Homo sapiens
cagaagtacaattctttttgtataaatgaatataatagtgtcttttcagtacaattgggcttcttaaatatttgaatacagtatatacgaagtggtggttttataacatatatctgccctctgctggtgaaaatgcgttattgctgtgaatttaacagctttagtaatttctttgaatgtaataatactctgtaatttcaaaagttgtcataaaactaaacttgggaaaaaatacccttatcatttgaaaggaacattctctttgggacagttctgcacaatgaattattctgcccaaaatgccagtagtgccctgtttgagaaatattgacctaatatactgatgatgatgatttttacattgtggctgtctctctgtgttttttttaagtttttctgtaagttctaggtttgtcctgtccagtgtggaagtcactagccataaggctatttaaccgaatttaaacattcactttcttaattccagtagcctcatttctaggcttaatagccactgtggctaggagctaatgtattggataatgcagattatagaatgtttccagcatc

SEQ ID NO: 198373 - DNA, 354 bp, Homo sapiens
aaaatgtctaagcgtggggctaagtcaggatgcagagttcatcaaaaagtccaggaataagcaatggcccaggcatgagacatttcagtgaacagctgaagggacaaccttaacctggcatcagtttacaatgtgtaagatggatatctggtagcatcctaggactgaggacacatgaccaccttcatgtcatcagcccttgggagctcaatcccaataatcaggatgctccccaaacatcttaggcctgtccttcagaaatctacaaccggcaactgtcacctgcttgttctcttcatttacacttccagcttgtaactatcccctgggcatgacaagggctagaggtcagta

SEQ ID NO: 198374 - DNA, 430 bp, Homo sapiens
ggcagaggctgcagtaaggcgagatcatgtcactgcactctagcctgggctacagagtgagactccacctaaaaaaaaaaagttgtgaactactgctttacgcagctgggatgactctcagacctgatattgagcaaaagaagccagacacagaatatatactatgtgagtccatttatataaagttcaaaaaaatatatgtcagaatagcattttatttccagagtgggtagggtggagggatggatattgattggaaagaggcatgagagagttttctaggggtgctgtaaatgttctgtgttttggccagacatggtggctcacggcagtcatcccagcactttgggaggctgaggcaggcggatcatctgtggtgaggagtttgagaccagcctggccaaatggtgaaaccctgtctccactaaaa

SEQ ID NO: 198375 - DNA, 355 bp, Homo sapiens
ccagtggaaagagcaactcagaagactaacgagctgagcaaccatgtatgcatcattttaatttttatttatttacgtattttttgagacagggtctcttgctgttgcccaggctggaacgctgcggtgcgatcacggctcactgcagcctcaacctcctgggctcaagcaatcctctcatctcagcctcataagtagctgggactaaaggtgtgcaccactacaacaggctaattttattttattttgtagagacagggtctcactatgttgcccaggtgtatgcatcgtttagcagtgcttctcaaactgaatgcgcactgaatgacttgaaaatcttgttaaaatgcaggtt

SEQ ID NO: 198376 - DNA, 291 bp, Homo sapiens
attagcagtcctacccacctgcacgaggaggttattttccatccttaaaaccagtattctcccaagatggacggtaatgtagctacaactacaaactcttaaatagacttactccaggcatgacttaattgatttcagaaaaataaacaaaagcaaaacaagcaagagaagatccatgatttcatcacattgacacttggctctaacaattctatattcctattctcagacatctccaaggtcttccagtgacttcgctcatgttccttcttccactaggaataccttttc

SEQ ID NO: 198377 - DNA, 254 bp, Homo sapiens
tacatgcccagcccttcaacaagattgtgtgcggcacctaaaatgttgctagtgaaaggaaaaagggtgacagtttattcggcatctactatgtaatcaactctgtgctacatgttttcacacttcacatgtgtttgtttttaaggctcttctttcttatctttttttttttttttttggaaggtttcgctttgtcttctaggctatagtgcagtagtgcaatcatggctcactgcagcctcaacctcctgagc

SEQ ID NO: 198378 - DNA, 744 bp, Homo sapiens
gcttaaaactcccaaatgtattcccagcgaaagccccagtccccttccaccaatagacttttcattgtcctgggaattttaggcccattttctaacctgtttttacccgacctggactctaaggatagtagccagctaggaatttgggttgtctacaccagatacttaagttggctcctttaaaggaagcagaggttctttgctgaatggttaccccacactgatccctgactatggccctaaggctgggactcttgaaattaattggaatggggtagacagtttcagaactgagcaaagtgtgggtggagaataggtactgactggattctgtttctcagggatggggaacgtactctccggacaatgaaccacaaccaacgccaccaaccaatactcataattaataattacaacagccctggtgcagaagacattgcaccatgaatgcactaagcatgcccgaaacctcatgcaaaaagtttaaaactgaggcgtctgcaggagctgacagggcagggaaaggcacacacaccaagatcaggtgaagtcagcactgagctaatgtcctgttccaggataagcttagttgggctgggtctgaaaggtggaaaccagcacttggaaggtcctggagaagagacaagggcaagagcagagaaatactgcttacctgtggtcggaaattctggtgttttcaaatccatatccccagcctggactcctctctcaattccagaactt

SEQ ID NO: 198379 - DNA, 449 bp, Homo sapiens
ctggttcagttggtttcaagcctgttcaatttgctgtaactgaataaatgcatatagaagacttttggtgtgcagagccctagtaagcatcattgtgttgtgttgcaaaaattttgctttgtgcatattgaacttttccagaaagtcacaacttttccaaagtaaaggcacttgacctagatttatgggtgaggtcccattctaattagtaacatggaatactactgctacatagatatacatcagctgaactgtgatacaggagaagaaaggaagtgagtttacagggagtgaggaaaaatgacaccttatgtatgtgttttgtggagcacttctttgtcccgtctacacacttcacatttatttttacataacctcactacaaactcacgtagaatatatgtagttttgtgttggtaaatgtttaataaaagcaaacaaacaaaaac

SEQ ID NO: 198380 - DNA, 749 bp, Homo sapiens
tgcactccagcctgggcaataagagcgaaactcctgcctcagcctcccacgtagcttggaatataaggatgtaagctaccaatgaattagtcttgatgaaaatttgaaaattactgaaaagttataaagagaaaaaattatctgcaatctcactacccagagataaccctgttaatatttttctgtatttcttttcagtctttgtctgtgctatttctatgtatgagtgtgtatacatgtgtttgtgtgtgtgtgtaataacaaacttgagattatactgaccatatagttatgtaccctgttttttataacctaacttcatacatatttacccatgtctatgaaaatgtgacttttaaaaatggctgcctaatattctattgtatgaatatgccacaatttaactacttctctctttggatattaggttgttctaatctttcaccattataaataatagtgggatagacatccttgtttgtaaaatttcatctctatattagactctttaggatatactcatgtacatggaataagtggtttagacagtgagaactttttaggctctttaaaatatttccaagttataaccctttagaaagattgtactaaattaacaatgtatgagtacccatcattctgccccttcaccagtatcattatttttttaatctttgacagttggttaacataacaatcggttgtttctttgaccattctaataagagttgctttataatggccgggcg

SEQ ID NO: 198381 - DNA, 345 bp, Homo sapiens
ctttagacaaaggagggagagattattaatgaaaccatttttataatctagtttttcgtaatggaaagaattcggcagagaaagattattgtgtttcagctccttaatattgcatcccgttttaactttccttgaatagcaaatagctaaagcggtatacagatgtgttacctttggcttcatgggaaatgcatatttcaagaactttaatcatctagagaagaagtttaccaaactcaaaacagcagtttttgctgtttaatttttcttacgaataagaaagaatctgaaaataaaaaagaaaagaattgcacaataatttagggtattgtccaaaccaaccca

SEQ ID NO: 198382 - DNA, 624 bp, Homo sapiens
tggaaaagcacttcataattttgtcagaaaaaatatgtatcaaagtaatttttcactttgttacaaattcgagtgtgtcaacatctactctatatattaaagtctattcaacacatgcataaataatggaattaataatataaaatataaatgtgcaagtaagttgacaaattgttgaaagttatttgctagaacatgaaagtcaaataacaacagttggggaataccaaaatatcatgtgcttttttatctgtctagggagattgattacttaatccacttctttttaaagcttcatgagcactcaaatatattgtaactttctgaatgaaaagataatatacaatgaatgtgagggtttcatgttgatcttcctattgtcttttaacaacaaaacaacctttcaaacataacaatataaaacaaaaattatttgagtatctagcaaacttctcttggagaaagaaatatactgagacccaatttgctgtagagagtgagattccaaagcatattttagaagaagagaaattaaagaaaaccttaatttccttgcctaagaaataaatgtagaagttccacctctagaatggcaatgtgaagagctccatggatcttttataa

SEQ ID NO: 198383 - DNA, 620 bp, Homo sapiens
atgcttagtgaaggaagccagacccaaaaggctatatagcatatgattctatttatataaaacgtccagaataggtaaatccataagaaggtagactagtggctgccagggactggagaaggggaaaagtggggagtgactgccaatgggtatggaggtttctttttgaggtaatgaaaatgttctgtaatgagatagtggtgatggctgtgtatctctgttaatatactaaacatcactgaactataccttagaaggtgaattttatggtatgtgaattatatctcaatttttaaaaaggatctgggttgaaatggaatgtgatcactatagtggctccacaggccatctttatgggtagtgtgatgtgagttttgggtacaatcacacagctctgcactcagaccctgttttctgtttaataactacaaggaatgctggcacatccacagtgacagggaggctcctcaatctctgccccaaacagggctggataaaaaaccaaagtgggacgctaaaatgtgagtctcatgttggcaactatgtggactgaatgtctttacaagggcaggatggctaaggaaaagaaaccaagttatttagttaagaaaataaagaag

SEQ ID NO: 198384 - DNA, 224 bp, Homo sapiens
agtgtgatggatgtacagagtaatttgtttttgtcctccatcaactggcaggcactcatgaaataagctgaattgtgtttaattaggtttggggctttgccaggcaagtatgatagagaacgaaggagcaagaaaataaataagtaatcagataaaatttgaacttgaagatatttacaaggaagtgagtttactgattgaccatgaaatgaaagccaggcaat

SEQ ID NO: 198385 - DNA, 385 bp, Homo sapiens
tagcgacccatgtcggcgatgtggtcgtgcgcggcgcagtcccagctactcaggaggctgaggcaggagaatcacttgaacccaggaggtggaggctgcagtgagcagagatcgcccactgcactccagcctgggtgacacagcaagactccatctcaaaaaaacaaacaaaaaaactagctgcttcttctgttcctaccttcctacctttagttgcattattttccacgtggtcagaaatctggggattttttttaattaaaaaaatttttttagagacaggatatcgctatgttgcccaggctggtcttgaactcctggcttcaagcagtcctcccactcagcctcccaagttgctgggattacacacatgggccacagtgca

SEQ ID NO: 198386 - DNA, 521 bp, Homo sapiens
agcaagacaccatctcaaaaaaaaagaaagaaaacggggaaagaaaccgtaacactgcggatggagctcaaaaagtaaagctgcttatattaatttcatatgaggtcaaatggttttagatattttaatacaccctgagatcattgaggtgtattagagtgtggtaactaatgttgatagggctattcacattactgtgttcagtgtattcatatgaaggtagtaaagaatgtattacatttgacaaattatactcagggattcaaaagttggttccagaatttactgaactaatatttttgagcatatattgtcttagagcagtatatacatatgtcctggaaatgctagtgtgtccattagcctttaaaaataatattaaaaatatatatccttatttatgtaaatgaaatatgacaaattttttggcaatttttcagttttttggaattgtaagttttcaaactttacattgggtttgtttttatgcaaggaaggtcattttgattgagaaaagtaag

SEQ ID NO: 198387 - DNA, 451 bp, Homo sapiens
gatgtgggtgatctagaaggatcccccagaggcacgaagggaggatgagtaggcatcagtcagggaaaggagagaagggaatttgaggcaggaagcaaagacctcaagaactctgatgagtccatacttactactgaaaataaccaatctctgcctagagaatagaggtggagaaagaggcagactggactagagtagaattccaccaggccctgaccagctgcttcactgaccacatccatcatctcatctcacctcatcctcaccataagcctgagaggcaggcaggacagtgggaaatgcaaggcatagggcaaacagcctgatagtaccagggcaagcccaagtgtcccatccacccaaactgtggccacgagtcttgattctacctccgttctacaagtgggtccgggaatgcatgcaaatggaggagagagaagagacgcaccgc

SEQ ID NO: 198388 - DNA, 667 bp, Homo sapiens
cataaccttaattttattagtttatagccataaatgtattgtgtattagagacaagatagaatttagggaagcctgttagtgcccctaacagactcacagtctggctgaaaacctgattttctattctatacccagaatctctgaggagcagacttagtcaaccaattccaaagagactggtgtaaaaatcagaaaaccggtttgtcatgttgctgattatatttgctccctgttggccaatctatatgtaaatccaaattatagctagaaatttacctagcgagcattccattagatcaagggcagtgctttggagaaccatatggccacaagtcctcttgctgtgatgacatagcctgttatttatggctcatagattcttatgttgtatccattttggttatgagtaatggggttgattaatttttattttgattaaattttgttatatttttcctaacattccaacattcatttgggaaataagaatttctcaaaattcttattctagaaataagaattttcaagtgtgcagtgaaatcaaaggaatttgaaaataaacacctgtatacctgccagttagggtctattaacatcttactataattgccttaccagatatttctccacccattcatccattttttgatgcatttcaaagtaaat

SEQ ID NO: 198389 - DNA, 442 bp, Homo sapiens
gctactatcctattgctttcctaataccataactttacaaaaaaaagttttccataacctctcctctcgttctctttaactcactggaatcaagcttttacctccacctctgaaaatgctgtatgaaggtcaataatgacctctaagttgctaaacagagcagtcaactccgaattctgaccttccttaaatatcaacaatagctgacattgatgatcactctctcttccacaatagagtgatttttctcctaccttactgacaactccatcacagtctactttggtcattcctcctcatcttcactttgataataaagcatcccaggctgggtgcagtggctcaagcctgtaatcccatcacttcgggaggccgagacaggtggataacctgaggtcaggactttgagaccagcctggccaacacgatgaaatccagcctc

SEQ ID NO: 198390 - DNA, 409 bp, Homo sapiens
gaaaatttcagaaataaacaattcttaagttttaaattgcatgccattctaagtaatatgatgaaatctcgtgccatcctgctccatcctgcttgggacatgaatcatctctttgtccagtgtacccacaccatatctgctacctgcccatcagtcacttggtagccatctcggttatctaattgactgctgtggtatcacagcacctgtgttcaaggaatctttattttacttaataatggccccaaaatgcaagagtagtgatgctggcaatttggagagaacaaagcagtaaactgcttcaagtgaaaaggtgaaaattctcaacaaggaagaagaatcatatgcttatattgctaggatctatagtatgaatgaaacttttatccatgaaattctgaaggaaaaa

SEQ ID NO: 198391 - DNA, 176 bp, Homo sapiens
aaattatatttatagaatgaaatcaacctaccaattctttctctctgcccagtctcttatgacattgaatctgtataaattataagctataaactttcaaaattggtggtgagttaaaattttattttctgttttataatatctttgaaaatttcttcatacaaattaaaacaaaa

SEQ ID NO: 198392 - DNA, 143 bp, Homo sapiens
ccaaatgagctgcctctccttcacgctcccgtcgcatcctctgtctcctcttcaatgcccctcacactgaatgttaattgcctcaatacgtgccctgtcccccactagggctccctccgggcagaagccaagtctttttcatc

SEQ ID NO: 198393 - DNA, 598 bp, Homo sapiens
ttatgatgttcagaattctaagtatagcatgacaaaacccttctcctattattttctttaaaatatatataaaaaacttttgctgctttttggtggataataacacacacacatgtacacacacacacgtgcatccccattaccttttaatggaacaaggcaagtcctttaatggggaaacatgcattcctattaccttttaacgggacagtcaccattaaaaatgtctgcagttacgtatttctaaaatcagctctgtgggtaagaaatttaatgtagctgccgattctgtgcggttctggggaaataatagtttacaatcttctaatttgcctctaatttcacttctaactccaacctgtgctcctgaagcaagacgtttttggaccgtcagcaggcagatgaaggcctgagagtggtaggagagctattgtgggctttcctacctcagggctagaggagggcttggagaccggcaaaggaaaagatggaccatttcaagtctcagagcaaaaatactaagagacaaagttgggatggaaaatgaaagtgacgtggcaatcgatagaggaaatttacacaaatctgaaaattctga

SEQ ID NO: 198394 - DNA, 457 bp, Homo sapiens
caagaaaatggctgtaaatatgtaaattaaatttgacctgaaaattagaaggtggtcaagagaaattaaccggtgtctaatgatgattgttcagttaagagttattcactaggggataaatgtcgaatgatttaatattacttccttaaaatgacatgtgctccttgaatttaatgaggaaacggactaatagcacggggaagagatccaatgtgaagaaatcaagttgttcagcattataccaccctgaacactgcactctgtgcatggaaaaataagaatctccctaaatggactgaaggaaacagtaatataaacatagaaattactgtacatatttaaaagataggaaagtcatgtaaacttattatgtattattttttgtttctttgtaaaatccatgaaagaagatgttcctaaaaacagagaaaggtggtcttactttacttaaatagta

SEQ ID NO: 198395 - DNA, 899 bp, Homo sapiens
tgtgtggagagtggacatacctcacctgtgggtgtttactgcccttgtggcctggtcagaggctgcagggtggctcctggacccagatgttgtgagagacccttagtgcactcgtttgatttagttaatatttatgagcagctcctgtatgacaggcccattctgggtgtgagggtgggggctgtgatatgtccagatgctctcacttaaagaaggttctagactcagaggcaagacgttagagaaggttctagactcagaggcaagaggttagagatgggtgagtccatctctttttcagatgagggggcagctcagaggaggagaggggcttcccaaaggtgcacagcaaggtggcatcacagccaggatcgggacctaggaatcttggaacccttccctgcactggccctgggacagccctgggcacccaaggccctgcctccctactggctcccaggagaatttctcaaaaagcagccctccagccccccgcagcctctccacagctcccacctgcctcctcatggcccccagacaccctgcgagccccacctccagatctttttcctgccactgccagggatgagttccccttgtcctgtccgggctggaccctcctgggtgcccagcagagcagctgacactgacagagctttcgctggggccaggcatgcgcattatctcatctcacactcaccacactgaggaaggtctattacccccatgtgacgggggcggaaactgaggcttaatccaaggccacacggctagcaagtggggggcaggacacaagtccagactgcctccctccccaccacaaagtgcttcagcctctccagcagccccttccctcagctctaatgatgttgcactgtttcccaccccgtcgggtggag

SEQ ID NO: 198396 - DNA, 460 bp, Homo sapiens
ctaaacctaaaattaaaattagaaaaaaaagagtctctttctcagacccttccaaaccaacatgtgtgaaacatagtgagttgtccttttaaacttttatcatatcatgtaaaggtgatgtactccacaagtggcaggtatttactgagtgcctgtcatgtcaggcatctgggagagactagggtgaagccaggcacaaaaccacacattcaacagtgaattgcatgcatgatgtattaccattattatagtgagtatgatgaagaacaggatgttttgagagcatataacaggatctcacctgagttggcaattggggaaggtttctgaggcagggcagtgaagccaagaggaaggacctgtaggagaacctttggtgaagaggagggatgggcttttccagcagggggaatggcattgggatgttcccatgtctgaaggggacaaggagttgggagga

SEQ ID NO: 198397 - DNA, 718 bp, Homo sapiens
tgtgctgtgcagacttgtatcctgagagtgtttttctgaacctgtttccaaaacctatagattctaacaacttcaagacttttccttccgcctgtggcattgtggggaagacgtgttcctatggatggataggtggttgtcagccaaaaactgctttaagttagtcaacatctttgccacagaaagcatatcaagagatgattcttcaatggattctatctgtcccagacaggacaaagagttcagtcagacacagctggctgcttctccacagcagaggtgggtgaaaagtgggtagaggtgatgtactcctgtactactgccaggaggtctcagatttggcagcctattccttgggagagttcaggttcacatttcaaattacacagtagggatggatcctgtcaattcttgcttacaagcctttgaagattttctattgttttccaaacagcattttaaaatccttaatatgaaccaaaggccttaaacaaagaggtctccaccatttacactactcttttccaacactatcctccaagttccccaactcctaccatattttagacctcagttaaatgggttcctccagttttccctgaccaacgagcccacataggttaggcagccctgagatgctttcatagcactccatactattcctatggcacatctaccctaactataattatttttatttcatgcttaagtgcttcac

SEQ ID NO: 198398 - DNA, 569 bp, Homo sapiens
aatgggagaaaatttttgccatctactcatctgacaaagggctaatatccagaatcaacaatgaactcaaacaaatttacaagatgccaggattttaaacaaccagtttcttggttgtccgggtcccctcaggctgttactcctcttctgcattcaccatctcagtcctgtatactttactcaggagacctgtataactgtcttgtctatctcctgcttgtttacttttggaggcactcttcttgggcacatctttgacaacagctttgcttggagtttcccaagaatctggatgtgctaacattcatgagggaccctcaggggtcagcattggaagagcctttcaaaatactctagaatcctacacatcttgtcttcaaggggcttttttttttagttctttagttaggacttcataatggagtgcccttgtctaataactatgaccttttttgagcactaatgagttttggcattctgaagctctccccagatactgactagcaccctgggagtttggtcaggttcttggtagaagttcgaccttcccattctctgtttcctcacca

SEQ ID NO: 198399 - DNA, 629 bp, Homo sapiens
gaggagagcttggctgaaggagtgggagtgacagttacacattttttaggcctaaaccacagacttctttgggaagaaaggggttacgtcttcctacaaattcagagccagctgctcatgccatgaatgcgtggtatgacccgatctgagtgtggatcattgaggcggccctcccatggctgacctgctcagctctgacagggcccgggctgcctctgctagccgaggagttactgagaataagttgccgttactcgagccttggtcactgcagcaccttgtcaggcacttcaaatctcatgtcatcctcacccaccctaggtggtaggtgctatcattgttttttggtccctcatgaatctcctccaacccctggcatgtctatttgggaatcttttttccaggaaaggaggcccagtggtgctaggcctctgaggcttcagttcatttaactcagaaaaatcccccgccccatgactcagggagccttccatgcatttgtttcacttaaggaaaatgacccgagggtgagatggaaagggaattggctgttgccaggcagagccctgtgtgtcaggggccagcagccaagtgagtgatccaggaagtcatccaattgcaaccagaaa

SEQ ID NO: 198400 - DNA, 420 bp, Homo sapiens
cgatcttggctcaccgtagcctccgcctcttgggttcaaactattctcctgcttcagcctcccgagtagctgggtctacagagtggcatgccaccacgagcggctaattttttgtatttttttttagtagagatggggtttcactgtgttagccaggatggtctcgatctcctggccttgtgatccactcccaaagtgctgggatcacaggcatgagccaccgcgcccagccagaagtcttgtttatttaacccaccactaacaaatcagagtgtggccttggctgttgatagcagagaataatatttattggcttggtgccattgcttgggcaagctttctaaccatagtgggtaaatgatgccctgtgtcttggcagtcaggcctgggctgctcctctctgggagggggagccccagg

SEQ ID NO: 198401 - DNA, 460 bp, Homo sapiens
ttgtattgggctgacttgtcccagaggcttcaacaggcacagcccagaaccaggaatagtcttgataatattatctaatgtgctctggaggctctcccaacgctcccccaacatcgggaaaagaaaaacaaatttcctttttttacggaatgagtttatagattcttgttctctgtaactagtgacttcaagtattctgttttatctaagaagtacaatgtaagtcatgagaagcctgagtaggctgaactacagctgtttgggcaccatagtgagggttataggataagcccatgcccagggaaacctagaaaatggacatgtgggttgcttggcaacggtcatgtgcaatcctgtctgtcctgcctctgtatccctgctttcacgccactgtaaacttgcttcaagctagcccaccaccttttgtgaaatgtgcataaaagtcaggttctgtctttgt

SEQ ID NO: 198402 - DNA, 333 bp, Homo sapiens
cttgtgtcttttgggtgtgttagacctgggaaacaatctgtcttctcctttcacgtgccccaaagcaggactccaatcttccccgggcctttctgattgggagtcttaagaccctccccagagagggccccaccctgttccctgggaaaggcatgctgacaaaaccctacaggacggtttggagacagggttagttcaactcgtgtgtgtccccagagggtgacaccacagggatgaatgggagttccaggcccctccccagcacctcaacctgcacattgcttcatctggatcctttgtaacatcctttataataaaccagtgaaggtgttt

SEQ ID NO: 198403 - DNA, 346 bp, Homo sapiens
gtggggggtggtcagcagaacggcggtcccagagaccatggggccctcatccctagaacccgtgggtgtcccaccctccctggccaaaggggctctgcagatgggactgagttgagggctttcacacaggggttcatcctgggttatacggatggcccactgtcctggaagggtccgtagaagaggagatgcctggccgggcgcggtggttcacacctgtgaaccaccaacacattaggttcacacctgtgaacctccaacacattaggaggccgaggcaggcagatcacttgaggtcaggagttcgagactagcctggccaacatggtaaaaccctgtctctact

SEQ ID NO: 198404 - DNA, 970 bp, Homo sapiens
  misc_feature (9)..(9): n is a, c, g, or t
  misc_feature (34)..(35): n is a, c, g, or t
  misc_feature (45)..(45): n is a, c, g, or t
  misc_feature (51)..(51): n is a, c, g, or t
gcagagggnagttggggaggagtaagtttagganngcctcggtgnaaaacnatattggcaatgttacgggatccagtgtcacgttacctgagcgagtggaaacatgtccagagaggggccacttggaaaacctctcttcatatgagtgatggaagaagccccaccccagatgagctgcctacctgctaccctggggatgactggtctggggtcagcttgcgggagtttatggattgcacctacaacctggctaacaatcgccaggtgcgcatgctggctgacctcagcctggtgggctgctataacttgactttcatgaacgagagtgaaagaaacaccatcctgttgcagagtgcaaagaacaacctgaagaacatggccttctttgggctcactgagttccagaggaagacacagtttctctttgagagaacattcaacctcaagttcatctcccccttcacacagttcaacatcacgcgggcttctaacgtggagatcaacgagggtgcccgccaacgcattgaggatctaaacttcctggacatgcagctttacgagtatgcaaaagatctcttccagcagcgctaccaccacaccaagcagctagagcaccagagggaccgccagaagcggcgggaggagcggaggctgcagcgagagcacagggaccaccagtggcccaaagaagatggggctgtagaagggactgtcaccgaggactacaacagccaggtggtgagatggtgacctcctgccctctcctctctcaggagggggagggtgagcaggcacattgactttctgttgaggtaccttggagaagctgagccattctgaggacatctggctgtgtgtgcttgatttggacatcttcttccttctttgtcttcatttttatccagctggagattatccgtcttgttcttttttttcttgacattttgcaattggtgatattaagtagggt

SEQ ID NO: 198405 - DNA, 936 bp, Homo sapiens
cttctaggaatttctattacatcacaatgttacgggatccagtgtcacgttacctgagcgagtggaaacatgtccagagaggggccacttggaaaacctctcttcatatgagtgatggaagaagccccaccccagatgagctgcctacctgctaccctggggatgactggtctggggtcagcttgcgggagtttatggattgcacctacaacctggctaacaatcgccaggtgcgcatgctggctgacctcagcctggtgggctgctataacttgactttcatgaacgagagtgaaagaaacaccatcctgttgcagagtgcaaagaacaacctgaagaacatggccttctttgggctcactgagttccagaggaagacacagtttctctttgagagaacattcaacctcaagttcatctcccccttcacacagttcaacatcacgcgggcttctaacgtggagatcaacgagggtgcccgccaacgcattgaggatctaaacttcctggacatgcagctttacgagtatgcaaaagatctcttccagcagcgctaccaccacaccaagcagctagagcaccagagggaccgccagaagcggcgggaggagcggaggctgcagcgagagcacagggaccaccagtggcccaaagaagatggggctgtagaagggactgtcaccgaggactacaacagccaggtggtgagatggtgacctcctgccctctcctctctcaggagggggagggtgagcaggcacattgactttctgttgaggtaccttggagaagctgagccattctgaggacatctggctgtgtgtgcttgatttggacatcttcttccttctttgtcttcatttttatccagctggagattatccgtcttgttcttttttttcttgacattttgcaattggtgatattaagtagggt

SEQ ID NO: 198406 - DNA, 2266 bp, Homo sapiens
  misc_feature (510)..(510): n is a, c, g, or t
tatgatttaaaaatttgaagtattgactgttaatgctttgcttgaagtgttacctgtgatcagaccccgacagtgtttaaggtaaagcgtggcctgtagatcccgggacgctcccagtttggccccaatcattcgttaccctcctggttctcagatccttcgaaatgtgcagatttgcagccctgcatcctgcttgtcactcagcgtggcccaagttttgtttcagaaaataggagccctattaggtcatccccagcttgttaagtctcattattgtgtgttttcccctgggttgttggaatttgacacagttttacctgatgtgatgcttgaaggcgaccctatgactctttttaaaggaagagtttgcaggacggttttggactggggcttgtgggaatggaggaggggaggtgggcacatggccggggaaacagctccaggctgcacgaccagaccagcgttcccaccctcaagagccagtgagaaaccttggggagaaaaagcaangatgggcaaggcttccctgttcgtctccactcatatcaaaatttccagcctgagctgggtgtggtggctcacatctgtaatcccagcgtcatgggaggctgaggcaagaggatttcttgaagccaggagttggagatcagtttggccaacatagcaagaccccccatctctaaacagtaaaaaaaaaaaaaaaaattagccaggtgtggaggcacgcatctgtagtcgcagctactcaggaggttgaggtgggaggattgcttgagcccaggagttcgaggttgcaatgagctatgagtgccactgcatttcagcctggacaacagagtgagaccctgcctctagaaaacaaaaacaaaaacaaaaacttctcccagccatcgagaagttaaaatgtggctcttaagttagttactgaacaccatacttcagcgtgctgatccctacaatttctgtaacgttcctagtaatcaaccaagaagtcgcagcgctgagacctcctgcttgcgtggatgtaccttttttggcgggcttttcctattgtggtgctggtggtttgtttgtgttttaaattagatgcagtcttttaaaactgtgaggtttcctacctcgcacctgatacctgcattcaggtatcagcaaatgcaggtatcagcttctttgggggaagaaaacccaggatctctggccacttgactctgaggctgccttgcagaactgcacagcctccaccccacccactattttcgtgaccccgaggccacggcccaggtgccattcatcactgtgcagcatggctttcctgtgctagaggaatgtttatctcctccatccagccatggagagcaggaaaatagagttcaatatgggtgggcattgcaacgccagcgcctctttctctgggggaagactctcccctctgtataagttgcagacacccactcttgtcacacatttggctctgcccacctggcctcacaggcatttgagtttgtgttccacccctccccatcccagagcccagcagtcagcagtgagagaagccaaatgtgtgcagggagtgcgaggcggcagctaccatgcaaactccaggggcacaccgccccccagtaatctctccccagagtgcatcaggcaataacaggaagatactcagctgttcattatgacatgatttcccattttcaaacctgacaagttggtcttgatgctgttattcaaataactgaaagtaaatggttgtgaacaaggaatttcagatcacagactcagtaagcctggccagcccccaaggctgtgtcttccttaaagttgggatctctgtattatctcatactctatagtagagcaataaacataagctgacttatgtgatcacttaaaactaccaggaagaaacattttccgtaataaatttagtgtaggattgctttgtcttctcacactcacttttcagaaaagaaaatgtaagtattgccaggcgcggtggctcacacctgtaatcccagcactttgggaggctgaggcaggtggatcacttgaggtcaggagttggagaccagcctggccaacatggagaaatcccatctctactaaaaatacaaaaattagccgggtgtagtggcgcatgcctgtaatcccagctacttgggaggctgaggctgaagaatcacttgaatacaggaggtggaggttgcagtgagctgagatcgcaccactgcactccagcctgggcaacaaggcaaggctccgtcta

SEQ ID NO: 198407 - DNA, 306 bp, Homo sapiens
gattggaaacagaagagagattctgggggtactgtgacctttaaagaatgtggcggtaaggaagaaatgagcaaaggagattgaaaatgccaaaatgaaaaaaatggagaagcatgaagtatcttggaaactgtatgaatatatgtcaaaagagtagaaaggcaaacaaggtctttcatgtcactaatagttgaagtagtatgagaatttagaaaacgtctttttgaattagcggtgtcattggtgacctttgacaaaggtaggtactgttaaaggcagaaatcttacacagatttcaagtgaatg

SEQ ID NO: 198408 - DNA, 491 bp, Homo sapiens
ttatatattttaaatgtacaaattaagaagttttactattttatgcaatcagtgtgtgtagattttcccttatagctaccagtatttttgttcatcattccatcttgtgttaaagacctcttccatctgggatagtcgtctcctcttatttaagtacatgtctttaaaaccccctttccttgaagatctcttctttcagttcttgtttgactgcagtgtctttattgctttctcagataggattagaatactaggtttacagttattgtctcttactacattgaagatacaaatcctagctagattgcatcatttcctagctcgcattgctgctattttgaagttggctgtcagtctaattgccgttcctttgaaggtgatcaatctcttttatctggcctctgggtttgtatcatttccctacagtgtttctagggatagatttctatttttacttgagatttgttgggtttcctggatgtgaagttttg

SEQ ID NO: 198409 - DNA, 371 bp, Homo sapiens
gacaacaaaatcatgtcattttcagcaacatggatggagctggaggccattatcctaggtgacttaacagaacagacaactgcattctgcaggttctcgtttataagaggagggctaaacattaaatatatatgaatataaagatgggaaccacagacactggagatcactagacaggggagggaggaggggcatgtgggctgaagaaccacccactgggtaccgcttttactgtctgggtgatgggatagttgggaccccaagccgcagcctcccacaattgacccatgtaacgaacctgcacgtgtactctttaatctataaaaagagttgaaattaaaaatgaataaagaaaataaaatgacatgagg

SEQ ID NO: 198410 - DNA, 242 bp, Homo sapiens
ctaaacagagaggacatccttcccactcctccaaaaaatcatagcttttattctggtgtatgtcttgcataaatttggcacaaaccccagttctgtcttttattagctgtgtggctctgggcaagttaagtaacctctctggtcatagtttagcttctccttgcccctgacctacaatattctcaggatttttccacagtgcaataataacggtcccctctcccaccacccttcactaaccc

SEQ ID NO: 198411 - DNA, 527 bp, Homo sapiens
gcagtggtaagcatttattacagcacctggaatgcagttacctggttgctttttgttccattaacaagttgtgaaaaagtcttgatggagcttttagctgtaaaacatcttagagcgtaatctgtttttagaagattaattccatctgaaatagagaagcaaatgataaacagcttaaaagacaccagagaaatagatcgtgttacagttgaggacaataatattattccacatttaagaaaatttttagcaagagaaaaaaaaacctgaaaagaaccatgagtttagctgtgcttattgcaagaaattagttcggatatttttgcaaagacgtgttaaaggggaacgaataattaggacttttctcagctaaaaaaaaagaaaagacgtagaaaatgttattttaaaaacatttttggtttatgtaattattcgaaagctccccttagaccctaaaaacaaaaacaatcctccaaactttaaatttatgatttatttatttacttatttttcaatctgaactttct

SEQ ID NO: 198412 - DNA, 451 bp, Homo sapiens
cttaaccgagtgatcagacctggtatctctcacggtagaatggactgtagtaaatgactcatcacttggattttgagtaaacaacatcacctagcaaatattaatatatctgcaaaaacatttagtctgtatacaattaaacttgtagactggggctgtccaatggatatatcatgtgagccacatttgtaatttaaaattttctagtagcaacagtaaaaaatgaaaataaaaagataaagtaattttgtaaatatattttatagaactcaatatgtccaaaagattggattttctacatgtaatcaaaatgattaataagatagtttacattctcttttatgctaaatctcctgtttgatgtgtattttacatttattgcacctcccatttgtattcagtttgatacaggtatacccaagatgtgggacattctgtaagacagctgttc

SEQ ID NO: 198413 - DNA, 490 bp, Homo sapiens
attttctactgtatcacactgagaagaaaatactgtgtcaattcaaagtcaaaggactctaactcaaccaatacttttgcttcttaatatctccttaccaaagactgtacttatccctgtcatatacatttatagttttaaatagttatcagtgtctgaattattcactttgtgatctatttatagctaatactgactcctctgggcactttactggcaggctttcccagaagtctacctgtttagaaattcaagtttaataacttcagttagtctagactgtatgttgttaatactctatagtatggtttagtattggtttacagctttttataaggtctttcttagttatctatgtaagtgtgtgtttctcaactgtaagcattcacagaagactaaacacagtaattcagtacaatgttgcaaaaacactcacattaaaaacagaagttccaggcaggcatggtggctcacacctgtgatcccaaca

SEQ ID NO: 198414 - DNA, 5524 bp, Homo sapiens
attactctttacctgtgaagagtagaacatgaagaaatctactctattcagatattctccagattcctaaagattagagatcatttctcattctcctaggagtactcacttcaggaagcaaccagataaaagagaggtgcaacggaagccagaacattcctcctggaaattcaacctgtttcgcagtttctcgaggaatcagcattcagtcaatccgggccgggagcagtcatctgtggtgaggctgattggctgggcaggaacagcgccggggcgtgggctgagcacagccgcttcgctctctttgccacaggaagcctgagctcattcgagtagcggctcttccaagctcaaagaagcagaggccgctgttcgtttcctttaggtctttccactaaagtcggagtatcttcttccaagatttcacgtcttggtggccgttccaaggagcgcgaggtcgggatggatcttgaaggggaccgcaatggaggagcaaagaagaagaacttttttaaactgaacaataaaagtgaaaaagataagaaggaaaagaaaccaactgtcagtgtattttcaatgtttcgctattcaaattggcttgacaagttgtatatggtggtgggaactttggctgccatcatccatggggctggacttcctctcatgatgctggtgtttggagaaatgacagatatctttgcaaatgcaggaaatttagaagatctgatgtcaaacatcactaatagaagtgatatcaatgatacagggttcttcatgaatctggaggaagacatgaccaggtatgcctattattacagtggaattggtgctggggtgctggttgctgcttacattcaggtttcattttggtgcctggcagctggaagacaaatacacaaaattagaaaacagttttttcatgctataatgcgacaggagataggctggtttgatgtgcacgatgttggggagcttaacacccgacttacagatgatgtctccaagattaatgaaggaattggtgacaaaattggaatgttctttcagtcaatggcaacatttttcactgggtttatagtaggatttacacgtggttggaagctaacccttgtgattttggccatcagtcctgttcttggactgtcagctgctgtctgggcaaagatactatcttcatttactgataaagaactcttagcgtatgcaaaagctggagcagtagctgaagaggtcttggcagcaattagaactgtgattgcatttggaggacaaaagaaagaacttgaaaggtacaacaaaaatttagaagaagctaaaagaattgggataaagaaagctattacagccaatatttctataggtgctgctttcctgctgatctatgcatcttatgctctggccttctggtatgggaccaccttggtcctctcaggggaatattctattggacaagtactcactgtattcttttctgtattaattggggcttttagtgttggacaggcatctccaagcattgaagcatttgcaaatgcaagaggagcagcttatgaaatcttcaagataattgataataagccaagtattgacagctattcgaagagtgggcacaaaccagataatattaagggaaatttggaattcagaaatgttcacttcagttacccatctcgaaaagaagttaagatcttgaagggtctgaacctgaaggtgcagagtgggcagacggtggccctggttggaaacagtggctgtgggaagagcacaacagtccagctgatgcagaggctctatgaccccacagaggggatggtcagtgttgatggacaggatattaggaccataaatgtaaggtttctacgggaaatcattggtgtggtgagtcaggaacctgtattgtttgccaccacgatagctgaaaacattcgctatggccgtgaaaatgtcaccatggatgagattgagaaagctgtcaaggaagccaatgcctatgactttatcatgaaactgcctcataaatttgacaccctggttggagagagaggggcccagttgagtggtgggcagaagcagaggatcgccattgcacgtgccctggttcgcaaccccaagatcctcctgctggatgaggccacgtcagccttggacacagaaagcgaagcagtggttcaggtggctctggataaggccagaaaaggtcggaccaccattgtgatagctcatcgtttgtctacagttcgtaatgctgacgtcatcgctggtttcgatgatggagtcattgtggagaaaggaaatcatgatgaactcatgaaagagaaaggcatttacttcaaacttgtcacaatgcagacagcaggaaatgaagttgaattagaaaatgcagctgatgaatccaaaagtgaaattgatgccttggaaatgtcttcaaatgattcaagatccagtctaataagaaaaagatcaactcgtaggagtgtccgtggatcacaagcccaagacagaaagcttagtaccaaagaggctctggatgaaagtatacctccagtttccttttggaggattatgaagctaaatttaactgaatggccttattttgttgttggtgtattttgtgccattataaatggaggcctgcaaccagcatttgcaataatattttcaaagattataggggtttttacaagaattgatgatcctgaaacaaaacgacagaatagtaacttgttttcactattgtttctagcccttggaattatttcttttattacatttttccttcagggtttcacatttggcaaagctggagagatcctcaccaagcggctccgatacatggttttccgatccatgctcagacaggatgtgagttggtttgatgaccctaaaaacaccactggagcattgactaccaggctcgccaatgatgctgctcaagttaaaggggctataggttccaggcttgctgtaattacccagaatatagcaaatcttgggacaggaataattatatccttcatctatggttggcaactaacactgttactcttagcaattgtacccatcattgcaatagcaggagttgttgaaatgaaaatgttgtctggacaagcactgaaagataagaaagaactagaaggtgctgggaagatcgctactgaagcaatagaaaacttccgaaccgttgtttctttgactcaggagcagaagtttgaacatatgtatgctcagagtttgcaggtaccatacagaaactctttgaggaaagcacacatctttggaattacattttccttcacccaggcaatgatgtatttttcctatgctggatgtttccggtttggagcctacttggtggcacataaactcatgagctttgaggatgttctgttagtattttcagctgttgtctttggtgccatggccgtggggcaagtcagttcatttgctcctgactatgccaaagccaaaatatcagcagcccacatcatcatgatcattgaaaaaacccctttgattgacagctacagcacggaaggcctaatgccgaacacattggaaggaaatgtcacatttggtgaagttgtattcaactatcccacccgaccggacatcccagtgcttcagggactgagcctggaggtgaagaagggccagacgctggctctggtgggcagcagtggctgtgggaagagcacagtggtccagctcctggagcggttctacgaccccttggcagggaaagtgctgcttgatggcaaagaaataaagcgactgaatgttcagtggctccgagcacacctgggcatcgtgtcccaggagcccatcctgtttgactgcagcattgctgagaacattgcctatggagacaacagccgggtggtgtcacaggaagagatcgtgagggcagcaaaggaggccaacatacatgccttcatcgagtcactgcctaataaatatagcactaaagtaggagacaaaggaactcagctctctggtggccagaaacaacgcattgccatagctcgtgcccttgttagacagcctcatattttgcttttggatgaagccacgtcagctctggatacagaaagtgaaaaggttgtccaagaagccctggacaaagccagagaaggccgcacctgcattgtgattgctcaccgcctgtccaccatccagaatgcagacttaatagtggtgtttcagaatggcagagtcaaggagcatggcacgcatcagcagctgctggcacagaaaggcatctatttttcaatggtcagtgtccaggctggaacaaagcgccagtgaactctgactgtatgagatgttaaatactttttaatatttgtttagatatgacatttattcaaagttaaaagcaaacacttacagaattatgaagaggtatctgtttaacatttcctcagtcaagttcagagtcttcagagacttcgtaattaaaggaacagagtgagagacatcatcaagtggagagaaatcatagtttaaactgcattataaattttataacagaattaaagtagattttaaaagataaaatgtgtaattttgtttatattttcccatttggactgtaactgactgccttgctaaaagattatagaagtagcaaaaagtattgaaatgtttgcataaagtgtctataataaaactaaactttcatgtgactggagtcatcttgtccaaactgcctgtgaatatatcttctctcaattggaatattgtagataacttctgctttaaaaaagttttctttaaatatacctactcatttttgtgggaatggttaagcagtttaaataattcctgttgtatatgtctattcacattgggtcttacagaaccatctggcttcattcttcttggacttgatcctgctgattcttgcatttccacattaaggtggctctcaaacccaaaacacagatcgatataagattttaggaggtggggtgaggcacaattatgaagtgcatattattcagatgtatagtaaatactttgcattgcttttataaagggttctttaaggattttttaagatttttacacttccaaagtacatttactttttgtcttgataatgaatcacttttgccagtaattggcctcttccaaaagtgatccttctgacttacagatgtttaaaatgtgccatgagtttaactacatcttgatacaaacatgataaaaaaagaaaaaaatatattccaaaggttgggactctggacgacaaatttttttaaattagccaaaaagcattattaacattataaactatatttactataaacaattgctatcttaaataagcaacttctaaaaataaaaaaaagaagccatcacctccaggaaaaaaaaataggaaaggatataatcaggtaattctcaaagaagaaatgcatgagaaaaatgtatacagtttcaacaatcaaataaatgcaaattaaaacaaaatatcatttttttgccttgtaatttaatgatgaataaaaaaatctaatgt

SEQ ID NO: 198415 - DNA, 2620 bp, Homo sapiens
ataatccatttaagtcttagcttctatttctgcaaaggagaagtttgaattagtcaatcttccttccagatccataactcagtttgataaattacttagtatctttttctacagagaaaatgctcatacataataataaatatgtaatcataaaattattttcattagtctgttttatagaattcaaattaatcaccactatttactcttgtgcctcttggtgatcggtgctgtctgttacagatcgctactgaagcaatagaaaacttccgaaccgttgtttctttgactcaggagcagaagtttgaacatatgtatgctcagagtttgcaggtaccatacagaaactctttgaggaaagcacacatctttggaattacattttccttcacccaggcaatgatgtatttttcctatgctggatgtttccggtttggagcctacttggtggcacataaactcatgagctttgaggatgttctgttagtattttcagctgttgtctttggtgccatggccgtggggcaagtcagttcatttgctcctgactatgccaaagccaaaatatcagcagcccacatcatcatgatcattgaaaaaacccctttgattgacagctacagcacggaaggcctaatgccgaacacattggaaggaaatgtcacatttggtgaagttgtattcaactatcccacccgaccggacatcccagtgcttcagggactgagcctggaggtgaagaagggccagacgctggctctggtgggcagcagtggctgtgggaagagcacagtggtccagctcctggagcggttctacgaccccttggcagggaaagtgctgcttgatggcaaagaaataaagcgactgaatgttcagtggctccgagcacacctgggcatcgtgtcccaggagcccatcctgtttgactgcagcattgctgagaacattgcctatggagacaacagccgggtggtgtcacaggaagagatcgtgagggcagcaaaggaggccaacatacatgccttcatcgagtcactgcctaataaatatagcactaaagtaggagacaaaggaactcagctctctggtggccagaaacaacgcattgccatagctcgtgcccttgttagacagcctcatattttgcttttggatgaagccacgtcagctctggatacagaaagtgaaaaggttgtccaagaagccctggacaaagccagagaaggccgcacctgcattgtgattgctcaccgcctgtccaccatccagaatgcagacttaatagtggtgtttcagaatggcagagtcaaggagcatggcacgcatcagcagctgctggcacagaaaggcatctatttttcaatggtcagtgtccaggctggaacaaagcgccagtgaactctgactgtatgagatgttaaatactttttaatatttgtttagatatgacatttattcaaagttaaaagcaaacacttacagaattatgaagaggtatctgtttaacatttcctcagtcaagttcagagtcttcagagacttcgtaattaaaggaacagagtgagagacatcatcaagtggagagaaatcatagtttaaactgcattataaattttataacagaattaaagtagattttaaaagataaaatgtgtaattttgtttatattttcccatttggactgtaactgactgccttgctaaaagattatagaagtagcaaaaagtattgaaatgtttgcataaagtgtctataataaaactaaactttcatgtgactggagtcatcttgtccaaactgcctgtgaatatatcttctctcaattggaatattgtagataacttctgctttaaaaaagttttctttaaatatacctactcatttttgtgggaatggttaagcagtttaaataattcctgttgtatatgtctattcacattgggtcttacagaaccatctggcttcattcttcttggacttgatcctgctgattcttgcatttccacattaaggtggctctcaaacccaaaacacagatcgatataagattttaggaggtggggtgaggcacaattatgaagtgcatattattcagatgtatagtaaatactttgcattgcttttataaagggttctttaaggattttttaagatttttacacttccaaagtacatttactttttgtcttgataatgaatcacttttgccagtaattggcctcttccaaaagtgatccttctgacttacagatgtttaaaatgtgccatgagtttaactacatcttgatacaaacatgataaaaaaagaaaaaaatatattccaaaggttgggactctggacgacaaatttttttaaattagccaaaaagcattattaacattataaactatatttactataaacaattgctatcttaaataagcaacttctaaaaataaaaaaaagaagccatcacctccaggaaaaaaaaataggaaaggatataatcaggtaattctcaaagaagaaatgcatgagaaaaatgtatacagtttcaacaatcaaataaatgcaaattaaaacaaaatatcatttttttgccttgtaatttaatgatgaataaaaaaatctaatgt

SEQ ID NO: 198416 - DNA, 2218 bp, Homo sapiens
acagatgtgttgtactaagttctgcaagcctttggcaattccaggatatgtttactttcccttgataagagaggaattggaagagtattttcagctgttgtctttggtgccatggccgtggggcaagtcagttcatttgctcctgactatgccaaagccaaaatatcagcagcccacatcatcatgatcattgaaaaaacccctttgattgacagctacagcacggaaggcctaatgccgaacacattggaaggaaatgtcacatttggtgaagttgtattcaactatcccacccgaccggacatcccagtgcttcagggactgagcctggaggtgaagaagggccagacgctggctctggtgggcagcagtggctgtgggaagagcacagtggtccagctcctggagcggttctacgaccccttggcagggaaagtgctgcttgatggcaaagaaataaagcgactgaatgttcagtggctccgagcacacctgggcatcgtgtcccaggagcccatcctgtttgactgcagcattgctgagaacattgcctatggagacaacagccgggtggtgtcacaggaagagatcgtgagggcagcaaaggaggccaacatacatgccttcatcgagtcactgcctaataaatatagcactaaagtaggagacaaaggaactcagctctctggtggccagaaacaacgcattgccatagctcgtgcccttgttagacagcctcatattttgcttttggatgaagccacgtcagctctggatacagaaagtgaaaaggttgtccaagaagccctggacaaagccagagaaggccgcacctgcattgtgattgctcaccgcctgtccaccatccagaatgcagacttaatagtggtgtttcagaatggcagagtcaaggagcatggcacgcatcagcagctgctggcacagaaaggcatctatttttcaatggtcagtgtccaggctggaacaaagcgccagtgaactctgactgtatgagatgttaaatactttttaatatttgtttagatatgacatttattcaaagttaaaagcaaacacttacagaattatgaagaggtatctgtttaacatttcctcagtcaagttcagagtcttcagagacttcgtaattaaaggaacagagtgagagacatcatcaagtggagagaaatcatagtttaaactgcattataaattttataacagaattaaagtagattttaaaagataaaatgtgtaattttgtttatattttcccatttggactgtaactgactgccttgctaaaagattatagaagtagcaaaaagtattgaaatgtttgcataaagtgtctataataaaactaaactttcatgtgactggagtcatcttgtccaaactgcctgtgaatatatcttctctcaattggaatattgtagataacttctgctttaaaaaagttttctttaaatatacctactcatttttgtgggaatggttaagcagtttaaataattcctgttgtatatgtctattcacattgggtcttacagaaccatctggcttcattcttcttggacttgatcctgctgattcttgcatttccacattaaggtggctctcaaacccaaaacacagatcgatataagattttaggaggtggggtgaggcacaattatgaagtgcatattattcagatgtatagtaaatactttgcattgcttttataaagggttctttaaggattttttaagatttttacacttccaaagtacatttactttttgtcttgataatgaatcacttttgccagtaattggcctcttccaaaagtgatccttctgacttacagatgtttaaaatgtgccatgagtttaactacatcttgatacaaacatgataaaaaaagaaaaaaatatattccaaaggttgggactctggacgacaaatttttttaaattagccaaaaagcattattaacattataaactatatttactataaacaattgctatcttaaataagcaacttctaaaaataaaaaaaagaagccatcacctccaggaaaaaaaaataggaaaggatataatcaggtaattctcaaagaagaaatgcatgagaaaaatgtatacagtttcaacaatcaaataaatgcaaattaaaacaaaatatcatttttttgccttgtaatttaatgatgaataaaaaaatctaatgt

SEQ ID NO: 198417 - DNA, 463 bp, Homo sapiens
taaattttaattacctatgttagaaaaagacagaagaagtatgaaaaaaaattgctgtcactatctcagtagcctgatggtttttcttcacattcctcaggtattcttttctgtattaattggggcttttagtgttggacaggcatctccaagcattgaagcatttgcaaatgcaagaggagcagcttatgaaatcttcaagataattgataatgtaagtctgagttggccatctatccacctatctaaaagattgtccagttaagtcaatttctttgtcactttatccagctctccacaaaatatcactaaaagtagttattgtaacctagtaatctcttaaaatttgattctgtttagaagccaagtattgacagctattcgaagagtgggcacaaaccagataatattaagggaaatttggaattcagaaatgttcacttcagttacccatctcgaaaag

SEQ ID NO: 198418 - DNA, 409 bp, Homo sapiens
cgcgcctgaggctcatgcatttggctaatgagctgcggtttctcttcaggtcgggatggatcttgaaggggaccgcaatggaggagcaaagaagaagaacttttttaaactgaacaataaaaggtaactagcttgtttcattttcatagtttacatagttgcgagatttgagtaatttatttctagcctccagctctgaaataaatgacatgttgttgtttttaattatttttaagaaacgcaagctagcctttggaatcaatatccctgcttagagcagaagtttgttggctgagtggagcacagcatatgcattttccctgtcttttttgttctttcttttaatgatacataatattttacatatttatgaaatggggtacatggaagcgttttttacatgcccgga

SEQ ID NO: 198419 - DNA, 405 bp, Homo sapiens
tacagctcggacccaggagatcatcgggggtttaacccactccaggcatagacttccatatttctaaatcaaggataattgtgcttacctcatagtgttattgccatgatatatatatgctaaggaaacaatgtaaaccacttgtaacatgcgtcacatatattaagtgctcaaaaaaaaatcaactatctctttccttagacttaaaaaatatatatgcaactctaacttgctgttaatgcatttatttcatcatcctgaaggtattcgttgatagcctaatatgggttgggcccacacacaggttatttaggacagagaggaagagaaaatagacatggtcttattccctaatggagcttgcagtctgaataaggagaaaggtatcaatcaacaaataaccaa

SEQ ID NO: 198420 - DNA, 495 bp, Homo sapiens
ccaccccaagctgtctccggcctgcggtcagggggaggggctctagctgtggaaagttggcagaggcggccggcagcagccgggagagtggaaaaaatgatatcaaacccggaaaaatgcaggccggatggagggccggagtgggccctgggagaggagacaaagttttgctgtgttgcccatgatggtctcaaactcctgagctcaagagatgctcccacctcaacatcccaaggtgctgagatttcaggcatgagccactgggtctcaccctgctatcatatcttaaggccttgcagaaaccaggatttgttaaaggaatgaaagctccttgagggaagggccctcagtgctgctctgatcccagcacctacaacagtgcctggctcataataggtgtctgtgaataaggaatggaaagcatgtgagaaaaccacactcttcctcagcctattatagtttaaaaagtactttctcatccataaaaacaaaacc

SEQ ID NO: 198421 - DNA, 537 bp, Homo sapiens
taaacaggcgcaggggttcattgtgctttcttcgtatataattgaactttttcataataaaagtattatgtttaaataaaaccagagaaaaaggaaataaaaaactgaagcaccaccattcacctcaagcactggggataaagtgtgaattatgaattttggggtcagcaactgtctgtggtttcattaaaaattcaccactgaggccaggcacagtggctcacgcctgtaatcccagcactttgggaggccgcggtgggtggggtgcattttacagaaaaggagaagttgtgggacaggcattcacataggtaaccatatatttgtaaatcaatgctgtgacatggttttatcttttcttgagagtcagtgcaacatgctaactatctatatgagggcaatgtctgtagaagttcattcttgcttcttgaaacaaatggaattcacctgtgctgtgtaaagaggactaatgaaactatccatataatccaggcaaaaacttgatgctgagggtaaagaggcttgggttgttctgaa

SEQ ID NO: 198422 - DNA, 347 bp, Homo sapiens
tagtgtgttcactcttaagatggtattgtgaagagataagatagacctgatgcaaaatagcttaaaatctagacacttaacctctgagttgcatgcagatagtagtaatgtgagggtctactggtaagatttcaacaggaagttctttgtgcagtttgactgtatgtaaaggcactgaaatgccttgcctagaggaatgacaggaaagctgtgctgtaggaaggttgactggtagggatgggtagtgtaggcaaggctctaggtaaggacatagaaaagacggcttacctggtttgagtgccagctaggctgcttagaacaatggttctcaagattaatgccagccc

SEQ ID NO: 198423 - DNA, 310 bp, Homo sapiens
atatacacagattgagagtaaaagcatggaacaatacatatagcaaaaactgacagaattgaaaggaaaaaaaccaaaaagagttccgcattaatgcttggagactacaacgtacaactttcaataatggatagaacaaccagacaagagatgaacaagtaaactgaacacttgaacaagacttaaacatggcctatcagatatctctagaacactacacaaaatagaatacacattcttctgaagtgcataaaaacattctcaaagaccaaagtctaaaatactacactacaagtcaagtctcaacaaa

SEQ ID NO: 198424 - DNA, 150 bp, Homo sapiens
atttggacataatattttattagtaaccaaaacagctaaatctaagtgaattaagtaatattttaaaagggtaatggtcaggtgtgtttagaaatagttcttttttctctttgagggaattctgcaatgtctggtagatggaggagggga

SEQ ID NO: 198425 - DNA, 963 bp, Homo sapiens
  misc_feature (293)..(293): n is a, c, g, or t
  misc_feature (296)..(296): n is a, c, g, or t
gaaaagccgaaagagcgaggcgagaaggaggggttgtggaggttagggcccaaccagcaagtcccgttgctctccctcctcctgacgaggagcggagagggaaggggaggagcgagccggggcaggccgcgcacaccaggagcctcctcgtggagggggggagcggaggaaaggggtagctccgccacctctgctggcggcggcggcggcggcgaaagaagaagaaagtcagggcccgtacctaccgccacagactcagaaacgcccctgcccccatctccccggaaataganaanagaaaggacacagaagaaaatgaacaacccacaaacgacagcaaacacaagaagaaggcaaaaagagaaaacagacacagaagaagcaaacacacccgacgaaaaacagcaacaaacacaccaaacacggccacagcgacacacacaacaaaaacaaggagaaaaacacagacgaagacaacacacagaaaagaaaaacagaagaacacagaaacaaaaaagaaaagaaaggggacgcaaaagaggaagagaaaggaagaccaacagagaagagaaggtacgagcggaagagggacgcaacagacagaacgggaggacagagcggcgcgagggacggcagaaggcagggcagagaagaacgagaagaaggagacggacgcggagggagaagtagcgagggtgagagagagagggcagggcagggaagcagggaggagagggaggaagagagggagagcgagcactggaacagaaagaagagaggacgggagaaagggtagaagaccgagagagagtggtagaaagagcgacgagaaggcggcgaggaggagccgacgaggaaggagagaggaaggagggagagaggagggggaggaggggacggcgacgaacagaaagggagaggacgagagcgaagtcggaaaggcgggaggggaacgaagggagg

SEQ ID NO: 198426 - DNA, 423 bp, Homo sapiens
tgacaggcatcttttatacagaaggtaatatttagatgtcataatttctagtggggcagaagaactaattaaatgcatgtcaataatgataatgatgatggcataagcaaaggatagtttttggttgctgattattcgggagatactatgctatgtgctttatatagattgtctcagtgacagctcacaaaatttggagggagctacacttctatactcactttatagataagaaccttgaggttttagagatgttcactgactcagaatcatacgggaagtgtgtgactcaagcccagctctcatagttacctctagatttcagtgcattcagatttcaaagacaggagtggtcaatgagggctggagtagtccagaaagaaaagtattgatgaacttcatcatatatttcagaaattgatt

SEQ ID NO: 198427 - DNA, 393 bp, Homo sapiens
agcacaataaagcgaactgcagtaaaataaggtatgcctgtatattttttaaatgcacttgagcctttctaacccctttgagaattaagaagcagtttgcacaccctctgcaatctaaaatggatcccacatctatgcacacacatgcaggactaggttcatgtattgtataacccacacagtcaagtcctgcaagattcaataaaaacctgtagtcaggttcattctatttcagatgcagaaattgtttgtaatgaatgaaaaatgaacactattagccacgtgcttttataattcactagataacatatgaaaccactaatgttgtccactaacgatgactaccatcatgaccaacacaacaaaaccagaaacagtatttcctcctttttt

SEQ ID NO: 198428 - DNA, 560 bp, Homo sapiens
cagatggagcacgtggtccaggcatgccaccgcttcatccaggccagctatgaacctctgggcatctccctgcgccccctggaagcagaacccccaacacccccaacggcccctccaccaggtagtcccaggcgctccgaaggacacccagacccacctactgaatctcgaagctgcagtcaaggcccccccagtccagccagccctgaccccaaggcctgcaactggaaaaagtacaagtacatcgtgctaaactctcaggcctcccaagcagggagcctggtcggggagagaagttctggtcaaccttgcccccaagccaggctccccagtggagacgaggcctccagcagcagcagcagcagcagcagcagcagcagtgaagaaggacccattcctggtccccagagcaggctctctccaactgctgccactgtgcagttcaaatgtggggctccagccagtaccccctacctcctcacatcccaggctcaagacacctctggatcaccctctgaacgggctcgtccactaccgggtaagagcccctctttcttggc

SEQ ID NO: 198429 - DNA, 382 bp, Homo sapiens
ggatgcagggtcctgttctgggcaggggaggagggtagctgggtttaaagttggagaggtagtaagtgtgatgtgtgggttttcaataaacaggagatgaaatagctggagtctggagggggtcaggtgactcaggcacttgtgtgagagtaagtcttgtagcctatgtgaggagaaaacagtgagagggtgccctaaggtaagcttaagagcctctttggtgagtttcgctgccgcagccaaagcctgcaggcacggctgccagccctggacagtgggctcgagctgcttggaaaggtaggctactggctggtgtgttcttcctaccagttgggccaggagccctgtagcaaccttttcccgctcatcggtaaagagatgg

SEQ ID NO: 198430 - DNA, 501 bp, Homo sapiens
agtttgagcatggagtctcctctgtcgcccaggctggagtgctttgggtcgaagcaattctcgctccttgcccccctggtagctgagattacaggcacacgctaccatgcccaactaatttttgtatttttactagagacagggtttcgtcatgttggccaggctggtcttgaactcctgacctcaggtgatccacgcgccttgggctcccaaagtgctggattacaggcacgagccactgtgcctggcaagatctgcttttttagctctcacatatgagtgagaacatgcaacagttgtctttctgtgcctggctggcttcacttaacaaaatggcctccagttctattcatgatgctgcaaatgacagaatttcattcttttttatggctgaataatattccattgtaatatataccacttttttttttttatccattgatgggcacttaagttctacattttgcctattgggaatacaataaatatgagagtgcatat

SEQ ID NO: 198431 - DNA, 366 bp, Homo sapiens
tcaagagattgagaccatcctggccaacgtggtgagaccccgtctctactaaaaatacaaaaattaactgggcatggtggtgtgcgcctgtagtcccagctactcgggaggctgaggcaggagaattgcttgaacccgggaggcagaggttgcagtgagctgagatcacgccactgcactccagcctggcagcagagtgagactccatcttaaaaaaaaaaaaaagccacttaatgagttccactgaagagtaatactagtcaccttcagtggttgtaggtactgttgaacaattcttttctctgcagttgaagaccttatatactctagtcaggaactccactttcctcacttttccaactccac

SEQ ID NO: 198432 - DNA, 481 bp, Homo sapiens
gcgagtatcgattggactagaggaaaagcgagtatagagttagataggcttcgaagaagtagtgccctgcctgatgggacgaagatgcgcgcagtctagctcccagcaggatatagtaagtagtaataatagcttatttattagtttagtgacttggttagactattttcgtaaagtctccttccccaaagactggtgaagattttcatgttgtgcctcagagagtgcaaccttgggcatgtacagagtctccctgggatgacattgagccaggctgtctttgactagctctttccatgatctctctgttaagctttctacctcttctggtatcacatccagctgttaggctctactaactgctgactgaattctcgactgtttttgataatgccctggagtatacactgctccaaagtctaattcaattaaattcaggaaggggtaatttttgaaattgagctttgttctgaccttggga

SEQ ID NO: 198433 - DNA, 321 bp, Homo sapiens
ttctttacttcaggatcaaatatttttacttttcgattttatttttttgtttgtgaagagttgggagttgctgggtttagttatgctactctctttttaagggagaatatagcagtcctagagggatttgcaaactatagctcttggggaaacattcaaaattttccttgtgtaagaaattttatgagtctcgagggccggatgtggttgctcatgcctgtagtcccagcattttgagaggccaaggctggaggatctcttgaggtcaggggtttgagactggcctggccagcatggtgaaaccccatctctaccaaaaaa

SEQ ID NO: 198434 - DNA, 330 bp, Homo sapiens
ctgtgaaatgggctaatgaaccgagggatgcatctgaatcctttaggaatgctgggaagcaatcccgacaaaactttggagaaatgaccaacttttgaaggagctttcaaaatccttcacctcagaaaactctctgttgcaatgatttacttgattataataatcttttgagtactcaggtgatttaagtttgtacctgttggtttggatcaatcagatttattagggaccagtttcttgatcacgctcagtatttatttttcctttgaatctcaggtgcaggtggaggaagctatactccactggtcatgttacattattatctttgat

SEQ ID NO: 198435 - DNA, 561 bp, Homo sapiens
ggaaaggcttcatagaggaggcagaacttctacagggccttcaaggccaggtgcggtggctcatgcctgtaatcccagcactttgagaggccgaggcgggtggatcacctgaggtcaggagtttgagaccatcctggccaacatggtgaaaacccatctctactaaaaatacaagaattagccgggcctggtggcacatgcctataatcgcagctactcaggaggctgaggcaggagaatcacttgaacccgggagacggaggctgcagtgagctgagatcacgccattgcactccagcatgggtgacagtgagagactctgtctcaaaaaacaaacaaacaagaaaaccccagacttttggaggtttctttttatatctgattaacactagaccagagaattcccagaactatgtattagtagccactgaaccacagccttggttggggcttttaattgactataaattaatatatttttctcttttgtctttttgtagtaaattctaaaaacaaacagaatgttgaacaaattatatatgcatttcgtataaattatgt

SEQ ID NO: 198436 - DNA, 130 bp, Homo sapiens
atcagtgcattccagactgacaacctactttgcatagggtcctcactttcctgaagctcccagcagggatatgaaagcaagcccagttctatgagactctgttttattctcctgggtgactggtgggaag

SEQ ID NO: 198437 - DNA, 532 bp, Homo sapiens
tgccagtgcagcaatagttaaaagttttagaggctaacatttccagtcaagcaagcagaagcagatatttaaacaggcttttagtaagcaaaagttagagccggatttagagtaagttaaacacaaattccgaatagttgaagtacatcaaaagaatgcatttatttgtctcttattttctattcttattttcattatggaaaattacatacatgcctcaagataaagagaggatagtatattgagccctcaagtatccatcaactggctttaatagttaatggccttttgccacaaccagctttaatagttaagggcatttcgccacaaccagctttaatagttaacagcgttttgccagtcttcttttatccatcttttcctctgttttttgaactgctagaatattttaaatcaaatcttaagctccactatgtagtccttttgtatgtgtctttaacagtaagaataaacacacatacacaaacacatttgcattatcacctagaaaaacttaacagtgactctttac

SEQ ID NO: 198438 - DNA, 386 bp, Homo sapiens
atgtaaaagtttgaaaataaatataaattaaaagttacaaaaaaattcatagtagtgtcaaaacaaaactatatgctttcctctgatagcacttagaagcagagtagatggcaaaactgggcaaagattcaaagctaagaatactggaagaaaagtgattgaagagggaactgaagctagaggagagaatgaaacaagaggtgctgggaccagaaatcttgatacagcttaaagcttaagaataaacgtgctgggaaaaggagaatgagcattggaatgacaggaggctacagtcagaaaagtaggatattaagcattccaaatcagagttgttattagtcatttaggaaatgcaaattaatcccacaatagaataccactccaca

SEQ ID NO: 198439 - DNA, 472 bp, Homo sapiens
gggatgtccagggtgagggaacagttctggattgcatcgtggtgctgctcacacaaatctacacatgagataaaacggcttagaactacaaacacatacatatgtgtgcaggtaaaagggggaaacctaaatgagctctgtagattgtgactttcctggtcttgatattgtactagttatgcagtatattatcattggagaaaactgggttaaggatacacaggagtactctgcactgtttttgtgacttcttgcaaatctatatttcaaaacgaaaagtttctaaaaaattgaaatgacataagatataaactgagaaatttcactcataccgtctcttcaatgttgccaaccgctttcattggtttcaatataattgtccagtgttcctttatgcaaataaaaagcacatttaaatctgcatttcattcccttccctgcatttttccacaaaagtaagtgtaccatgtac

SEQ ID NO: 198440 - DNA, 414 bp, Homo sapiens
  misc_feature (14)..(15): n is a, c, g, or t
tcagccggtccgtnnacgtgtggaatagatgcactcacacagatagctagatgaactccatcatgttttaagagagttggttttattagttcagttagttcactttcctttggtttcataatgtaagaaacaaaaagagtaagagcagtgctttatttcagtagtatggggtaaggctttaactttctgggtctgaggcggaggtttctgctggcatcttagctttctgtgtgtttgtttggtttactcctgacagagacaatggaatgcttcaatgaaaacgcccaactcattttccatctatgaatgaacaggaggcatcccgtggctaaggagggataaatattccgcgccactggaggcctgctggctcacccgggctacaccactattgtacccactctggcttccaca

SEQ ID NO: 198441 - DNA, 379 bp, Homo sapiens
aacttggtgtttggtgaggaggatagataaatctacattcaaatacagtgatttgataaattctttcaaagaatgagcaaagctctatgaaagcacttaatgatgcttgtataggtcagggaaagtttcattaagaagatattggagctgaggtctgaggatgaagataatcttactaagtgtagaaggaaggaggtccaccttctatgtacgtgtggaactgagcagacacattttaagaaaccacgggaagtgtggtatttgtgtgtgtatgtgagtgtggtgggtattgaagggtgacatgtggaagcaaatgaggcttggggagttagcaattaggtcatgaagagttttatataaatatttaggaaaatttgtc

SEQ ID NO: 198442 - DNA, 277 bp, Homo sapiens
tggggctctgggtctgaaatggctggggggatgcgctagctgagagaggcaacagggtcgtagaggcagaggggtcaaaggggaggacaggaaagaagcaggaggaacccgggaaggcacccgacgcctgcgcaccgccggagagaggccaggccccaggctcagctagaggcaagcgcacccgaaggagccaagctgagcaggacagagtccaggcctggaaagccggcctggagagccggcctggtgcaccggccagagcaccccgagggatacg

SEQ ID NO: 198443 - DNA, 496 bp, Homo sapiens
tgcttctcctacattctctgacaccaggctcctcccagtgataggaaacatggtccagtcattctcataccacacatttctcagcctcctctacttggcattctaactgggaaatcccagggcaggatgtgtgccaaaggtaagtaataagattcccttacagaggtgcccctcaggcagggggtataaagagaaagtggtttgagtcccttggagcgagacagtgtgatgcacttctatggccttgggaagacttccggattctggggaggacaggttggcaagcactggtcttcctcttagattctaagtcagatctcagcaagatatctaaggggccaggcagggaccctctccttcatatgttcccgtaagcccaccaaacagtggagcacattgctggtggtgttacccattagagaagtaaatatctagctctgggcctacttcttcccaagtttaaggaagtattacagagtgagaagatgtgcacgtg

SEQ ID NO: 198444 - DNA, 649 bp, Homo sapiens
cattccttgccagtcatgacccatggtccttagatgtttacagctaaagtagcagcttgttaacgcctgcaaggacacactcctacaataacagaaagtccagatgtcctgatatccataacagtatgtgctttgaatataattgtagttatggtttgaggtactcacacactagaatgtcgaggatagttttatttaaatcagtattacacattttgtcatgctgtctgctcaccctcatgtagactcagcttagcttagtctttatatacataagaccccctacataagaaaaacttaaagcaaagatggtgcgttcctctgcttgccttctgagggtgctgtactctggaagggagtagcttctaaataacttgcttctttcactgcactctgtgactcaccttgaattccttcctgcgtgagacccaagaaccctctcttggggtctggatcaagactccttttccggtaatgaatccaggaggcgaaaaaataaggacatttaggaatcgagcaattcagtaaacatttgtgtgtgtgtgtgcacccacgtgcatacatacacttacgtgtagaggatctagaaagatctttatattctttgaatagagaagatacacatttcccatatgatcatagtaccttt

SEQ ID NO: 198445 - DNA, 458 bp, Homo sapiens
cagcacggagagggcagtgggaggaggacgctgcagccgaggtgcccgcagacacccccaagcccagtggtcaggtcagcatgcactggtcatgttcatggcgtggccgacggggaggctgctgccccatcctcccaaccccgacgaccccagcccggccatgcagaggcatagtcgaccgtctcactaaggaacattccacagaattcctgaccaggcctcctccaaaccatccaggtcatcagagacaaggagagtctgagaaaccgtcccagcctcggggagcctgaagagacagaacgagtagatgccatgtggcttccaggaagagattgttgggggcggggcagggggaaggacatcaggggagagcgaaggaagtgtaggcctcagcagctgtgtggcagcactggcttatttattttttattttttatgtttattttattttattttttg

SEQ ID NO: 198446 - DNA, 140 bp, Homo sapiens
ttccttttcccgaagaacaacagtagccaacaatcacaaccacagaaacctaagtttctctgagtagatgacttaattcttctgccagccccacctctgagactccagcagccatgaagattatgggccggtgttgacaa

SEQ ID NO: 198447 - DNA, 499 bp, Homo sapiens
gtgaagcctgagaaacaccaaagatggcagtctgctccttcctcaagactgtatatctacccaatagaatactataaaatcactgcatgtccacacaaggaatgctgcaccatcaaatactacacaaggaacaattctatacattctgatatagaaatttctcttaagacataccgttatatataaaaaataaattgtagatcaatacatacagtccaattcacataaaacaaactgtgtgtatatacatatatgtgaactaaaaaaatattgagacatatagaccaaattgttaatgatagttatatttgtggaggtgaataaaactggggtttaagaaaggagttaggattgctccatatacatctgtttgcttgcatttttaagtaaaatatatgtatgtataccttgtgtaattaacaaagtaaaccaacataaaaagaaaaatcatcatgaccagtagaggttgtctttacagtacaataaatttctctttaca

SEQ ID NO: 198448 - DNA, 347 bp, Homo sapiens
ctcctggcctcaagtgatcccacctcagcctcccaaagtatgtaggattacaggcgtgtcactgtgcctggtcacacctgcataatgattttgtgaacagtttctcttacattttattagttggaattctacagtaacgaagagcttcactttctccttcatccgtgtgcgttcacttccttccatctggattggtcaatggctcctcctttggtccttggaatcagaccccactgctggcattgaccgtgtgatacacacatgattcttttgcaccccgtgtggcgtgacccagagcttgtgtgccggctgggccatcctcctgccccatgtatgctaaaatacac

SEQ ID NO: 198449 - DNA, 547 bp, Homo sapiens
acataccagctgcaggccccagcatacagcaggggcttcattattgctgctgccaggtgataaatggtcaagcccaggcccactgtggacagagctggccaggattcttgtaaccctgacaaacacaacacacttcctcaccccaccagacaaggctctgggctcaaatagctgcccccaggccccgaggactcaggccggggcatttaactgatgcctgctgtccggacaggacacggttcctgggctccacccaacccgcctctcccagggaagcagggacaaaaggatggggccctgtggggatggctggccctgaggacaacacaggcacatgagaggtcatttcaggagaaggacgtctgggaggcatccaccaactcatgctgaacaagagtccagccagagcccacccgtttatgaaagaaaatgataataataatagaaggacagggagggggctgcagggatgggggctctgcaccagctcccacaggcctgtccagggctcctgctcccctctgagtgatggcagggcaggcgcctg

SEQ ID NO: 198450 - DNA, 200 bp, Homo sapiens
gagacaatgcctaagtaaattcagtctagctttctgacatgctcttcaagacacccacacccccactctgacagcctattcttttaggcttatctcccacaacacgacccacccacctggcactgtgaccctacaataattctctgtttcctggacctgcccagttctttcctgcctctgtgcctttgctcatgcagtta

SEQ ID NO: 198451 - DNA, 245 bp, Homo sapiens
gctaaccaagtccttactttatttaattcactttccccatacactgtgctgtaagattattttatttcagaaaaatgtcacatcttcctcttggtactaagattctcttctcattttaccatttttccctattttagtttaatgtcctttcatttctattatgtgttatgtgttccaagttttacatccctccggcattcattttaatagaattaggagaatctataaataaaagtagctcctta

SEQ ID NO: 198452 - DNA, 465 bp, Homo sapiens
tcttccagtttaggattatattttatatcctatttcataatgtgcagaactcaattattcaatatagaactggctactaaattccattttaaaagtcgtgcatttgtatttgaattaatacacattttattaaaagggttgtttattggagggggtgttttatttatttgcataggcctttatggactgtgaagtttgcttttgggcaaaaaatatttgtttgctatattttgttatttctcttggtatcatatcttacccatctttgtatctgtcatttattttaaaagatccaggaaaatttcagaaagcgagctgtcctatttttgaacactatataaaaacaacaaaaatggaatatctgtgatgttaggaaagttaccctgaactaagcctccttttaaaagctcagagaagctgacttcaaaaaaaataacgtgaaactataatcatgcaagtttgttt

SEQ ID NO: 198453 - DNA, 415 bp, Homo sapiens
tctaaaatcccaggaggagagacataattggagtgcagaaaacagttgaagaaacaatgagccacattttcctggaattggaaggctcactgagagtcagaggagacagaggaaaaaccatggccagaggcactacaggaaaacctaagaacaccatggcccgagacggttaacacagagcactgaggatcaacttgattggattgaaggatacaaagtattgatcttgggtgtgtctgcgagggtgttgccaaaggagattaacatttgagtcagtgggctggggaaggcagatccacccttaatctggtgggcaccatctagtcagctgccaacgaatataaagcaaacgtgaaaaggagggacggcctcgcctcccagcctacatctattctcccgtgctggatgcttcctg

SEQ ID NO: 198454 - DNA, 418 bp, Homo sapiens
caaatcttaaatgaaatgcaaacaccaggactgtgaacctgtagctttggtcacaggtagcaatatggccttactggttgtatagcacttactgaatttttcttgagaattctaaaatttgagagtgatgccagataaaattgcatcaagaaatctgaaaggaacgatttattctggcttcaggaaatctgattttatatttctgtgacataagacaggttttcttttttccagaatgatcctctactctgaataaccataaaatttcacttgtggaatacatcaaaattatttatacatcaaaattctcttaaatattttatagtaatctttctaaaaatccttcagtcttactgtacttgtctagagttgcaaaaatgtagtgttaacattaatattaaaagcactttcaatgaaa

SEQ ID NO: 198455 - DNA, 930 bp, Homo sapiens
atacgtatataataaacatgtatacatatgtatatacatatataatatacattatgtctatatacatatacatataaatatacatatattaatatgtatattaaatatgtatatacatattaatatacgtatataacatataatatacattatgtacattatataacatatgtaatatacattatgtccattatataacatatgtaatatacattatgtacattatatacattatgtaatatatatatgtgtatataaaaaacatacctggaaaaagcaatataaatgtctgggtcttactcagtagcccagattatggttgcatagcactccatggtgtatatataccacattccctttatccagtctgttgttgatgggcgtccaggttgattctatgtctttgctatcgtgaatagtgccacaatgaacatacgtgtacacgtatctttttatttttacacgtgcacgtatctttgtaaaagaataatttctattcctctgggtatatacccaataataggattgctgaatcaaatggtatttctgcctttaagtctttgaggaatcaccacactgtcttccacagtggttgaactaatttacactccaactaacagtgtaaaagccttcctatttctccatatcctctccagcatctgttgttttttgactttttaataatagccattctgactggtgtgagatggtgtctcattgtggttttaatttgcatttctctaataatcagttctttcttatgtttgttggccacatgtatgtcttctgagaagtgtctgttcatgtcctttgcacactttttaatgtgattgttcatttttttcttgtaaattgtttaaattccttgtagactctggatattagaccttgtcagatgaatagattgcaaaatttttctcccattccgta

SEQ ID NO: 198456 - DNA, 261 bp, Homo sapiens
atactcaccaaaccaaacactatataatggagctaaagctatggacactccatgactgggctacacacagagaccctgtgatatgcctatagttatatctccccaggactatttccttattgcaattaaatccatgcacattggctcagcagtgccccaccagtagagagagtaccagagttagcccctcatccaacagaactaagcagccacttgggctggtctttggatctgttgtgggagggggctactgaaccatgg

SEQ ID NO: 198457 - DNA, 485 bp, Homo sapiens
ctggtcaacaataggctattagtagttaaatttttggggagtcaaaagttatacatgaatttcagctgcacaggaggttggcactcaaattgttcaagggtcaactacacgctataaaatataaaatattatataaatagaaccaaagttagctttcaccctgaatatttctttaatgtcctggagaccatgatatttccaatttaacttagaagctgttaaaggcacaatgttaaaacctacagcttgtccaaagtaggaagccaaagtcaatgtaaaggtaaaaaggaaacaaacctcagagagacagagacagagaccaaccaagaccttgtctgtaccttagtattggtggcatatggaaaaaacaatttcccctgagaatccataaccactaatagccctcaattagattagcagtcagaatgtatgctattgtataatctgaagaatttcaagctcagaacttaatttacggcagtccc

SEQ ID NO: 198458 - DNA, 528 bp, Homo sapiens
gcaaacagacaggatcttctggaccgctctaagaatttggactttacttttactctagagcaaaagtaggcggggaggtgccattagcatccagtgggtagaggccatggatgctgctaaacatcctacaacacacagagtcctcacagaaagaattatctggccccaatgtcaacagtgctgagatgaagaaactctgcaccaggggtttggagcagagaagtgatatgatcagacttctgttttaaaagaaccactccagcccctatgctgagaatacactagaagcaagaagattagttagggggctactgcagtgattcaggaaagaaataacagtggtggtggcttggagtagacagagtgggaactgggaaggtggtgagaagaggctgaattctggatacattacaaaggtagagtcaaaactgttttctaatgaattgaaaggaggtgtgagaaaaaagagaagcagtaaggtttttgatctgagcaccggaaaacagccttgcctttattgagatgagg

SEQ ID NO: 198459 - DNA, 290 bp, Homo sapiens
aaagagttgagataccactataaagttcttttaggcaacaaggatgaaatttaatgttttaattagaaatttatttaaggctcccacagtgctgggattacaggcgtcagccaccgtgcctggcctctacaaacattttttaaaaaattagccagtcatgatagtgcacacctgtagtcccagctactcaggaggccaaggtgggaggatcacttgagcccaggaggtccaggctgcagtgatcatgcaactgcactccagcttgagcattagagtgagaccctatctcc

SEQ ID NO: 198460 - DNA, 392 bp, Homo sapiens
tgcacagacttcctgtactacctcactcctgaggggagatgcttctgcagggcctgcgacctggggcacaactttagacaccatcatcctggagcggcactgcaccctcactagccagggtgttgatgacttcctcaatgccaaggccacgttcaagattttcgacttcagtgatgcgtttgtgctgagcaaggtgggcttctccgggatcttaattcaaaaggtagaatgcagcttgagatctagtgtctgatcgaagaacttgaacttgacctggagggctctggggagccatggaaggtgctggataaaggagggacagtcatatatgttttagagatgactgtggaaggctgcctggaaggagtgaacaagagccaggagaccaggga

SEQ ID NO: 198461 - DNA, 411 bp, Homo sapiens
acaaggtctagggtattgactgtgggagtgagtggaatgtagggtaaaggacgagattgtcgtatgagaggtggtcaaggaactgagaggtgcgagcatcagaacagtcatctatatgaacattgaaatcgcctggaatgatagcccagtgaaccaggaactaaagtcttcaaggcttaaggcttgagaagtgacctaggcatatcagatgaatgtaaagaagaagggggtagtggtggtatggtttgacaggaggcttttttcaggaaggaagggggaattatctggaaacaaactaggtacaagataaataactttacctcttctaacctctaggccctctggtataagagtgtgagagctgagtgaagtggatgcccccttataaaaacttcagatctcgtgagaact

SEQ ID NO: 198462 - DNA, 524 bp, Homo sapiens
acaaggtctagggtattgactgtgggagtgagtggaatgtagggtaaaggacgagattgtcgtatgagaggtggtcaaggaactgagaggtgcgagcatcagaacagtcatctatatgaacattgaaatcgcctggaatgatagcccagtgaaccaggaactaaagtcttcaaggcttaaggcttgagaagtgacctaggcatatcagatgaatgtaaagaagaagggggtagtggtggtatggtttgacaggaggcttttttcaggaaggaagggggaattatctggaaacaaactaggtacaagataaataactttacctcttctaacctctaggccctctggtataagagtgtgagagagaaaacactacggataggactatagagagaacagtggcttcagagcaattagatttcgtttggagcaaaagagtgaagggaccattcagacaagaggtttaagatataggggatttagctgatgtgttccaggggatatgatgcaaagatttcaggaattga

SEQ ID NO: 198463 - DNA, 301 bp, Homo sapiens
tgcacatctgcctttggactgcacggagaaatcaggacaggagtgaactctaggccatgaactcactggatttccattttataggcacccatagggtatgtttttaggatgtaagtttctgaggagaaagctagctctagcatgaagcttttttggattggcttctccatcgtgttggggtaacattttttttaattttttttgagacacagtcttactctgtctcagctcactgcaacctccacctcccaggttcaagcaattctcctgcctcagcctccggagtagctgggattacagg

SEQ ID NO: 198464 - DNA, 302 bp, Homo sapiens
gttagtcccaactacttgggtgtgttgaggcgggaggattgcttaagctcaggagttagggaccactctgggcaatacagtgagaccccatttccaaaaataattttttaataaaaaaggaaaaaaatgtttaaaatgaaggtgtcagaaatactcttttgagactacgtaataacctgggtgctgcctctaggtatctttgcggaattgttacagtaagtaaaactctctcaagccaacattcatggctctccatgaagtaatctctatttatttttttcacgtggcctccagcacatcat

SEQ ID NO: 198465 - DNA, 102 bp, Homo sapiens
tcacgtgcaggcacgcgcaaccagggctcccagggagaatgtgcattttaaacaatagacccagcctaattcctggtgttcacgtggaggccattcagccag

SEQ ID NO: 198466 - DNA, 213 bp, Homo sapiens
tcttagggagcctttcctgggctgcacgaataacctccattgttcgagaccccaaactctgctcacatcttcctttccctatctctgcttgggctatgatcacggtgactctagcagcccttcatggacattatagtactctctgccattcatcttttgctctaatcggacttcaagcccccacttacttgtccctcctaaacccggggagcc

SEQ ID NO: 198467 - DNA, 363 bp, Homo sapiens
ccatcctggggagcagagctagactctgtctcacaaaaaaaaaatttgtgggtgccaagactcaagaccatgggagctggtcgggcacagtggctgacgtctataatctcagcactttgggaggccaaggcaggtggatcgcctgaggtcaggtgttcaggaccaacctggccaacatggcaaaaccccgtttctactaaaaacacaaaaattagccaggcgtggtggttcatgtctgtaatcccagctgcttggaggctgaggcagaagaatcgcttgaacccgggaggcatcggctgcagtgagtcaagattgagacactgccctccagcatgggcaacagagcaagattctgtctcacaa

SEQ ID NO: 198468 - DNA, 485 bp, Homo sapiens
ttggttctccctgttttctttctttccttttctgaactgtactgtacctcctgcatgtgcacatcagcgtgtgccgcttctactggttgttttgccttttctctccctttggcatggacttaggcacttgcatgctgaacaattgctgctcaatagtgcaaatagtgatgttgctggaaatagcttgcgccttttatgttaacaaggtgcacgttgtgattagttaataacagacaactaaaccttactaatatgtacaccagcaaaactaacctaggaagcattttactaacaccatttttgtgtctgctcaataacttttgagttgcagtagggatgatgctgacactagttcaataatcagttaactctctaactagtttagatctcttagggctagttgaatagaatctaagaataaacctcaaacagacatgaaaatgggttccgtcataggtctaaaaacaaaaaccaaacaaacagaa

SEQ ID NO: 198469 - DNA, 410 bp, Homo sapiens
ctgttgtcatcaatacaactgtgctaggtgggtgggaaaggaaaatatcttgggctcccaaaatcactaagctaaaaggaaaactcaggatcatggtggatggaagtcaggactagattgcagctccgactcggatggacagagaagcatgtggaggctcatatcatgaatttttgctccagaacgactggaggaataaattacaaaacctgagaggacccacaggccccctgaaggaagcagatggctcctgcaggacccaggagacacaccaaatactgtgttagtatttacttatagaaatgcaaaatggtctggaaagtctcagccatagaatcaaacaagtagaagaaagaaattcagagctcgaacacaaagtcttcaatttgacccaatccaaccaagacaaa

SEQ ID NO: 198470 - DNA, 518 bp, Homo sapiens
cagaagatttgacatttgtgtcatcggattcccagaggagaggagaaagaggcagtactgacaaagtacttgaaataaaagtggaaatgttccaaaaacacagattcaagaagctgaggaaacctcagacaggataaagtgaaagaaattcacacaaagacatatcatagtcaaacttctgaaaacaaaagacaaagaaaatatttggaaaagcagtgagatagaaacaacttacctgtaagagggagacagttctaatgacagaggatttttcataacctaaggaggccagaaggaagtacaacatttttcgggggaatcaaaggctgaatgaggagtctagacttccaccctcctgtaacaaggcacccagacacttgtagaacctggagagaaaataactgtcaacatagaattttatatccagcaaaaataacctttaggaatgaaggagaaactaagagcacttgttaccagcaaacttccctcaaagaatgactacagatagctctctaaac

SEQ ID NO: 198471 - DNA, 355 bp, Homo sapiens
ctctgtgactcaggagcagggatctcaggcagctgatatcaaaaccacccagccccatccccaggaggcgacattccaatgctaggaccaatcccagatatctggtcccgatggtgaaatggaacaaagacctgcttgggaataaaccaaatgatttctcatgacgttgaacataagttctcccaagccatcatcttggtagaaaatgggacttattccttgacaggccccacccccttcagaaagaggcccttgaccctgataggttctctctaaaacccgtatattaacgcatctggccaacttgggttataaaattcagccttgtgttggcaactcgaaacatcaccagaga

SEQ ID NO: 198472 - DNA, 260 bp, Homo sapiens
tgctgggattacgggtgtgagtcactgcgcctggccctaaagttcctcttataaggataccagtcatattggattactgtcctaatgacctcattttaacttgattacttctttaaagatcctgtctccaaacacaggcatattctgaggcactggaggtgaggacttcaacatatacacttggaggtggggggacaaaattctgcccataacgccatatgttatttatccattcatcaattcacacttacatttccttt

SEQ ID NO: 198473 - DNA, 124 bp, Homo sapiens
ggtgcagttacggataagatggagtgatgagggaaaaggaagagacaggaatgagtactggccttggggcttggttgactgtgtgggtggggcacagagggccgcagcaaggattacaggaaaa

SEQ ID NO: 198474 - DNA, 3234 bp, Homo sapiens
cgggcgcgctgagtgagtgcgcgcgtgaaaaccgccgcaccgccgggggtgcgagtgtctgggccgaagcggccactccagcgacccagccccacggccacgctctcgggggcctttggctccaggcaacttggggcaagcgtctcagttctcgctctcccttcctcccagcggggtcgccgcagaccccagccctgggagcaccgctctgcagcgcggccggcgggtggagacggttggcccctaaactcgctcgtccagcccaaccgccccggcggcttctcccagccctcgaggctctcctgagcggcctggagaggcgtcgagcgcagcccagcgcccgcctgctcacccgccccggcccgggaagggaattttcggatcctgcgagcccggggcgcccccgcggcctagggcgggcagctcccggggcctggccgagccggtggcgcccgggaggccgcggggacagcacgcagcgcgcgcccttggatgccgtcccgcagcgacgccccggcccgccccgctcctcctcctgcctggctagcctgcctctcatttgggaagttttgtgggttttctttctcctcctccaaccttggcggaggccacgactcaggcgccacagctgggggctagaggccgcggaccatggtgcggggcagccaccgctgaagtcagcaaaaccgagcctggcctgaggcaggctgcgcgggaggccaaagccatggccattgccacgtcggacccagctggcccgggcactgtatgacaacaccgctgagtccccccaggagctgtccttccgccgaggggatgtcctacgggtcctgcagagagagggcgctggtggactggacggctggtgcctctgctccctacacggccagcagggcattgtgcccgccaacagggtgaagctcttgcctgctggcccagcacccaagcccagcctctctcctgcgtccccagcccagcctggctcaccatatccagccccagatcacagcaatgaggaccaggaggtgtatgtggtgccgcccccagctcggccctgtccaacctcaggacctccagctggaccttgcccaccctctcctgacctcatctacaaaatccccagagctagtgggacccagctggctgctcccagagatgccttggaggtctacgatgtgccccccaccgccctccgggtgccctccagtggcccctatgactgccctgcctccttttcccaccctctgacccgggttgccccgcagccccctggagaggatgatgctccctatgatgtgcctctgaccccaaagccacctgcagagctggaaccagatctggagtgggaaggaggccgggagccggggccccccatctatgctgccccctccaacctgaaacgagcgtcagccttactcaatttgtatgaagcacccgaggaactgctggcagacggggagggcgggggcactgatgaggggatctacgatgtgcctctgctggggccagaggctcccccttctccagagccccctggagccttggcctcccatgaccaggacaccctggcccagcttctggccagaagccccccacccccacacaggccccggctcccctcagctgagagcctgtcccgccgccctctgcctgccctgcctgtccctgaggcccccagcccctccccagtgccctctcctgccccaggccggaagggcagcatccaggaccggcctctgcccccacccccaccccgcctgcctggttatggaggccccaaggtcgagggggatccagagggcagggagatggaggatgacccagcaggacaccacaatgagtacgagggcattccgatggccgaggagtatgactatgtccacctgaagggcatggacaaagctcagggatctaggcccccggatcaggcctgcacaggggatcctgaactgcccgagagggggatgccggcgccgcaggaggccctgtccccaggggagccactggttgtgtccaccggagatctgcagctcctgtacttctatgctgggcaatgccagagccactactcagccctgcaggcagccgtggcagccctgatgtccagtacccaggctaatcagcccccgcgccttttcgtgccccacagcaagagggtggtggtggctgctcatcgcctggtgtttgttggggacaccctgggccggctggcagcctctgcccctctgagagcacaggtcagggctgcaggtacagcactgggccaggcattgcgggccactgtgctggctgtcaagggagctgccctgggctacccatccagccctgccatccaagagatggtgcagtgtgtaacagaactggcagggcaggccctgcaattcactaccctgctcactagcctggctccatgaaggtcctttggcacagctctgctcctcccctgcctgccaaagcccccctttaggccttgggtggctggaaggctttgttaagggactaggagaaatgggggtatctttcccctttcctgccctttctgctcatctcaacctctcacagaggtgtcttctccccctaacctacagctttttgtacaagccattttgtgtaaattatttatatttaatattattccctgctttgtcaggagcaggtactaggctctggggcagtgaggaactagatccttctctcctcagcctagggtggaggtcactgcactaccacccacctctggaagactggctgtgaaaagtcaggtggcagaaacctggggccacatagagcctctctcttttcctgtttcttggctctagaagatcagcactgcactgttagctgagagtgcgggcaagacataaactgtccagagtttgaaggttctcggaaagaccggagggcttctccccacagaaggcggagagagctggggctcagacatgggtgtgcaccttaataaaccctgctgtctgcctccctgactctgcttcttgggagcatggtgagcagccctggtgctcagcagccatacctatgggacacacactacgaaaaggatgcctttagggtttgggggagattttactcctttcttcaacaactattcactggacaagttctctgctcccatgatgcgccaggcacagttctgcaagtatattgtgaatgtattgttctagtgggatacacaaataagtcagttaaaatacataaataaaaacataaacctgc

SEQ ID NO: 198475 - DNA, 2954 bp, Homo sapiens
cgggcgcgctgagtgagtgcgcgcgtgaaaaccgccgcaccgccgggggtgcgagtgtctgggccgaagcggccactccagcgacccagccccacggccacgctctcgggggcctttggctccaggcaacttggggcaagcgtctcagttctcgctctcccttcctcccagcggggtcgccgcagaccccagccctgggagcaccgctctgcagcgcggccggcgggtggagacggttggcccctaaactcgctcgtccagcccaaccgccccggcggcttctcccagccctcgaggctctcctgagcggcctggagaggcgtcgagcgcagcccagcgcccgcctgctcacccgccccggcccgggaagggaattttcggatcctgcgagcccggggcgcccccgcggcctagggcgggcagctcccggggcctggccgagccggtggcgcccgggaggccgcggggacagcacgcagcgcgcgcccttggatgccgtcccgcagcgacgccccggcccgccccgctcctcctcctgcctggctagcctgcctctcatttgggaagttttgtgggttttctttctcctcctccaaccttggcggaggccacgactcaggcgccacagctgggggctagaggccgcggaccatggtgcggggcagccaccgctgaagtcagcaaaaccgagcctggcctgaggcaggctgcgcgggaggccaaagccatggccattgccacgtcggtgtatgtggtgccgcccccagctcggccctgtccaacctcaggacctccagctggaccttgcccaccctctcctgacctcatctacaaaatccccagagctagtgggacccagctggctgctcccagagatgccttggaggtctacgatgtgccccccaccgccctccgggtgccctccagtggcccctatgactgccctgcctccttttcccaccctctgacccgggttgccccgcagccccctggagaggatgatgctccctatgatgtgcctctgaccccaaagccacctgcagagctggaaccagatctggagtgggaaggaggccgggagccggggccccccatctatgctgccccctccaacctgaaacgagcgtcagccttactcaatttgtatgaagcacccgaggaactgctggcagacggggagggcgggggcactgatgaggggatctacgatgtgcctctgctggggccagaggctcccccttctccagagccccctggagccttggcctcccatgaccaggacaccctggcccagcttctggccagaagccccccacccccacacaggccccggctcccctcagctgagagcctgtcccgccgccctctgcctgccctgcctgtccctgaggcccccagcccctccccagtgccctctcctgccccaggccggaagggcagcatccaggaccggcctctgcccccacccccaccccgcctgcctggttatggaggccccaaggtcgagggggatccagagggcagggagatggaggatgacccagcaggacaccacaatgagtacgagggcattccgatggccgaggagtatgactatgtccacctgaagggcatggacaaagctcagggatctaggcccccggatcaggcctgcacaggggatcctgaactgcccgagagggggatgccggcgccgcaggaggccctgtccccaggggagccactggttgtgtccaccggagatctgcagctcctgtacttctatgctgggcaatgccagagccactactcagccctgcaggcagccgtggcagccctgatgtccagtacccaggctaatcagcccccgcgccttttcgtgccccacagcaagagggtggtggtggctgctcatcgcctggtgtttgttggggacaccctgggccggctggcagcctctgcccctctgagagcacaggtcagggctgcaggtacagcactgggccaggcattgcgggccactgtgctggctgtcaagggagctgccctgggctacccatccagccctgccatccaagagatggtgcagtgtgtaacagaactggcagggcaggccctgcaattcactaccctgctcactagcctggctccatgaaggtcctttggcacagctctgctcctcccctgcctgccaaagcccccctttaggccttgggtggctggaaggctttgttaagggactaggagaaatgggggtatctttcccctttcctgccctttctgctcatctcaacctctcacagaggtgtcttctccccctaacctacagctttttgtacaagccattttgtgtaaattatttatatttaatattattccctgctttgtcaggagcaggtactaggctctggggcagtgaggaactagatccttctctcctcagcctagggtggaggtcactgcactaccacccacctctggaagactggctgtgaaaagtcaggtggcagaaacctggggccacatagagcctctctcttttcctgtttcttggctctagaagatcagcactgcactgttagctgagagtgcgggcaagacataaactgtccagagtttgaaggttctcggaaagaccggagggcttctccccacagaaggcggagagagctggggctcagacatgggtgtgcaccttaataaaccctgctgtctgcctccctgactctgcttcttgggagcatggtgagcagccctggtgctcagcagccatacctatgggacacacactacgaaaaggatgcctttagggtttgggggagattttactcctttcttcaacaactattcactggacaagttctctgctcccatgatgcgccaggcacagttctgcaagtatattgtgaatgtattgttctagtgggatacacaaataagtcagttaaaatacataaataaaaacataaacctgc

SEQ ID NO: 198476 - DNA, 2697 bp, Homo sapiens
cgggcgcgctgagtgagtgcgcgcgtgaaaaccgccgcaccgccgggggtgcgagtgtctgggccgaagcggccactccagcgacccagccccacggccacgctctcgggggcctttggctccaggcaacttggggcaagcgtctcagttctcgctctcccttcctcccagcggggtcgccgcagaccccagccctgggagcaccgctctgcagcgcggccggcgggtggagacggttggcccctaaactcgctcgtccagcccaaccgccccggcggcttctcccagccctcgaggctctcctgagcggcctggagaggcgtcgagcgcagcccagcgcccgcctgctcacccgccccggcccgggaagggaattttcggatcctgcgagcccggggcgcccccgcggcctagggcgggcagctcccggggcctggccgagccggtggcgcccgggaggccgcggggacagcacgcagcgcgcgcccttggatgccgtcccgcagcgacgccccggcccgccccgctcctcctcctgcctggctagcctgcctctcatttgggaagttttgtgggttttctttctcctcctccaaccttggcggaggccacgactcaggcgccacagctgggggctagaggccgcggaccatggtgcggggcagccaccgctgaagtcagcaaaaccgagcctggcctgaggcaggctgcgcgggaggccaaagccatggccattgccacgtcggtgtatgtggtgccgcccccagctcggccctgtccaacctcaggacctccagctggaccttgcccaccctctcctgacctcatctacaaaatccccagagctagtgggacccagctggctgctcccagagatgccttggaggtctacgatgtgccccccaccgccctccgggtgccctccagtggcccctatgactgccctgcctccttttcccaccctctgacccgggttgccccgcagccccctggagaggatgatgctccctatgatgtgcctctgaccccaaagccacctgcagagctggaaccagatctggagtgggaaggaggccgggagccggggccccccatctatgctgccccctccaacctgaaacgagcgtcagccttactcaatttgtatgaagcacccgaggaactgctggcagacggggagggcgggggcactgatgaggggatctacgatgtgcctctgctggggccagaggctcccccttctccagagccccctggagccttggcctcccatgaccaggacaccctggcccagcttctggccagaagccccccacccccacacaggccccggctcccctcagctgagagcctgtcccgccgccctctgcctgccctgcctgtccctgaggcccccagcccctccccagtgccctctcctgccccaggccggaagggcagcatccaggaccggcctctgcccccacccccaccccgcctgcctggttatggaggccccaaggtcgagggggatccagagggcagggagatggaggatgacccagcaggacaccacaatgagtacgagggcattccgatggccgaggagtatgactatgtccacctgaagggcatggacaaagctcagggatctaggcccccggatcaggcctgcacaggggatcctgaactgcccgagagggggatgccggcgccgcaggaggccctgtccccaggggagccactggttgtgtccaccggagatctgcagctcctgtacttctatgctgggcaatgccagagccactactcagccctgcaggcagccgtggcagccctgatgtccagtacccaggctaatcagcccccgcgccttttcgtgccccacagcaagagggtggtggtggctgctcatcgcctggtgtttgttggggacaccctgggccggctggcagcctctgcccctctgagagcacaggtcagggctgcaggtacagcactgggccaggcattgcgggccactgtgctggctgtcaagggagctgccctgggctacccatccagccctgccatccaagagatggtgcagtgtgtaacagaactggcagggcaggccctgcaattcactaccctgctcactagcctggctccatgaaggtcctttggcacagctctgctcctcccctgcctgccaaagcccccctttaggccttgggtggctggaaggctttgttaagggactaggagaaatgggggtatctttcccctttcctgccctttctgctcatctcaacctctcacagaggtgtcttctccccctaacctacagctttttgtacaagccattttgtgtaaattatttatatttaatattattccctgctttgtcaggagcaggtactaggctctggggcagtgaggaactagatccttctctcctcagcctagggtggaggtcactgcactaccacccacctctggaagactggctgtgaaaagtcaggtggcagaaacctggggccacatagagcctctctcttttcctgtttcttggctctagaagatcagcactgcactgttagctgagagtgcgggcaagacataaactgtccagagtttgaaggttctcggaaagaccggagggcttctccccacagaaggcggagagagctggggctcagacatgggtgtgcaccttaataaaccctgctgtctgcc

SEQ ID NO: 198477 - DNA, 3117 bp, Homo sapiens
cgggcgcgctgagtgagtgcgcgcgtgaaaaccgccgcaccgccgggggtgcgagtgtctgggccgaagcggccactccagcgacccagccccacggccacgctctcgggggcctttggctccaggcaacttggggcaagcgtctcagttctcgctctcccttcctcccagcggggtcgccgcagaccccagccctgggagcaccgctctgcagcgcggccggcgggtggagacggttggcccctaaactcgctcgtccagcccaaccgccccggcggcttctcccagccctcgaggctctcctgagcggcctggagaggcgtcgagcgcagcccagcgcccgcctgctcacccgccccggcccgggaagggaattttcggatcctgcgagcccggggcgcccccgcggcctagggcgggcagctcccggggcctggccgagccggtggcgcccgggaggccgcggggacagcacgcagcgcgcgcccttggatgccgtcccgcagcgacgccccggcccgccccgctcctcctcctgcctggctagcctgcctctcatttgggaagttttgtgggttttctttctcctcctccaaccttggcggaggccacgactcaggcgccacaggacccagctggcccgggcactgtatgacaacaccgctgagtccccccaggagctgtccttccgccgaggggatgtcctacgggtcctgcagagagagggcgctggtggactggacggctggtgcctctgctccctacacggccagcagggcattgtgcccgccaacagggtgaagctcttgcctgctggcccagcacccaagcccagcctctctcctgcgtccccagcccagcctggctcaccatatccagccccagatcacagcaatgaggaccaggaggtgtatgtggtgccgcccccagctcggccctgtccaacctcaggacctccagctggaccttgcccaccctctcctgacctcatctacaaaatccccagagctagtgggacccagctggctgctcccagagatgccttggaggtctacgatgtgccccccaccgccctccgggtgccctccagtggcccctatgactgccctgcctccttttcccaccctctgacccgggttgccccgcagccccctggagaggatgatgctccctatgatgtgcctctgaccccaaagccacctgcagagctggaaccagatctggagtgggaaggaggccgggagccggggccccccatctatgctgccccctccaacctgaaacgagcgtcagccttactcaatttgtatgaagcacccgaggaactgctggcagacggggagggcgggggcactgatgaggggatctacgatgtgcctctgctggggccagaggctcccccttctccagagccccctggagccttggcctcccatgaccaggacaccctggcccagcttctggccagaagccccccacccccacacaggccccggctcccctcagctgagagcctgtcccgccgccctctgcctgccctgcctgtccctgaggcccccagcccctccccagtgccctctcctgccccaggccggaagggcagcatccaggaccggcctctgcccccacccccaccccgcctgcctggttatggaggccccaaggtcgagggggatccagagggcagggagatggaggatgacccagcaggacaccacaatgagtacgagggcattccgatggccgaggagtatgactatgtccacctgaagggcatggacaaagctcagggatctaggcccccggatcaggcctgcacaggggatcctgaactgcccgagagggggatgccggcgccgcaggaggccctgtccccaggggagccactggttgtgtccaccggagatctgcagctcctgtacttctatgctgggcaatgccagagccactactcagccctgcaggcagccgtggcagccctgatgtccagtacccaggctaatcagcccccgcgccttttcgtgccccacagcaagagggtggtggtggctgctcatcgcctggtgtttgttggggacaccctgggccggctggcagcctctgcccctctgagagcacaggtcagggctgcaggtacagcactgggccaggcattgcgggccactgtgctggctgtcaagggagctgccctgggctacccatccagccctgccatccaagagatggtgcagtgtgtaacagaactggcagggcaggccctgcaattcactaccctgctcactagcctggctccatgaaggtcctttggcacagctctgctcctcccctgcctgccaaagcccccctttaggccttgggtggctggaaggctttgttaagggactaggagaaatgggggtatctttcccctttcctgccctttctgctcatctcaacctctcacagaggtgtcttctccccctaacctacagctttttgtacaagccattttgtgtaaattatttatatttaatattattccctgctttgtcaggagcaggtactaggctctggggcagtgaggaactagatccttctctcctcagcctagggtggaggtcactgcactaccacccacctctggaagactggctgtgaaaagtcaggtggcagaaacctggggccacatagagcctctctcttttcctgtttcttggctctagaagatcagcactgcactgttagctgagagtgcgggcaagacataaactgtccagagtttgaaggttctcggaaagaccggagggcttctccccacagaaggcggagagagctggggctcagacatgggtgtgcaccttaataaaccctgctgtctgcctccctgactctgcttcttgggagcatggtgagcagccctggtgctcagcagccatacctatgggacacacactacgaaaaggatgcctttagggtttgggggagattttactcctttcttcaacaactattcactggacaagttctctgctcccatgatgcgccaggcacagttctgcaagtatattgtgaatgtattgttctagtgggatacacaaataagtcagttaaaatacataaataaaaacataaacctgc

SEQ ID NO: 198478 - DNA, 2873 bp, Homo sapiens
cgggcgcgctgagtgagtgcgcgcgtgaaaaccgccgcaccgccgggggtgcgagtgtctgggccgaagcggccactccagcgacccagccccacggccacgctctcgggggcctttggctccaggcaacttggggcaagcgtctcagttctcgctctcccttcctcccagcggggtcgccgcagaccccagccctgggagcaccgctctgcagcgcggccggcgggtggagacggttggcccctaaactcgctcgtccagcccaaccgccccggcggcttctcccagccctcgaggctctcctgagcggcctggagaggcgtcgagcgcagcccagcgcccgcctgctcacccgccccggcccgggaagggaattttcggatcctgcgagcccggggcgcccccgcggcctagggcgggcagctcccggggcctggccgagccggtggcgcccgggaggccgcggggacagcacgcagcgcgcgcccttggatgccgtcccgcagcgacgccccggcccgccccgctcctcctcctgcctggctagcctgcctctcatttgggaagttttgtgggttttctttctcctcctccaaccttggcggaggccacgactcaggcgccacagctgggggctagaggccgcggaccatggtgcggggcagccaccgctgaagtcagcaaaaccgagccctgtccaacctcaggacctccagctggaccttgcccaccctctcctgacctcatctacaaaatccccagagctagtgggacccagctggctgctcccagagatgccttggaggtctacgatgtgccccccaccgccctccgggtgccctccagtggcccctatgactgccctgcctccttttcccaccctctgacccgggttgccccgcagccccctggagaggatgatgctccctatgatgtgcctctgaccccaaagccacctgcagagctggaaccagatctggagtgggaaggaggccgggagccggggccccccatctatgctgccccctccaacctgaaacgagcgtcagccttactcaatttgtatgaagcacccgaggaactgctggcagacggggagggcgggggcactgatgaggggatctacgatgtgcctctgctggggccagaggctcccccttctccagagccccctggagccttggcctcccatgaccaggacaccctggcccagcttctggccagaagccccccacccccacacaggccccggctcccctcagctgagagcctgtcccgccgccctctgcctgccctgcctgtccctgaggcccccagcccctccccagtgccctctcctgccccaggccggaagggcagcatccaggaccggcctctgcccccacccccaccccgcctgcctggttatggaggccccaaggtcgagggggatccagagggcagggagatggaggatgacccagcaggacaccacaatgagtacgagggcattccgatggccgaggagtatgactatgtccacctgaagggcatggacaaagctcagggatctaggcccccggatcaggcctgcacaggggatcctgaactgcccgagagggggatgccggcgccgcaggaggccctgtccccaggggagccactggttgtgtccaccggagatctgcagctcctgtacttctatgctgggcaatgccagagccactactcagccctgcaggcagccgtggcagccctgatgtccagtacccaggctaatcagcccccgcgccttttcgtgccccacagcaagagggtggtggtggctgctcatcgcctggtgtttgttggggacaccctgggccggctggcagcctctgcccctctgagagcacaggtcagggctgcaggtacagcactgggccaggcattgcgggccactgtgctggctgtcaagggagctgccctgggctacccatccagccctgccatccaagagatggtgcagtgtgtaacagaactggcagggcaggccctgcaattcactaccctgctcactagcctggctccatgaaggtcctttggcacagctctgctcctcccctgcctgccaaagcccccctttaggccttgggtggctggaaggctttgttaagggactaggagaaatgggggtatctttcccctttcctgccctttctgctcatctcaacctctcacagaggtgtcttctccccctaacctacagctttttgtacaagccattttgtgtaaattatttatatttaatattattccctgctttgtcaggagcaggtactaggctctggggcagtgaggaactagatccttctctcctcagcctagggtggaggtcactgcactaccacccacctctggaagactggctgtgaaaagtcaggtggcagaaacctggggccacatagagcctctctcttttcctgtttcttggctctagaagatcagcactgcactgttagctgagagtgcgggcaagacataaactgtccagagtttgaaggttctcggaaagaccggagggcttctccccacagaaggcggagagagctggggctcagacatgggtgtgcaccttaataaaccctgctgtctgcctccctgactctgcttcttgggagcatggtgagcagccctggtgctcagcagccatacctatgggacacacactacgaaaaggatgcctttagggtttgggggagattttactcctttcttcaacaactattcactggacaagttctctgctcccatgatgcgccaggcacagttctgcaagtatattgtgaatgtattgttctagtgggatacacaaataagtcagttaaaatacataaataaaaacataaacctgc

SEQ ID NO: 198479 - DNA, 2641 bp, Homo sapiens
cgggcgcgctgagtgagtgcgcgcgtgaaaaccgccgcaccgccgggggtgcgagtgtctgggccgaagcggccactccagcgacccagccccacggccacgctctcgggggcctttggctccaggcaacttggggcaagcgtctcagttctcgctctcccttcctcccagcggggtcgccgcagaccccagccctgggagcaccgctctgcagcgcggccggcgggtggagacggttggcccctaaactcgctcgtccagcccaaccgccccggcggcttctcccagccctcgaggctctcctgagcggcctggagaggcgtcgagcgcagcccagcgcccgcctgctcacccgccccggcccgggaagggaattttcggatcctgcgagcccggggcgcccccgcggcctagggcgggcagctcccggggcctggccgagccggtggcgcccgggaggccgcggggacagcacgcagcgcgcgcccttggatgccgtcccgcagcgacgccccggcccgccccgctcctcctcctgcctggctagcctgcctctcatttgggaagttttgtgggttttctttctcctcctccaaccttggcggaggccacgactcaggcgccacagctgggggctagaggccgcggaccatggtgcggggcagccaccgctgaagtcagcaaaaccgagcctggcctgaggcaggctgcgcgggaggccaaagccatggccattgccacgtcggtgtatgtggtgccgcccccagctcggccctgtccaacctcaggacctccagctggaccttgcccaccctctcctgacctcatctacaaaatccccagagctagtgggacccagctggctgctcccagagatgccttggaggtctacgatgtgccccccaccgccctccgggtgccctccagtggcccctatgactgccctgcctccttttcccaccctctgacccgggttgccccgcagccccctggagaggatgatgctccctatgatgtgcctctgaccccaaagccacctgcagagctggaaccagatctggagtgggaaggaggccgggagccggggccccccatctatgctgccccctccaacctgaaacgagcgtcagccttactcaatttgtatgaagcacccgaggaactgctggcagacggggagggcgggggcactgatgaggggatctacgatgtgcctctgctggggccagaggctcccccttctccagagccccctggagccttggcctcccatgaccaggacaccctggcccagcttctggccagaagccccccacccccacacaggccccggctcccctcagctgagagcctgtcccgccgccctctgcctgccctgcctgtccctgaggcccccagcccctccccagtgccctctcctgccccaggccggaagggcagcatccaggaccggcctctgcccccacccccaccccgcctgcctggttatggaggccccaaggtcgagggggatccagagggcagggagatggaggatgacccagcaggacaccacaatgagtacgagggcattccgatggccgaggagtatgactatgtccacctgaagggcatggacaaagctcagggatctaggcccccggatcaggcctgcacaggggatcctgaactgcccgagagggggatgccggcgccgcaggaggccctgtccccaggggagccactggttgtgtccaccggagatctgcagctcctgtacttctatgctgggcaatgccagagccactactcagccctgcaggcagccgtggcagccctgatgtccagtacccaggctaatcagcccccgcgccttttcgtgccccacagcaagagggtggtggtggctgctcatcgcctggtgtttgttggggacaccctgggccggctggcagcctctgcccctctgagagcacaggtcagggctgcaggtacagcactgggccaggcattgcgggccactgtgctggctgtcaagggagctgccctgggctacccatccagccctgccatccaagagatggtgcagtgtgtaacagaactggcagggcaggccctgcaattcactaccctgctcactagcctggctccatgaaggtcctttggcacagctctgctcctcccctgcctgccaaagcccccctttaggccttgggtggctggaaggctttgttaagggactaggagaaatgggggtatctttcccctttcctgccctttctgctcatctcaacctctcacagaggtgtcttctccccctaacctacagctttttgtacaagccattttgtgtaaattatttatatttaatattattccctgctttgtcaggagcaggtactaggctctggggcagtgaggaactagatccttctctcctcagcctagggtggaggtcactgcactaccacccaccttacgaaaaggatgcctttagggtttgggggagattttactcctttcttcaacaactattcactggacaagttctctgctcccatgatgcgccaggcacagttctgcaagtatattgtgaatgtattgttctagtgggatacacaaataagtcagttaaaatacataaataaaaacataaacctgc

SEQ ID NO: 198480 - DNA, 2718 bp, Homo sapiens
cgggcgcgctgagtgagtgcgcgcgtgaaaaccgccgcaccgccgggggtgcgagtgtctgggccgaagcggccactccagcgacccagccccacggccacgctctcgggggcctttggctccaggcaacttggggcaagcgtctcagttctcgctctcccttcctcccagcggggtcgccgcagaccccagccctgggagcaccgctctgcagcgcggccggcgggtggagacggttggcccctaaactcgctcgtccagcccaaccgccccggcggcttctcccagccctcgaggctctcctgagcggcctggagaggcgtcgagcgcagcccagcgcccgcctgctcacccgccccggcccgggaagggaattttcggatcctgcgagcccggggcgcccccgcggcctagggcgggcagctcccggggcctggccgagccggtggcgcccgggaggccgcggggacagcacgcagcgcgcgcccttggatgccgtcccgcagcgacgccccggcccgccccgctcctcctcctgcctggctagcctgcctctcatttgggaagttttgtgggttttctttctcctcctccaaccttggcggaggccacgactcaggcgccacagctgggggctagaggccgcggaccatggtgcggggcagccaccgctgaagtcagcaaaaccgagcctggcctgaggcaggctgcgcgggaggccaaagccatggccattgccacgtcggtgtatgtggtgccgcccccagctcggccctgtccaacctcaggacctccagctggaccttgcccaccctctcctgacctcatctacaaaatccccagagctagtgggacccagctggctgctcccagagatgccttggaggtctacgatgtgccccccaccgccctccgggtgccctccagtggcccctatgactgccctgcctccttttcccaccctctgacccgggttgccccgcagccccctggagaggatgatgctccctatgatgtgcctctgaccccaaagccacctgcagagctggaaccagatctggagtgggaaggaggccgggagccggggccccccatctatgctgccccctccaacctgaaacgagcgtcagccttactcaatttgtatgaagcacccgaggaactgctggcagacggggagggcgggggcactgatgaggggatctacgatgtgcctctgctggggccagaggctcccccttctccagagccccctggagccttggcctcccatgaccaggacaccctggcccagcttctggccagaagccccccacccccacacaggccccggctcccctcagctgagagcctgtcccgccgccctctgcctgccctgcctgtccctgaggcccccagcccctccccagtgccctctcctgccccaggccggaagggcagcatccaggaccggcctctgcccccacccccaccccgcctgcctggttatggaggccccaaggtcgagggggatccagagggcagggagatggaggatgacccagcaggacaccacaatgagtacgagggcattccgatggccgaggagtatgactatgtccacctgaagggcatggacaaagctcagggatctaggcccccggatcaggcctgcacaggggatcctgaactgcccgagagggggatgccggcgccgcaggaggccctgtccccaggggagccactggttgtgtccaccggagatctgcagctcctgtacttctatgctgggcaatgccagagccactactcagccctgcaggcagccgtggcagccctgatgtccagtacccaggctaatcagcccccgcgccttttcgtgccccacagcaagagggtggtggtggctgctcatcgcctggtgtttgttggggacaccctgggccggctggcagcctctgcccctctgagagcacaggtcagggctgcaggtacagcactgggccaggcattgcgggccactgtgctggctgtcaagggagctgccctgggctacccatccagccctgccatccaagagatggtgcagtgtgtaacagaactggcagggcaggccctgcaattcactaccctgctcactagcctggctccatgaaggtcctttggcacagctctgctcctcccctgcctgccaaagcccccctttaggccttgggtggctggaaggctttgttaagggactaggagaaatgggggtatctttcccctttcctgccctttctgctcatctcaacctctcacagaggtgtcttctcccccttttccagagccccctggagccttggcctcccatgaccaggacaccctggcccagcttctggccagaagccgccacgctagacatggcccacggggtcccctcaggcatgaaagccgtgtccacggcacggcaccgtcgtgcctgcactgcgctgctgccatgcaggcagccacaggcaaccacaaccgcctacagacctgctaccaaacaacgcacgccacaaccaaccggcgactagcagctcacacagggccacacacagagctgtccgggcccagcgccacggacccgcggtacagcaggaaaagcgcacagcaccgcgcgccccagccgacgcccagccacggcatgcgccccagccacgaccgacaaggaggagagagcgacacagccgccgactaacgcccgggtatgaacgg

SEQ ID NO: 198481 - DNA, 745 bp, Homo sapiens
gaatccagatctatctgatatcaagtgtgggcacttcactgctgctctctctagaatctaaactttccgatgggcagaggtaagagctaaaaggatcgcccttgggaagaaagagaggaaggagaaaagaagtgagggaggaaatggcactcatgagaatgttctctctgaccactcctcttgcccttcaggaggccctgtccccaggggagccactggttgtgtccaccggagatctgcagctcctgtacttctatgctgggcaatgccagagccactactcagccctgcaggcagccgtggcagccctgatgtccagtacccaggctaatcagcccccgcgccttttcgtgccccacagcaagagggtggtggtggctgctcatcgcctggtgtttgttggggacaccctgggccggctggcagcctctgcccctctgagagcacaggtcagggctgcaggtacagcactgggccaggcattgcgggccactgtgctggctgtcaagggagctgccctgggctacccatccagccctgccatccaagagatggtgcagtgtgtaacagaactggcagggcaggccctgcaattcactaccctgctcactagcctggctccatgaaggtcctttggcacagctctgctcctcccctgcctgccaaagcccccctttaggccttgggtggctggaaggctttgttaagggactaggagaaatgggggtatctttcccctttcctg

SEQ ID NO: 198482 - DNA, 2785 bp, Homo sapiens
cgggcgcgctgagtgagtgcgcgcgtgaaaaccgccgcaccgccgggggtgcgagtgtctgggccgaagcggccactccagcgacccagccccacggccacgctctcgggggcctttggctccaggcaacttggggcaagcgtctcagttctcgctctcccttcctcccagcggggtcgccgcagaccccagccctgggagcaccgctctgcagcgcggccggcgggtggagacggttggcccctaaactcgctcgtccagcccaaccgccccggcggcttctcccagccctcgaggctctcctgagcggcctggagaggcgtcgagcgcagcccagcgcccgcctgctcacccgccccggcccgggaagggaattttcggatcctgcgagcccggggcgcccccgcggcctagggcgggcagctcccggggcctggccgagccggtggcgcccgggaggccgcggggacagcacgcagcgcgcgcccttggatgccgtcccgcagcgacgccccggcccgccccgctcctcctcctgcctggctagcctgcctctcatttgggaagttttgtgggttttctttctcctcctccaaccttggcggaggccacgactcaggcgccacagctgggggctagaggccgcggaccatggtgcggggcagccaccgctgaagtcagcaaaaccgagcctggcctgaggcaggctgcgcgggaggccaaagccatggccattgccacgtcggtgtatgtggtgccgcccccagctcggccctgtccaacctcaggacctccagctggaccttgcccaccctctcctgacctcatctacaaaatccccagagctagtgggacccagctggctgctcccagagatgccttggaggtctacgatgtgccccccaccgccctccgggtgccctccagtggcccctatgactgccctgcctccttttcccaccctctgacccgggttgccccgcagccccctggagaggatgatgctccctatgatgtgcctctgaccccaaagccacctgcagagctggaaccagatctggagtgggaaggaggccgggagccggggccccccatctatgctgccccctccaacctgaaacgagcgtcagccttactcaatttgtatgaagcacccgaggaactgctggcagacggggagggcgggggcactgatgaggggatctacgatgtgcctctgctggggccagaggctcccccttctccagagccccctggagccttggcctcccatgaccaggacaccctggcccagcttctggccagaagccccccacccccacacaggccccggctcccctcagctgagagcctgtcccgccgccctctgcctgccctgcctgtccctgaggcccccagcccctccccagtgccctctcctgccccaggccggaagggcagcatccaggaccggcctctgcccccacccccaccccgcctgcctggttatggaggccccaaggtcgagggggatccagagggcagggagatggaggatgacccagcaggacaccacaatgagtacgagggcattccgatggccgaggagtatgactatgtccacctgaagggcatggacaaagctcagggatctaggcccccggatcaggcctgcacaggggatcctgaactgcccgagagggggatgccggcgccgcaggaggccctgtccccaggggagccactggttgtgtccaccggagatctgcagctcctgtacttctatgctgggcaatgccagagccactactcagccctgcaggtacagcactgggccaggcattgcgggccactgtgctggctgtcaagggagctgccctgggctacccatccagccctgccatccaagagatggtgcagtgtgtaacagaactggcagggcaggccctgcaattcactaccctgctcactagcctggctccatgaaggtcctttggcacagctctgctcctcccctgcctgccaaagcccccctttaggccttgggtggctggaaggctttgttaagggactaggagaaatgggggtatctttcccctttcctgccctttctgctcatctcaacctctcacagaggtgtcttctccccctaacctacagctttttgtacaagccattttgtgtaaattatttatatttaatattattccctgctttgtcaggagcaggtactaggctctggggcagtgaggaactagatccttctctcctcagcctagggtggaggtcactgcactaccacccacctctggaagactggctgtgaaaagtcaggtggcagaaacctggggccacatagagcctctctcttttcctgtttcttggctctagaagatcagcactgcactgttagctgagagtgcgggcaagacataaactgtccagagtttgaaggttctcggaaagaccggagggcttctccccacagaaggcggagagagctggggctcagacatgggtgtgcaccttaataaaccctgctgtctgcctccctgactctgcttcttgggagcatggtgagcagccctggtgctcagcagccatacctatgggacacacactacgaaaaggatgcctttagggtttgggggagattttactcctttcttcaacaactattcactggacaagttctctgctcccatgatgcgccaggcacagttctgcaagtatattgtgaatgtattgttctagtgggatacacaaataagtcagttaaaatacataaataaaaacataaacctgc

SEQ ID NO: 198483 - DNA, 3385 bp, Homo sapiens
cgggcgcgctgagtgagtgcgcgcgtgaaaaccgccgcaccgccgggggtgcgagtgtctgggccgaagcggccactccagcgacccagccccacggccacgctctcgggggcctttggctccaggcaacttggggcaagcgtctcagttctcgctctcccttcctcccagcggggtcgccgcagaccccagccctgggagcaccgctctgcagcgcggccggcgggtggagacggttggcccctaaactcgctcgtccagcccaaccgccccggcggcttctcccagccctcgaggctctcctgagcggcctggagaggcgtcgagcgcagcccagcgcccgcctgctcacccgccccggcccgggaagggaattttcggatcctgcgagcccggggcgcccccgcggcctagggcgggcagctcccggggcctggccgagccggtggcgcccgggaggccgcggggacagcacgcagcgcgcgcccttggatgccgtcccgcagcgacgccccggcccgccccgctcctcctcctgcctggctagcctgcctctcatttgggaagttttgtgggttttctttctcctcctccaaccttggcggaggccacgactcaggcgccacagctgggggctagaggccgcggaccatggtgcggggcagccaccgctgaagtcagcaaaaccgagcctggcctgaggcaggctgcgcgggaggccaaagccatggccattgccacgtcggtgtatgtggtgccgcccccagctcggccctgtccaacctcaggacctccagctggaccttgcccaccctctcctgacctcatctacaaaatccccagagctagtgggacccagctggctgctcccagagatgccttggaggtctacgatgtgccccccaccgccctccgggtgccctccagtggcccctatgactgccctgcctccttttcccaccctctgacccgggttgccccgcagccccctggagaggatgatgctccctatgatgtgcctctgaccccaaagccacctgcagagctggaaccagatctggagtgggaaggaggccgggagccggggccccccatctatgctgccccctccaacctgaaacgagcgtcagccttactcaatttgtatgaagcacccgaggaactgctggcagacggggagggcgggggcactgatgaggggatctacgatgtgcctctgctggggccagaggctcccccttctccagagccccctggagccttggcctcccatgaccaggacaccctggcccagcttctggccagaagccccccacccccacacaggccccggctcccctcagctgagagcctgtcccgccgccctctgcctgccctgcctgtccctgaggcccccagcccctccccagtgccctctcctgccccaggccggaagggcagcatccaggaccggcctctgcccccacccccaccccgcctgcctggttatggaggccccaaggtcgagggggatccagagggcagggagatggaggatgacccagcaggacaccacaatgagtacgagggcattccgatggccgaggagtatgactatgtccacctgaagggcatggacaaagctcagggatctaggcccccggatcaggcctgcacaggggatcctgaactgcccgagagggggatgccggcgccgcaggaggccctgtccccaggggagccactggttgtgtccaccggagatctgcagctcctgtacttctatgctgggcaatgccagagccactactcagccctgcaggcagccgtggcagccctgatgtccagtacccaggctaatcagcccccgcgccttttcgtgccccacagcaagagggtggtggtggctgctcatcgcctggtgtttgttggggacaccctgggccggctggcagcctctgcccctctgagagcacaggtcagggctgcaggtacagcactgggccaggcattgcgggccactgtgctggctgtcaagggagctgccctgggctacccatccagccctgccatccaagagatggtgcagtgtgtaacagaactggcagggcaggccctgcaattcactaccctgctcactagcctggctccatgaaggtcctttggcacagctctgctcctcccctgcctgccaaagcccccctttaggccttgggtggctggaaggctttgttaagggactaggagaaatgggggtatctttcccctttcctgccctttctgctcatctcaacctctcacagaggtgtcttctccccctaacctacagctttttgtacaagccattttgtgtaaattatttatatttaatattattccctgctttgtcaggagcaggtactaggctctggggcagtgaggaactagatccttctctcctcagcctagggtggaggtcactgcactaccacccacctctggaagactggctgtgaaaagtcaggtggcagaaacctggggccacatagagcctctctcttttcctgtttcttggctctagaagatcagcactgcactgttagctgagagtgcgggcaagacataaactgtccagagtttgaaggttctcggaaagaccggagggcttctccccacagaaggcggagagagctggggctcagacatgggtgtgcaccttaataaaccctgctgtctgcctccctgactctgcttcttgggagcatggtgagcagccctggtgctcagcagccatacctatgggacacacactacgaaaaggatgcctttagggtttgggggagattttactcctttcttcaacaactattcactggacaagttctctgctcccatgatgcgccaggcacagttctgcaagtatattgtgaatgtattgttctagtgggatacacaaataagtcagttaaaatacataaataaaaacataaacctgcaaaagaaaaaaaaagatgaaaaacaataataggaagagagaaccgaacgaagtgactgaagaggcgacaaccgaagaaaaaaaaaagggggggggaggagaacagaaatatgaacacacgggggggggccagcgacgggaccagacccccgaatggtgtgccggagaaggtggggccaatgagataggtccaagttgtaaaagagtagccgaccagaaggaggacaaccaagggtgcgggaggggggaaaagacttggcaagggacgaatccttggaaaaagaagccaatgtagggggggggggcgataagtagtccgcaaacagcccaggaataagagtacccagggggatgaaacaaagacgtatgagagtcgacaaacacgcgaagatctggggagaaacaaagtgagcggggacaattgaagaagac

SEQ ID NO: 198484 - DNA, 616 bp, Homo sapiens
caagtatataaaaggcacattgttttataaatctcctcaaggaaattcaagggcagtggaaattcttttggttcatgaggtggtgtttggtaatagaaagaaagggtcaaagttggcaaagtgatgcaggtttagtgtcctttatctgaaatgcttgtgaccagagtgtttcatattttgtatttttccagattttggaatatttgcatatacaaaatgagataacttggggatggaacccaagtctaaacatgaaattaatttatgtttcatatatatctcttatacacatagcccgaaggtaattttatatgatatttttagtaattctgtacattgaagataggaagggaaaaaaataataattctctgcacgaaacaaagctttgactgaccagcacatgaggtcaggtgtggaattttccaccatggcactcaaagggtttatgaatttttaaatgagggatgctaaatctatatgttggattgaacttccatcgtagaaaaaacttcttgttaggagcagactcctaattcgcctattgacttgattgattaattgagacagagtctcctctggcccaggctagagtgcagtggtacaatctcggctcac

SEQ ID NO: 198485 - DNA, 245 bp, Homo sapiens
ccgggaccatcgagtactgcggaaagggtggcccgaatctgacccctatttagcacttgctgtgggtggtgccaggacaatcacttgcatgctgggcatgacgagttatggattatcttcagggttcctagggcgctggcttgggaaagatttccatccagtggttttgttttgttatgtctgagctgggaaagaaaggggtttacaagagcgtcaggaaaaggaagattgaagaggagatgggg

SEQ ID NO: 198486 - DNA, 720 bp, Homo sapiens
acaacacacctttattatctgacatttctgggggtcagaaatccaaaatgactctccctgggctggatccgggtgttggcagagctgcgttccttctggggtcctgggggaagcctgtttccttgccttttccagtgtctagaggctgaccccattctttggctcatggcctcttcctccgtcttcaaagccagcagtgttgggccgagtctttctcaggctgctacctctgttctctctctcgtgcctccctatgtcatttgtcaagacccagaggattccacaggcctacccagataacccggggtaatcttcccactttaaagccagctgattgacaaccttaatcccatccacaacctctgtgaccctctgccatgcaaggtaacatactcacaggcatagggatgaggatgcggatgtctttagagggccactgttttgcctaccacagcttccatttggattcttgtcccaacccctacaaaagtgaggcatataatttgttgaattctgaataaaatgctaccagtgtctacaaattatattttttctttttttaaaaaaaaaaaaaaaccttcttccccaagtctggtttcctttagacctcaggactaagtacctgagaagatctgcgggcaaggatagttatgtgattatctggacagaatggcatttctgattgacattgttgcattactttggctccagatgcagtgg

SEQ ID NO: 198487 - DNA, 371 bp, Homo sapiens
atttcagccttagaagttcttggcttgtagtttttgttgtactcatgaaaatgctcccccatatatatgatcattctcgcttactataacatccttgcttactaaatgagttaacagggctttatggtgtgtatcgtgaaacacacgtgcattaaagaccctctggaaggtattagcttttcacactttcacaacaaaagcttcacacttgtggttattaagctattttctctaaccagttccctttcaagcaaaatgcatacattggtctctgtaggtgatgggttaatgcatggaaatagtttctccttccctggaactgggaatagtgggtgagatagtgtattttttaatgtaaagacaggcacaaa

SEQ ID NO: 198488 - DNA, 372 bp, Homo sapiens
tacttaacagcaaatggtaaagcaggaagatcttcagtagcataaccagacactataaactgagtccatgtgaatggcaaagactggataacagaacaccatgtaattctactatgaacatatgtgtaaacagatatcataaaaatactttaatgaagtatttcattatgaagccaagactctgttaaacctaaacataagtggatggttgtaaaatgattgcagccattggcaaagccttattagaggtatgaagaatggaggcttaacttttccttatcccagggtttatgcctgcagtgagtctaagaatggtactgcaaatggtgaaaaggaacagcaggtagtaaatactgttcacttattgaaagc

SEQ ID NO: 198489 - DNA, 392 bp, Homo sapiens
ggtactccaggcagaaggcacaacgtaaacaaaggtgaggaaacaggaaacataggatgtacacaaagaacaagttttaactttgacagaaagaattgaggatgacaaaagggcaataatgatttttttaaaatttgctttgaaagaatgaatagagtcagatcattaggggcctagaggctaagataggcagtttgactaattttttctaagcgccagagaatgatgaaatgttttcagcaaaagcagtatgcctggaactctgctataggaaaattaacacagtgggtatgtgtggcattaatcaaagaaggaagaaaaagttgaggaaatcacctagaactctaatggaaaatgtgacataacagttagaaaagcaggaagcagcaaag

SEQ ID NO: 198490 - DNA, 449 bp, Homo sapiens
ggcatcactaatgtcactagtggcattttgaatgggtcccatagtgttagacaaggtttacaatattccattaaatacaatgaaaaatacataagaactatgagatcatttctttactttgatatgcaatttactggagagacaagctgctctcacagtttagcatcacagcatgcagtgttttcagtggatactcacaacacttgagtttactgcaatagcagcaggaggtagctatgaaattattacaatactgcaatatgtactacagttaattttatacagttatgatttaatactgcatatttacgtttgtttacgtttgtctcgactatgaatggcaccatgtgtagtctgtgtttatgtgcctaaattttgataaattttaactttttataatagattttatgtatgtgtagattttatgtagtaaatgataaaacaggcca

SEQ ID NO: 198491 - DNA, 465 bp, Homo sapiens
tgcaaaggtggacttggaagccattttcatttttggcctatttagaaaattaaatgatactactttttcctatacaacttatatttggtgggatatttttatttacttaatttgaaattttagactgaatagtcttaaatttccagcataaatattctatattttaatcaatgtttccttgtatgtagcatttgtacagttagttttttgaagtttttaattttttttttgtttgagacagtgtttcactcttgttgcccagactggagtgcaatgggcgacctcggctcactgcaacttccatctcccaggttcaagcgattctactgcctcagcctcccaagtagctgggattacaggcatgtgccaccacgcccagctaattttgtatttatagtagagatgggatttcaccctgttggtcaggctggtctcaaactcctgacctcaggtgatccgctcacc

SEQ ID NO: 198492 - DNA, 328 bp, Homo sapiens
ggagtgaagggtgacacagcgatacacaataacctttacagggttcatctgcaagtcagaatcattcaaggactaggcctaattcacctgaggtcacatgtgaaataatttggatgagattcttaactccagttgaactgtgttatgcaatcatgcttggttcactgaggctggaataacctttatgctggaaccattcaccaagcaaaaacatggctttacttttcaggatgatggggcagggcttagtcccagaaaagaaacactcttacacttgttactagtaagaggaacacttgtagcctcttagggaacaagaaaacatggc

SEQ ID NO: 198493 - DNA, 434 bp, Homo sapiens
aggctcatttgaggaaatggtggaacttaagaggagggttctctatcattgtcaaaaacagcatgaaattcttatgaattaagttgtaaagagaatttctgaattgaggaagacattgaaatagattgtctgcaagattccgattaatgctatttttatggttccaaatttaagatagacaatagctgatcataatagggaacacttacagacattactatgcaaagacttgcaacaactgtatgaggcaggtgtttttatctccatcttcaggatgaaagaactgaggcatagagtagtaaaagaaacttaattagcaggtggtggggctatgatctaaacacaggcattctgggtccaggtccatgctctgaacctctgctgtacttgctgagaactctcaatgttacttattctatcagtggcttaagctg

SEQ ID NO: 198494 - DNA, 478 bp, Homo sapiens
atgaacttactatagccagatttatctttcctgtagcccccacttacccagtttcatttctgtgattgcagtttcccatagtacagtacactaagatagttatgagaaatagagaccacattcacttgctctattttattattgggtatcattgttaatctcttactgtgcctaatttagaaattaaactttatcatcggtacatatgtataggaaaaaacatagtataggtagatagggcttggttctatccatgatttcaggcatccactggggatcctggaatgcatcccccatggacaaaggggagctactgtactttccttctaatatccgaggattgtggactcccctcttcttcgaggtcagtcccttcatctgtactcctgaccctttggcccacctcttttgagatctcaggccatctttacctcttcccccttagactttcagcctctccccctgaactgagtccttc

SEQ ID NO: 198495 - DNA, 364 bp, Homo sapiens
attagaggtggccgacagtggattctgagggaaaaggaaaaggtgactaggaagactttggagatttccagttttctggaggatggtacctggtaatgacaatctaaatagtagaaagtgagaaagactgagagcctgggaacaaacttgatgaattccaactttaaatgagggactagcgaacgtatctgaaaaggaggagccagtgagatagaagaaactcagctgtgtggtgttgaggccaagaaaggagtggcctatgccatactgctgaaaggcctagtaatgccagcaacaattgtagctaccattatcacaggcttattatgtgccaggtactttataagttttatctcatttaatc

SEQ ID NO: 198496 - DNA, 241 bp, Homo sapiens
cagcagtaaatgagggttctcttaggcaggctttcgagctctaacatcactgagtttctttgatatgttgggatttcttaactctgttgcttgcttagacagtggaagtgcagctcacagcgttactcatagtagggcatgatacatttttattggttagctgaggaatcaaaatatgagtagtccgttgagtggccctgaggtaccactttcattttgatttgtttctacttcacagagg

SEQ ID NO: 198497 - DNA, 444 bp, Homo sapiens
  misc_feature (36)..(36): n is a, c, g, or t
  misc_feature (64)..(64): n is a, c, g, or t
tcgggatgcgaggcgggtggatcatgatggtcaggngatcgagacatcctggctaacaaggtgnaaccccgtctctacaaataaaagatgtgagcatctgagatcaccccctagagattctgattttactggggcggtgcccaggcaatgataatttaataggtacagagaagagggaggtggaactttgagacctgcccacgggtggaagcagaacaaaccagagatggggctaggagaggctaggaaactaggagaggctggcagaaaggagggaggagattaggtcaggagcaaggccgtctcaggaaagacggaacagcagctgcgtcagagggaggaaagccaggcttttcatgaggactggactgtccccttgaccttcgtctctgggctgtggacattggtgggggtggagaatgactcggtgtggggaggtgtggt

SEQ ID NO: 198498 - DNA, 497 bp, Homo sapiens
ccttacaaccaccctacgtaatacacacgcttattattccccattttattgataagtaaagtaaggctctcagtgcttaagtaactggcccatgattacagaattaattgtgttgaagtctggatataaaccctgattcaggtgagccacagttcacattcttaaccacatagaggccattgttctaagcaaagatgcattttgtatgctataatttttttcttataacttttctttcagtcatctagatttctcagcaaagcttacccagataggtaaacattttggaagatgtagaatagagaagattttttagaaggggagaagtgggagagagctttccatattgcaaatttttgagatggtatgggaaacagcatatatgccactattgaatgtaacttcggatatattctttcattattctacatgagtttttaaattacatttactttggatccttcagttttgtcaagctcatcaaaatcatcttttta

SEQ ID NO: 198499 - DNA, 306 bp, Homo sapiens
ccttttaatgaaaatttattgataaactctaatagcagtctggatttttttttttatttccccaagactatcataaaacggtatgatagcagtctgttgtctcacttcaggaaaaggctttacttttataaatcagtccacctccccttcagtctaccattgatgggcatttaggttgattccatgtttttgctattaggctgtcagaaattccagggcagaggccaagtttatttcttctttgtatgtcttaagcacagtgcccaaactgtgctaagtactcaataaatattagttgaattgaac

SEQ ID NO: 198500 - DNA, 627 bp, Homo sapiens
ctttttttctattcctagtttctctcacttccttttgcttactgtttaaagtttcaaaacttgctgcacatcacatccttctttttatcagctttggtgcaccttagaacagaaatttctcccgggaggacaggatacaggagcctgtatttagaaagtacttattatgggttggatgaaggcctaactatgcctagagtcaagctgcttgaagccattctaatattcatttagttagaacggtaaccacactgagttattgctggtctcatatggatcatatattcacagtcagctcttggcttagacaagaagatatatattgtctctgctgttcacatcgtgtatttttatttcattatgactattgtgcttagaagcatgattttcaatctatattcccaattaaattatttctacacagtctgtacatgtaagcacatggttttctttgaagcagactttgttaaaattgatacctattctctactatctctgccttccaggactaccacattctgccctaacgagacaggaagaaacaattttttacatgaatggacttcataaccaggcatataggaactggcgcgaagttttaaaagttctagaaagcagtagaagttc

SEQ ID NO: 198501 - DNA, 548 bp, Homo sapiens
aaaagaaatataaagctcttaatcagtgccttgcactaatgggcaatcaataaagtgatgctgtatcatcatcatcaattctacgatcaattctcaggctttggaggctttagaatctttctatgtctttggatgttgtggcctttattcaacatacaagtttgtttggagctggtggtcagggatatggtattttcactaagttagggatggagctttgtaagaaatcagtataaaggaggaaaaaagaaacaagcgtcctaaagacagaacatttacagctgagcaagtgctgatggctgccttcaccacgttctgctgcagcggttctcagcatttatgtgcatttctgaaagattcccactcttttctccccagagtctgaatggagaaggtctggaacaacctgagattcagcatttttaggagtgtctctggagattttgaaacacgtggttcaaggactctctgtctcttctccctcccccaaacgagaaactgctgcttgtgtctgagagtcaatacgagatttaaaaacagcaacaaaa

SEQ ID NO: 198502 - DNA, 411 bp, Homo sapiens
ctggcactcccacagccaagttactggatttctttccattctttttttcatgcattttggcatggaagataccatattacaacataattttttcacttagtatattattattatagccatttctcttactaaatttgcttccgaaacatcatttttaatgtctgcgctaatattccactgtaggcatgcattaccacaattttgccagttctctatttgacacttaggtcatttgcaaattttcacttttataaacaaataaaataagcatctttgtgcatacagctttatctgcattttaattatttctttaggaagggtctcagaagcaggattaaaactaggaaaaggagtacatgagtacagctgaaaaacccactgtctacagcaggggaaatgatttaaaaaaat

SEQ ID NO: 198503 - DNA, 1042 bp, Homo sapiens
ataaacatgtaaacaatgaaacaatgaatatggtactggtactgtcagaaggccgtgtggtaagcagccttgaggagggttgccgagggagtctgagaagatgcctgtggagttgagactgctcagtgaggagaggcaagggagtctagggtggctggggtgtcttagatgaggtcagagagaagagcaggaccagaaatggccagaacctgtcagctgcctttggactttggatttaattctggttgcagtgagaggctgtgggaggattctgagcaggggcgagctgtggtttgatttgcacttagaagataattgggatgtcgtgaagactggactgtaacgggctagagtggaggtgaggaaagcagttcgagttggtcatgaagcagttggtgaggaaaacctaagtggatatttgcctcttaggggcaagcagtgttctaggcttcggcagtgaacaaaaatcctttcctgatggagctcgaatcctggcaatctgctgttgctgtagtcccaggaggagacagcgtggtaccttaatttaggctatggctgtaggagtgagtacagtgggacatcattggctttgggtatatttcagaggtagaactggatttgagcaaggattagaagtgggatgtgggaatgagacaggctcggtttctggcctgagccactgggtagatgatgatcgcattactgaggtgaagtaggaaattgttaggaagaggacatttggtgaggaaaacccaagtttcttggcttcgttacattagagatgcctattataaatttaatggaaatggcaagtcaccaattaggtatttaggtcgggagaagtttgaggtcggagagagacattttggtgactttctttaactgcggaccatcctgaacaatatgtaacccataaaagagcctgggctttggactcaggcctgggtttcaatttggaaatctggacaatgaggactggtgtgactggatgagttacttaccctctatgacctcattttacctcaactattgaatgggtact

SEQ ID NO: 198504 - DNA, 798 bp, Homo sapiens
ctggctaatttttgtatttttagtttgagaccagcctggccaacatagtgaaaccccatctctacaaaaattagctaggtgtggtggcaggcccctgtaattccagctactcgggaggctgaggcaggagaattgctcgaacccaggagatggaggttgcaatgagctgagatcgcaccactatactccagcctgggtgacagagcaagactccatctctaaggaaaaaataaagaagttgaaaacatcatccaacatgtaatcaatataaacattattagtcagatattttatagtttttttgtgctaagttttcaaaatctgatgcatattttatacctagagcacatctcagtttagatgctacattttcagcaattgaagtgaaatatagccctaccaaaatgataaagttgtgtttaatgggaaaatacttcatttactttagttttaaaatatgttaattaaaattaaattaatttaaaatctaggtctaaccacatttcaagtgctcagtagccacctgtgtctagtgagtgctgtattagagagcatggaaatagagttgtggggtagggtgggcagcagcatggagctgcgtcaggaacctattgcagtaattgaagccaagatgttggccgggaccagagtgttagcagaggagtaggtgagaagtggttgtattcaagctgtattttaaagatccagcttgcgggacttatgaatggattgaatgtgggatatcagagaaagtgaggtctcaacagtaatcttttcagtctgagcagttgaagaata

SEQ ID NO: 198505 - DNA, 480 bp, Homo sapiens
ctcatatccagtcatcttacagggttggctccataaaggaaacagtttaattttccttagaattagcatattctgctgggattacaggcatcagccaccacacccaatctgattatctttttaaccagacaaaacaatagtactctataagaatcgtaaaattttattattaaaaatagcagccgggcatggtggatcacgcctgtaattccagcactttgggaggccgaggcaggcagatcacttgaggtcaggagtttgagaccagcctggccaacatggtaaaaccccgtctctactataaatacaaaaattagctgggcgtggtggcaggcgcctgtaaacccagctacttgggaggctgaggcaggagaattgcttgaccctgggaggcagaggttgcagtgagccaagattgcaccactgcactccagcctgggtgacagagtgagactccatctctaaaaaaacaaaaaaaga

SEQ ID NO: 198506 - DNA, 433 bp, Homo sapiens
ctagattattttgaggtcttattttcccctttacaactgggaacatcacagtttttttataactagcctggtctgagctgtcaatgaaaatcttcaattttttttcattctctcatccttctggcttagctttctgacaacagggcctcaggaaaaccaagagaatcaagctggaatgtttgtagcatcccatttgacttgacaacagcatatggaacaagtcagaacctatttcaggacttgtgcctggctctttagtctccatatggaaccataggcatttgaggaaccaacccttttgatggggttaccaagttctggagacactttatcatcttgattgtcctatctattgttcaattttgcctgaattaatgtaggataaaaccttgcagaggaaagaaggaagaggttgttatagaaatctattatc

SEQ ID NO: 198507 - DNA, 573 bp, Homo sapiens
tggaagtatgaaagtaggtcattttgaaataacaaaaggcacgctcataaaaagcaaaaatacctccatggttttggttatccaatttctcaatctggtttgggtcagtgggaaagtttaagaattaaaaaatgaaagtttttgacagttcaagttcaaaagtaaatttatagatgaagaaacagaggcataagagtgtttaaataacgtgcccaagtcacacaactagtaaggggcagagcttggattcaaacccagaccaggtgctccagagcctccctgagccaccaggctgtgctgcctcctgcatgagacacaggcaacaaaagacaccaaggaaaggcagaggtgagtcacgtgtgcgtgactctgaagagtgacaggctggatgctaagggaggcagcatgccaacccgagtccaacaagagtagaatgttgacaggaattctttcattcactcattcattcgctcagtgttcactgcatgcctattccagacgcctgcctgctcaaacagctcaaggtgttgagggaggcagacacctaactcacacctgccttgttcacagttg

SEQ ID NO: 198508 - DNA, 408 bp, Homo sapiens
gggagtgcactgcggtgtcttaatgagggtgacatacctaattcatgaggttaggagagtgtccacatgtgcagggtggaattcaagaagcacaggcgtagtaaggggttatgctaacacatacatcacatgagcggaaaatggcagataagcccctccttgggcggtctggtcttgtgcacatgtgggtgatagggttaactcctttgagtaagatttatgttgggatattgcttattttagtttttcaaggtcctgcgatcagccagtatggtgccttgagtaagatttagaggcttcaacctagctgaagaatttcaaatctacaaatgagcgcttcctgaaccagataaaagttcaagagatgtatgtctggaataagagagaaagcactgagaaagggagtcc

SEQ ID NO: 198509 - DNA, 350 bp, Homo sapiens
taagaccaatgtcatggagcttttctcctatgttttcttctaggcattttatggtttcaggtgttacacttaactctttaatccattgagttgacttttgtatatggtgtcagataagagtctaatttcattcttctgcatgtggatatccaatttttacaacacagtttattgaagaaactgttgttccctcactgtgtattctgtaatcaaagattagtagacaacataggcatgggtttatttctggactatcttctgttttattgatcaattagtcattaagtcagtaccacactgttttgattactatagctttgtaatataataaaatcacagagtgtgatgcc

SEQ ID NO: 198510 - DNA, 475 bp, Homo sapiens
cttaatgtgttataatctgaaagaggggaaaaaatccgaaaataaacagatggccttgttttgagtgcaccttataggccccatttcttggcttacacaagcaataaggatactaatttatgcagttcaagatgcaaattttccggccacttgtattagctgttctctagttgttactgtgctcagtttattctgacccccagccataaactgcctttcacttcatcaaatctataataccttgtttacagaggagattgaaaaaaaaaaatctatcacttctgctagaaatgcttaaaactcatgtctatgattatgatattatttctgcaaacaaaagacagcattaagtacatatgcacatacagggaggtagaaggaaaccaagtgcttattatacgctaacctgtttaattctctcaatagttacagagtaggtagtgttatgtttacgtttcaggtaaatgaaccgagg

SEQ ID NO: 198511 - DNA, 468 bp, Homo sapiens
tctcaattgacattgcaccacattgaactgcacacttattcctgctgtactatatattgtatatctttaagcaggaaaaaatgacttgttatttcaagcgaacaatatgcattatttgactccctgaaagacccattaatctctaagttagagttataccaatcatcggagtttctaatttgtgaatctgtgttctaattaatataaattacaaattactattctattctgcaaagccatacaaactttatatttttgaattacccttcagtattccctaaaacctaaccaggtaacaatcagagttgaagttctttcttcccataaacctgatttttatcctttgccatcaaagcctttttattgtaaaggcttatattaattttctaagtttgaatacatgtataattctacaataatacattgcgcttgaatagtttattttctactcacaaagggtacaaaaag

SEQ ID NO: 198512 - DNA, 104 bp, Homo sapiens
ctagaggcctaatcagatccagttttgttttgtgtgtgtgcaagaacactttataatattatggtgttgcaagtggtgttatgtatggtaccctttaaaagttt

SEQ ID NO: 198513 - DNA, 457 bp, Homo sapiens
gccaaccataaatgggagttcttgttgttttgtggacatttgggctcagtgtacccataaccctttgatctagcagtgttaagttgggattgtggcattactgccactttcctttttgagaatctaatgcccactttctccagagaaatccactttttgcatataacttgtaaaattttgtaatattggggttcacagcctggagtccaggttgagagtgtctgctgtagcctccaaaatatttaatatttcagtccgaaatttgaaagaacaggaaggcctcaatgaaaacaaacccttctaatcattaactatcctttccttaagtaacaagaacaacttacctttaatctttttcgttaagaaaggactgggtttctttaagaaaggactgtcagaaagtctgggttagtgttacctttgctttgaagtcgacgcggccgcgaatttagtagta

SEQ ID NO: 198514 - DNA, 483 bp, Homo sapiens
gagttcccgccggagcaacaagtcctggtgctcggagaacccagagggcagtaggggtccaacgcccctctccctgccctaggacccagtcaggaatgtctgttttgagaaggaggagaatctgggtgtcctcagaacgatttggcacagttgtgcggagaatacctgctagagaagccactatagttagagcttcacagccgacacagaaatgagaaagtatttgatgtattcagacagcctgacaaaagcctttttaaattattatgatctatatcagaaaaacactggaagccgcatcatagtcttttggtatacgcattttatatcctcttcctgggtggttttaaagccaaatgacttttcattacaatttgaaattatttttaatactatagtttaaagaaatgatacattatgcagaaaacatatagactgtgttgtccaaaaacattaaagatttaagcgcttcatcttcagtgt

SEQ ID NO: 198515 - DNA, 506 bp, Homo sapiens
tgctgtgattataggagtgagctgggccccttcattgattagagaaaaattcaccaaaactcagaaataactggagttcttctatgtaaatgatatggtaacctgctttcctatataataaatttgtcttcatttaagttagttataaattaggcagcctgggcaacataatgagaccctgtctttttttgttttttttgagacagagtctcgctctgtcgcccaggctggagtgcagtggcatgatctcggctcacttcagcctccacctctcgggttcatgtgaatctcctgcctcagcctcctgagtagctgggactacaggcatgcgccagcacatccagctaattcttttatttttagcagagacagggtttcaccatgttggtcaggctggtcttgaacccctgacctcatgtgatccacccatctcagcctcccaaagtggtgggattacagatgtgaaccaccgcacctggctgagaccctgtctttaaaaaaaaaaa

SEQ ID NO: 198516 - DNA, 580 bp, Homo sapiens
tcttcccattgccatctcagggatcctcagggcagcctggtgaggacagtgagggcacgggattgcagctaacacacagagctgtgcagtgaggcaggcaggagcttgcttgggagagaggcaggggagtcgaggggcacctggcaccttatctgggccagctggcactgggttcgagtcccagctctgcccattggcagccatgtgaccttggatgcttcactcaaccctcctgtgcccgaatttctccatcgataaaaggaagatgttggtaatcgtattacccacctcatgggttcttataaagatggaaagaataagaatcaatcatgttccgagcttgagacacagctggctgattttaagtgtatgttatggttaaagtgagggagtcgagcttggactgtggaccacctgactgcattgctgtccctctaaaggtcatgattgggtggtaactgaacttcagcttctcctggattcataatcttatttcatttcataaagtacaatcatacagtcaacatgactttagaatattggaggaaactttctatgttcctcaagtaccatttaatta

SEQ ID NO: 198517 - DNA, 405 bp, Homo sapiens
cagtatctatagggtttggtactatccaatgtttcaggcatccatagggggtccaggaacatatcctctgtagataagtgggaactactttgaaaaagacatggcagccactagctcccagccacagaatcttgggaatgttactttacctataagttcctacccctgcaacaaaaatgaaagactagacaagttggcttcaaaggttcttctgttaccttctctaaatctttggtgtacacataaaccccaatctttgctatgacacctagcacagacaacgtttgttgtgtaagataactaaatagcaattttcttaaattgttttgatggttctgtcactaaagtattatcttgactaaatgttaataaactactaaaaagcatgttttctaaattctgcct

SEQ ID NO: 198518 - DNA, 382 bp, Homo sapiens
aaactaaggctcatgcttctagacaaaacagaagttacggaagcataatatataaaaaaaattcaatgactagaacttggcagtttaaaactaaacttgcaaagggtaggtaaccaagtgctgtctacctgagcagggcactgtccaggaaagatgattattttttcttaaattctagcctgcattattttaattccaatttggttatgtcagttagtataggaaagaggtacgaatttttaggaaataaaaagatatattagggctgggcacgatggctcatgcctgtagtcccagcactttgggaggccgaaacaggaggatctcttgagcccagaagttagagaccaccctgggcaacatagtgagacacgcgtctcta

SEQ ID NO: 198519 - DNA, 423 bp, Homo sapiens
aagggcattaagtgcctgccacatgttaagggccatataagcactgactcttattagtagtgctcttatcattcttttggcttgtggctgtgctccattattaacattaaaacacagcctgagagctatctcctatttcatcagtagtttaccttttatgtaagtgagatcatcagatcacttcttgataggaaattagggcagataattagggatatgtgatatcccttgatatgtgaaatggggcctaaatgaaagggagtttctgaagataacttcacccacttcacagtttcattctgatattcctgttcacatatacttaaaacagtgagacccacaaatatttcctgaactggattcattgtccataacccctccaccattcaccatcctttaccaacaaaaccaaaccccatcttc

SEQ ID NO: 198520 - DNA, 1001 bp, Homo sapiens
ggagggacggccgcgcgcgccagctgccaggcggggatcgggcggcgccgagctgaggtggtgagggactagctcccggatgtggagaagctggggagaaggcgtgggaggaagatggactcggtggagaagggggccgccacctccgtctccaacccgcgggggcgaccgtcccggggccggccgccgaagctgcagcgcaactctcgcggcggcagggccgaggtgtggagaagcccccgcacctggcagccctaattctggcccggggaggcagcaaaggcatccccctgaagaacattaagcacctggcgggggtcccgctcattggctgggtcctgcgtgcggccctggattcaggggccttccagagtgtatgggtttcgacagaccatgatgaaattgagaatgtggccaaacaatttggtgcacaagttcatcgaagaagttctgaagtttcaaaagacagctctacctcactagatgccatcatagaatttcttaattatcataatgaggttgacattgtaggaaatattcaagctacttctccatgtttacatcctactgatcttcaaaaagttgcagaaatgattcgagaagaaggatatgattctgttttctctgttgtgagacgccatcagtttcgatggagtgaaattcagaaaggagttcgtgaagtgaccgaacctctgaatttaaatccagctaaacggcctcgtcgacaagactgggatggagaattatatgaaaatggtcattttatttggctaaaagacatttgatagagatgggttacttgcagggtggaaaaatggcatactacgaaatgcgagctgaacatagtgtggatatagatggtggatattgatgggctattgcagaagcaaagagtattaagatatggctatttggcaagagaagttacgaaattaactttgggtttgcaaattgatggattgttcaccaagggccctttatgtttcaggagaccaagaatt

SEQ ID NO: 198521 - DNA, 1042 bp, Homo sapiens
  misc_feature (47)..(47): n is a, c, g, or t
gcgattggaacatttaaccccgtggattttaaaaaagccaggctggntaccgagccctccgatcggatttgtgacagcgtcgatggcgggcggctgaggtggtgagggactagctcccggatgtggagaagctggggagaaggcgtgggaggaagatggactcggtggagaagggggccgccacctccgtctccaacccgcgggggcgaccgtcccggggccggccgccgaagctgcagcgcaactctcgcggcggcagggccgaggtgtggagaagcccccgcacctggcagccctaattctggcccggggaggcagcaaaggcatccccctgaagaacattaagcacctggcgggggtcccgctcattggctgggtcctgcgtgcggccctggattcaggggccttccagagtgtatgggtttcgacagaccatgatgaaattgagaatgtggccaaacaatttggtgcacaagttcatcgaagaagttctgaagtttcaaaagacagctctacctcactagatgccatcatagaatttcttaattatcataatgaggttgacattgtaggaaatattcaagctacttctccatgtttacatcctactgatcttcaaaaagttgcagaaatgattcgagaagaaggatatgattctgttttctctgttgtgagacgccatcagtttcgatggagtgaaattcagaaaggagttcgtgaagtgaccgaacctctgaatttaaatccagctaaacggcctcgtcgacaagactgggatggagaattatatgaaaatggtcattttatttggctaaaagacatttgatagagatgggttacttgcagggtggaaaaatggcatactacgaaatgcgagctgaacatagtgtggatatagatggtggatattgatgggctattgcagaagcaaagagtattaagatatggctatttggcaagagaagttacgaaattaactttgggtttgcaaattgatggattgttcaccaagggccctttatgtttcaggagaccaagaatt

SEQ ID NO: 198522 - DNA, 195 bp, Homo sapiens
ctgtaggacagcgctggtctagttggtcaaaattctggtttattgctcacctggaatctgtcaatggcttttttggtctcccaacttccccttatgcctgtctggctgatccatggaaaagcattactgctgggatcctgacactcctgttgaaaatgcagtggccctggtaataaagtccaagcttttcatagc

SEQ ID NO: 198523 - DNA, 413 bp, Homo sapiens
aaaccactgtaacatacagccaaagaagatactttgttgactgaatatgggctttttaaactctcaactgtatttttataatatcacaatcccaaagttagactaaataatgaataacacggtcaggcatggtggcttgcacctgtaatcccagcactttgggaggccgaggcgggcggatcacctgaagtcaggagttccagaccagcctggccaacatggcgaaactccatctatactaaaaagtacaagaattagctgggcgtggtggtgggcgcctgtaatcccagctactcaggaggctgaggcagtagaatcgcttgaacccgggaggtcgaagttgtagtgagccgagatcgtgccactgcacttcagcctgggcaacaagagcgagactccgtctcaaaaaaaaa

SEQ ID NO: 198524 - DNA, 435 bp, Homo sapiens
tctttgatccatcagtctcagaatgaggtgtaagcaagccattaggttgctgcatgagtctggttgggcacctccttccctcattttgaacagtgagattaagccacaaactctctgaggaggttcaaatgctgatgtaagtctcagagtgaacacaacctataaacactactataagtttcaatcatgtaaatgggaagttaattatgattgtcataaactgctaggttcaacaaccttcaatttatttttttaaatgttaatggagtgcttcccctgtgccaggattgtgtagcctgaaaatacagagttgaatgaggtacaggttacaacttagaagagcttatgatctaatacaggagttggcaaactacagcctgtgggccaaatctggcctacaatctgtttgcataaataaagttttattggaattca

SEQ ID NO: 198525 - DNA, 187 bp, Homo sapiens
tctctctgtgtcacctccatacagtggcactcttggagaaaaaagatgatgttacaatgaaaagacttatctgtgaccccttccaccaaggtacccacaactttcttcaccattgcacatggtagggctcctgtgaaaatctttttaggtggtcatagtaaattatttgtaggtggtggttggtctg

SEQ ID NO: 198526 - DNA, 413 bp, Homo sapiens
cacgggcaccaactgtgtgctgggcacgaagccccttcctcaggccttcaggcctcactggctccagggtcttagagcttaaggttggaatctggtctgggttcgaaactgtatagtgaagggtgggcttggaggaacgggctgccctatgaacacgtcagactcaggacagtgggtgcaaagtgaggccaccctggggaggaaaaggctgtggttccctactcagtgtctgttctaggtgctgagaaggatgggtccttgggctcaggggtgggatgggagactgggaggagtgggacccgaggaacccaggggtgtgtccttgagttcaagagtcacggcaaacatacagaggccttacagccccctgggacccagctcactgctggctcaaaacgagtccgttaccacgc

SEQ ID NO: 198527 - DNA, 626 bp, Homo sapiens
catatatattataccaaagtacaaaaaatatataagcttctttacttgaaaaatctccctaaggcttttgctcaacctatcaccacatctgtccatttaatattctcttttttttgccattaatatagaggcccctaaatttgacttcatttttttatttatttgtttattttaaattcataaaattctatgtattcattatgtacatggtgttttgaagaataaatacattgtggaatggttaaatatagttaattaaaatacacattacctcatatagttattttgcaacaaaagcattcaacatctactctgcatttttcaggaatataatattttgttattaactgtggtcaccatgctgcacaataaatctcttgaactcattccttctatctaactgtaattttctatcctttgaccaacatctccttaacaccttcccctcccaactgcccagcctctggtaaccatggttctactctctgcttctatgagatcaacttttttagattccacatgtgagtgaaatcctacagtctttgtctttgtgtgcctggcttattatacttaacataatgtccttcaggttcattcatgctgttgccaatgatgggatttccttc

SEQ ID NO: 198528 - DNA, 609 bp, Homo sapiens
gcagaatatttgctcttgaaacctcaatttctccatctgtagaggggaatattaatacctcatggaactggcataagatggaagtaaggaaagaaaatggatgtgagtcatatttctgaagttagaacagcagagtgagtattgagttgtttttcttcattctgctcagactctcaatcatgtcctcatgtgttcttttttttttttgagacagagtctcactctgtcacccaggctggagtgtggtggcgctatctcagctcactgcaacctccacctcctgggttcaagcgattctcatgcctcagcctcctgagtagctggaattacaggcgcctgccaccacacctggctaattttgtatttttagtagagataggttttcaccatgttggccaggctgctctcaaactcctgacctcaggtgatccgcccggctcgccttggcctcccaaagtgctggggttacaggtgtgagccaacgtgcccggccctcatgtgttctttcacatttctctctcctaggtaaaaatgcagaagagctcctaaatcagtcacgacttgagctttaaaaagcacattcttttcagagatgatccacctgcttta

SEQ ID NO: 198529 - DNA, 646 bp, Homo sapiens
gcagaagccagtagaagcaatccacttgccaggttgccctcctggaaccagggtccacccatgagagccaacgacaaccacatcagcctttgtgctccttggggcatctggtcaatctcctgcatgggatagaagctccgggaataccccaaaggggagaagcagagaagagggcctatgcccttccttgtccaggcttggagtgcctcgcttggatgatactgctagccccaactggtcccagacatcagagaggaagtgaggtcctcctgaggtttggggcccaggacaggggctctgcttgctctgatctaaaagcagtactgtttctaggtttactactcactactaactaccttattgattttgtgcttcttgatttaaaaattccagagaaaatggttgtcttagctaatcagttttgctctgagccaacggtattcaaagcatggcctgtggacccctagtgggtctccaagaccctctcaggggtctatacagttaaaactatttttttcatgataatattaagatgtcatttgcctttttcactatgttgacacttgcaatgatggtacaaaagctatggtgaataaaactgctggcaccttggcacaaatcaaagcaaggccaccaaccattctaa

SEQ ID NO: 198530 - DNA, 366 bp, Homo sapiens
cagcttctagatctctaaaatggattatttttaaggttaaaaattatgtattatcatgtacaaaatgcttagaacagtgcccactcttagtgaacattcaatagctgccattgttgatgttatttatccaggaattgggtgcaattaggaactgtttctataaacctgggatcctaggatgcaggattttttttttttttttaggtaaaggaagcagaagtaagattctccgttgagaacagctctaagaaaaagccactgcatttcagaattgcctcaaatgtatctttcaccccactctaaccttgtgttctgagcatggcacctctgtcaacttttctttccatatccttttagcttcgtcta

SEQ ID NO: 198531 - DNA, 1369 bp, Homo sapiens
aaaaatacaaaaaaattagctgggcatggtggcaggtgcctgtaatcccagctacttgggaggctgagacaggggaatcacttgaacccaggaggcggagattgcagtgagccaagattgcgccattgcactccagcctggtgacagagcgagactccgtctgaaaaaaaaaaaaaaaaatctaaacacaagattttacttttaatcctatcatttcctcttgcttggcttcagtaatccttcaagttttctaggtcttttcaaaatcttgattctgttgatttatattttaattatcttttcctttcagcttttcctgttcaggtgtgacatctgggtctttatctgagttttattagattataaaacattcagcaagatagggcaggtactgagtccagttgtacaccatggaaggcctctttctgtgattgttcattcatgaggctttatgaaaatgtctacattacaccaggcacttggaggttacagagatgaataaaacatagtccattaggaggcagacaatgggagagacaaacatgggaaaaagttactctgattatgaggagtaatgagaattacatatgaaggaaagtattgttagtactgttaggatttagtgtcaggaaagttttcagagtagcaaggaaacatcagaaattttactctttctgccaggcatggtgcatgtattattctgttctcacactgccacaaggaactgaccaaaactgggtgatttattaaaaaaaaggtttaattgactcatagttctgcatggctgaggaggcctcaggaaacttactgtggcagaaagggaagcaggcacgtcttacatggcaggaggcgagagagtgtgaaggaagtgaagggggaagagccccttatgagaccatcagatcttgtgagaattcattcactatcactcgaatgggggaaaccgtcgtcataatccaatcacttctccataatccaatcacttccctcagtgattacaacttgagatgagatttgggtggggacacagagccaaaccatatcagtgcctgtagtcccagttacttggaggctgaggcaggaggaacacttgagcccaggagttcaagatctgcctgggcaacatagcaatacctccattttggataaaaaggaaattttactttttgggtgccattgcttactttaatcagctgtaacttcttgttgacttttagtcaaaaaacaatttttccttctatctttgtgaaagaggttggtgagcaaggaagaaaaggaaacttgctttattgagcagcttctatagtcaggcacattttacaaacattagttcatttaaacccctttagctgttgtacaaggtgaatgc

SEQ ID NO: 198532 - DNA, 832 bp, Homo sapiens
cagatttctggctccggttcccagctgccatagcccctttggtcccttcactttggtgaccctttaggcttccctttttagaccacagctgtcacatgtttctgactcaacttgcttctgccatgccagcgtcacccctggtctcaggaagccaggcaccccgaatggagagaccagctgaagccgcggcagaagaacaaaaatgtgaagatttaatggacatttatcagttcccaaaattaatatttttataatttcttacgcctgtctttactgcaatctctgaacataaattgtgaagatttcatggatatttatcacttccccaatcaatactcttataatttcttatgttgtctttaatctcttaatcccgtcatctttgtaagctgaggatgtatgtcacctcaggaccctgtgatgattgcattaactgtacagattgtaaaacgtgtgtttgaacaatatgaaaccagtgcaccctgaaaaaggacagaataacagtgattttcagggaacaaaagagataatcataaggcctgactgcctgcggggttgggcagaacacagccatatttttcttctcgcagaaagcctatagatggatgtgtgagtaggagaaatattgctgaattcttttcccagcaaggaatattaataattgatagcctggggaaggaatgcattcctggggggaggtctatgaacgccggtctgggatgtctgtcttatgtggttgagataaggactgaaatacaccctggtctcccgcagtgccctcaggcttgctaggattgggaaattccagcctggtgaattctagtcagaccgg

SEQ ID NO: 198533 - DNA, 770 bp, Homo sapiens
cagatttctggctccggttcccagctgccatagcccctttggtcccttcactttggtgaccctttaggcttccctttttagaccacagctgtcacatgtttctgactcaacttgcttctgccatgccagcgtcacccctggtctcaggtgatttcttaggctaattctcagagatggggttattgggccaaaaaagcaaactatggctttccgaagctctcattgttcccattatgtcatgcatccctgagatgcagtcagcagaggattctatttgagggactaaacactcccggggaaagcaggaagaaggagacgggaactaacatttgctattgagcgccaggcatcgtcctacaggcttcgaagtgaaccttggatgtgctgctgatctgacctgcccagatttgtcatcattgttattgtcttggccgcttatgaagacgttcacccagcaggacttcagaagctttgttcactcgatctcatttaatcctcacaatagtgccctaaggaagatattagtatccccattttacaaaggaggaaacaggaacctggggagattaagcgaaggcctcacagatcatgaatagaagaggctggaaacctagtctggttcaagggtgtgctctttctgctctgccatgctgtgcttcagcccttccccactctcagccccatgtgcacgcagatagggattttcactctttgccctgtatgaaaggagggaaggtaagacacatgagcctagggggaaggtccatctg

SEQ ID NO: 198534 - DNA, 230 bp, Homo sapiens
tgccaccatgtgagacatgcctttcactttctgccatgattgtgagtcctccccagccatgtggaactgtgcatgcattaaacctcttacttttgtaaattgcccagtcttgggtatgcctttatcagcagcatgaaaatggactaatagaagtgggatttttacaaattcagttagatgacccagaaatcctcttttgcataaattagttttatctggttttctgccat

SEQ ID NO: 198535 - DNA, 551 bp, Homo sapiens
catttattgccatagaaaacaagtaaaggaaagtgttcttaggttgttcctgttttgggcaggtgtgctaagttccagtagacagtttatcatttggtgaatgcagtagcattgtgaatttaaaaaagcaatttctctcaaattcagtaggataaaatttaaattctgggactcccatataaagtaattcaggaaggacttgctacccacacaacaagcaggttcagtcacttggtgggtgtcaactcaatgaccacaaccaaagaagatttagcaaggggattttattacttataaggagtaaggagaacaccagggatagtccccaaagcagtgtctgcctgagctgggggctgggtcaggttttataaacatagggtaatgaggcatgatctgactgggtcttgcaatgaggggatgtcaggaggcatgatctaactggatcctgccatggggtgatgccaaagctcaatccagttggattctggatcctgccatgcagtgtccacttcttaattcagttcccactcctgagtcagagcaatcaggtt

SEQ ID NO: 198536 - DNA, 591 bp, Homo sapiens
caacctaataacttcattttaatttaatcgtctcttttaaagaccgtatttccaaatacagtcacactcagaggaattaggggttaggacttcaacatatgaatttgcgagggacataattcagcctatatcagaggctcttcattttattgttttattttactttttgagacagggtctcacttgtcacccaggctggggtgcagtggtacaatcacagctcactgcagccccaatctcctgggctcaagcgatcctccctcctcagcctcctgggtagctgggactacaggcgtgtgccaccacacccagctaattttttattttttggagagacagggtcttactaagttgcccaggctggtctcaaactcctggcctcaagcgatcttcctgccttggccttcaaaagtgctgtgatgacaggcgtgtccctcactttattctatcactctctcccccatgcctggcccatcagacctcagtgaatgtccattcaatgaatgaatgaagtgatgtcatctcggtagggttttcaaggatgaataggagtttgctaggcagagaaggcacagagggcattccaggctt

SEQ ID NO: 198537 - DNA, 486 bp, Homo sapiens
tttcaaagtgtatcatcattccccttttaaatagcacattcgaagtgtgctgacttttagttctagggtctgccttccccttacctgctgagtgtcacaggatctcttccctccttgattatctcaaggagatacatcaacttttggttcataaaagaaagtcagtcgcttttatttgttaaagacttgaagtatgggctgggcgtggtggctcacgcctgtaatcccagcactttgggaggccgaggcaggcggatcacctgaggtttggagtttgagaccagcctgaccaacatggagaaaccctgtctctactaaaaatacaaaattagctggatgtggtggcacatgcctgtaatcccagctacttgggaggctgagacaggagaatcgcttgaacccgggaggcggagcttgcggtgagccgagatcgccccattgtactccagcctgggcaacaagagcaaaactctgtctcaaaaaaaa

SEQ ID NO: 198538 - DNA, 443 bp, Homo sapiens
cgagatacctccttttgcctcctgtgcccctcccagccaaaattaaaacttaggaacagaaatctaactgctccacctccttctccttcaaacccttcagtggctccctgttgttcttagcacaatgacccaaatcctcagcacggcctctaaggccctgtactggtgccagctgccttgccagcccacgcctggtaactccgacccttgctgtgcactcatcccccagcatctccagttcccagcactcagactcctgccagctctaggcctctgcacacagtgaccttcagctcagagcacaccccctctcccagttcactcctgtgtgtccctcaggtcggtgtctactcggccttccttggagacttcctgcccccgctccaccaggtcggagttcccactgctccttcccataacaccctgtccttctctactgcaga

SEQ ID NO: 198539 - DNA, 572 bp, Homo sapiens
ctccataatgtgtgcccaggaggtggctgctgtgtctagctgggcacagattatggagaggctgcaaggcaaggaggatgcccaggactttgaggggctgctgaaggcactgcaggggctcggcttgtgcccagaggagttgaatgccgtctgggctgtgctggccgccatcctgcagctgggcaacatctgcttctcctcctcagaggtgggcttccccgtgggcaggggccatctggggtgctgggtctgtagaatcagggcagtggtaatgacgccaaatgctggtgtgtaggagactacagagtgctgggctgccctgaaaagtgggtagatccccactgtgtagatgagaaagctgagacatagagcttctccactctcccaatgtctgtgcctctaagctgccacccctaagaacatctggcattagatgagcagctatggtcaggcatggtgggtcacacctgtgatcccagcactttgggaggccgaggcaggaggatcgtgtgaagccaggagtttgagaccagcctaggcaacatagagaaaccccgtctctattaaaaaaa

SEQ ID NO: 198540 - DNA, 476 bp, Homo sapiens
taggatttcatgagtaaaataaactaaaacctccattgggcttttgttaatgcctaaatatctaaatttaactggaaaaaaatggtatctgtacttttaatatttgtatttaataccaattggagtacaagttcttacatatttttgttttagcgtttttacagcttaatttacaaaaatgtttgtaaactaaatcaagtacaattcatgcatttcagttgtcccagactttctgaaaagcacatgagcaaaaaagacaactaaagatgtcataaaaaaaaatacatcattgagacacatctccttatttcacttaatttaactggtatatgtgatgtgcacacatgaatatgtagatgcatacacccatggttttataaaagacataccatcatttaaataaattgtatgtgttttatcatttgaaatcatattttaaatattttctgtggccttaaatttgttctccactgtct

SEQ ID NO: 198541 - DNA, 587 bp, Homo sapiens
aggcatgagccaccgcacctagcctctttaatctattttgaaatgagttttgtgtatagtaagataagggtctaatttcattcttttgcatgtggctatccaggtttcccagcaccatttattagattatcctttctccaatgtgtgctcttggcacctgttttttgaaaatcagttggctgtaaaagcatggatttatttctgggctattttgttccattgttttatttgcttttattgccagtaccatggtgttttggttaatacagctttgtagtatattttgaagtcaggtagtgtaattccactaactttgttatttttgttcaagattgctttggctatttgaggtcctctgtggttcagtatgaattttaggcttgtgttttccactgctgtgaggcatatcattggtattttggtagggattacattggatctgtagatcactttgggtcatatggacaatttaacagtattaatttttccaatctataaacatgggatatctttccatgtatttgtgttttcttcattttattactgtttcatagttttcattgtagtgatcttttacttcttcaatt

SEQ ID NO: 198542 - DNA, 448 bp, Homo sapiens
aaaaaatagttcatcatttagatcaatattggataataatgttcattctattccatatcaggagacctaggttcaagtcctgctttggtgtttattgagtaacctgaagctattccgtttcttcatttgctaagtgggagtaggggcagctctgaggactgagatagctaactcttcttccctcccggagcaaattatatgtaccactgtgtatactacttgtcactttacattgtaatcagtatttgcccatttctcccagtatactttgagtgcttgaggaccagaatctttcttcatccttttgtgttcagcatttcctgcagtgcgtgacacacatttggtgttcagtaaaggctttctgcatggataagtgcttgagaagtgtcattagtgagctgaaatccttcaaaagagagttgtgagaaaacagagaaatacttccatt

SEQ ID NO: 198543 - DNA, 434 bp, Homo sapiens
ggcggcgctcagaggatcccctctggatgcaagtgtcaaatcatgatcctctcatatttttaaaggtaaacaaatgcatttctttgggagtcatggaataggtaaatgcaagtagaagagaaaaagcagatgtgacagtcaagggcagagagatgacagatactcagatttcatagattagcacagaacttctttcggcctttattaataagattgccctaataataagtgttgtgcaaccaattgaaagctgttcagtttatttctgacacaaacgtaaatgttacccacaggcagcctcttactcaccttttctactatggcctaaaaagcactcctgaacacccaggcagttttgaagcctctgaagcatatttttttcttcttcttcttttttttttttttttttttttgagatggagcctcactctgtc

SEQ ID NO: 198544 - DNA, 536 bp, Homo sapiens
tattattgactaggctgtatgacattttgagctcttaactgtgaatggcattcattaagctcctttatcctatagattctatctttatgttcatctgaaatgaactattcatcagtactttctcctcccatcctaagcttctcattttaggaactgacatgataaggtggttctttcataactctaatgccatccaacatagccctgggagaggcatgttaggtttcagagattttctccatggagcaaggtgcagtgctagaatatggtggttgattcccaaacagagcagttaactttactcttggttctgagtctccaaataataatagccgacgtttattgagcacttactatgtgcccaaccctgttatgcctttctcaggctcatgataaatgtattagtctgttctcatgctgctattaaagacatacctgacactgggtaatttataaaggaaagaggtttaatggactcagttccacatggctggggacgcctcacaatcatggtggaaggcaaggaggagcaaatc

SEQ ID NO: 198545 - DNA, 258 bp, Homo sapiens
gcttggggcaaccagaggttgctgttgtcaccacgctgtcctctcacctcagagcagtgggggccttcccagccctttgggaggtgggcagggcagtgtcacaagcctctagggtgcacgtggagaatgagaggcagagagaagggagatggaggaagggagacggacaggccactcaacagggaggcggcagattcaaagctgctgactcctacacatggtcccctgggggactgagcccatggtcctacctcaaat

SEQ ID NO: 198546 - DNA, 595 bp, Homo sapiens
tcctatagcatcactcatggtctcttgtgaactatgaaattttattttcctggtccttcagtccaaagtttctatctcaatctttgctctgactttgcactcctgcgtgaccttgggagagccccttaggatccctgaggccttgatttctcttaggcaattttaaccataaagatgcataactaatatatgcatgggctttacaagtcttcaaatgctttcacatgctgtatctcttctgctatacagaacaaccagtaaatgtgggaaactctgctgtatttgctttaaaaatgaggaaactgaggctcagagagtttaaattacctgctgcatcccccagctggatgctggagcctggacagctcaggggttcccactcccatccttttttgtgtatcatgcaggtatccaggggctagtgagtgggcttggaggaagaaaggcaggagggaaattcgtagggcaacaggccaaattattataatagttttttttttttaacatggttcatggagaacagaatcttattgtattggctgaatatatacactcccatttgtttttcattacatcaatgtctgatagggagttc

SEQ ID NO: 198547 - DNA, 422 bp, Homo sapiens
tttgccttgtgttagatctgtgactttgggggtgctactcaacctctctgagctcctatttcctcatctggaatatgaggaaaatgcaagtgcctactttgcaggacagttgtgaaattcaaaagtactaactgggtaatgcacgatacactgtgcctggcatataggaaatacttcaatgcatgccagctagcagggctattgaaccaattttccaacaaagcacaagctggcgtaggaggcactgccccatgtttaaaaggctagacataaaaaagtgagagaatatccaatgaggccctgcatgtgcccatcctctgttccccactgatatgaaacaaaggggtttattcaaaaggggaaagtgtgcaacagatagtgcaagcccctggctgctgttgtatcttctataaccttccaaa

SEQ ID NO: 198548 - DNA, 281 bp, Homo sapiens
ttacccttgccctgtagatagtgaggtctttattgaatatgtacatctgctcaatgtttattcagttgcatgtacgtctttcaagtgtgtcctatgagaattttatttcttgcaccttaaatgacagagaacatgtttacttaatgcactttgcattatgcctaacacatcaccaattgttgacaatattcaataagtacatttgatcgtggcatattcaactatgattttagacaagatgtgtgtgtgtgtgtgcatatatacatatgtatatacaagag

SEQ ID NO: 198549 - DNA, 498 bp, Homo sapiens
caggatcattttcagttctctaaactgtttgcaataacataatttctgctttttctttgttttatttctttaagctcccatataaatttcatctgagcaaataactttaggctgaaatgttgaagccacttcactgcagtaggccaaaagagagattagaatagggcagcgccaaaactcattttaaacacatttttgtataatcactcagctctcataatagatttggatactatgattcatatgaattagatcacaggtaccaacgttcagtgttcaggcaacagaaatatgtaagtccctactgtgtaccaggctttctgctagatccagggatagagtgatatgttgctttacttgagtgttagaggcaggcattgaatacatttttttttttttgcatttttgactaacatggtgtatcttcagtgccatgtaaaatcaatcagcttaagggcttacttaattaaaaaaaaatctccgtctagggcttagatt

SEQ ID NO: 198550 - DNA, 301 bp, Homo sapiens
ataggttaaaaaaaaatgaggcatggagaggctaagtgacttgcccagggtcatgcaatacaaattatatatgtatacagtgtagacatggaagcctaacaagactagaacctgtgtggcctgggtccagagcagagtcccatttagataggcacagtatgatgaggtaaaacaaatcattcaaagaatcccatccttcatcctaagtctctctaagaatatgaaaagggaccagagacagctccccctgctgttctcaaacatcctctcctgcctcccacatctgtcccaccccactccc

SEQ ID NO: 198551 - DNA, 447 bp, Homo sapiens
cgggagggccggtccgctcctcccggacgccgaggacctaccaccgcgacttcgccccgcccggcgcgggcccaggaccctgatgtcgcttttgaacagcccctgcacctggcagccagcgagctactgtagtaggcattgccgactgtttgcataccggatgggagtgacagtgtaatagaaaaacaagcaagaaaccttttaggtaggactcctaaggctcagaggaagttacctccagccgctgccatgcccaactcagtgctgtgggcggtggacctcttcgggagagtgtacacgctgtccacagcaggccagtactgggaaatgtgcaaggactcccagctggagttcaagcgcgtcagcgccaccacgcagtgctgctggggcattgcctgtgacaaccaggtctacgtgtatgtgtgtgccagcgatgtccccatccgc

SEQ ID NO: 198552 - DNA, 422 bp, Homo sapiens
cgggagggccggtccgctcctcccggacgccgaggacctaccaccgcgacttcgccccgcccggcgcgggcccaggaccctgatgtcgcttttgaacagcccctgcacctggcagccagcgagctactgtagtaggcattgccgactgtttgcataccggatgggagtgacagtgtaatagaaaaacaagcaagaaaccttttaggttacctccagccgctgccatgcccaactcagtgctgtgggcggtggacctcttcgggagagtgtacacgctgtccacagcaggccagtactgggaaatgtgcaaggactcccagctggagttcaagcgcgtcagcgccaccacgcagtgctgctggggcattgcctgtgacaaccaggtctacgtgtatgtgtgtgccagcgatgtccccatccgc

SEQ ID NO: 198553 - DNA, 1255 bp, Homo sapiens
gcaactggtccccaggaacatgggcactgggggtgggaagcaggagctgcacagggggcatcactggtctgcccgccagcacctaaagatatgaggcactgaagtgtcaggtggaggagaggaccagtatggttggttgcaagttggttataatgagcaaatatgtaaatgtgttgaagataatgttagccaagattccccttgttgaaggttacttatttactttattattttaaaatttattttaatgtttttaaataaaaaatttttggtttttttttaaatagaaatgaagaaggttatttaaaagcaaggtgggctcaagacattatctgataggaaggaaggctagaaagaaccctcaggtgttgggccaacattagaagtactgttataaactcatggcatttaagtttatatacacagcagacataaaaatagtttttaaaagtgttacatatgtgtgtatatatacacagacacattcatgtatgccgtgtaaaacacacatatataacactgctcaactctctctactaagagggcacaggagcaataagcacaatgagcagccagcttttggtttctaaatactattttccacgaaaggaaccaagttgcccggagaaatgacaattccaggttggagcatgaactgtaaaagataaacctgggtcatcttatgccagaagattaggaagcactcaacactagaaataccaaaaggacacaggagccacttcaaagagttccccactgggaactctggccaaatcagagacaatatcagcaccaaattaatgttagcaatggaatataacctgttagtaaactaagaatctagattccatgttaacataaatgaataaatacatggggagagaagggaaagcgctccttacagaatactaactaataaatgcagtaggagcgaagaagacaagaactactccttggcatccttcacagaggtagctgattcagggggaagttatcaatgaaggccaaggcttgtgggtttactggaaaacaggatactgatataacactggaatatgcccccacaaaatactgattaatacaaagggaactattgtgactttacagtagaaaacctggcattcagcaacatcacccatgatggtatactgtctacaaaaagtgcctcctgaggccacacagagctgggcatagcatcatttctgtggcactcctgctaagggttacaccgacccccaggaagcttaatttcgct

SEQ ID NO: 198554 - DNA, 451 bp, Homo sapiens
gttgctcatgtcagctgatctaaatgttcatgatattatttaatggctatagtagcattttcttgtaggattttataatttaggctttacgggctgactttagcgcctgcctgtgtaaggtttgactctaataacagcactagaacttttaaagctgtttttctttatgttattaggccatcccatgtagacaaaaagtgtgtaccctaattaaaaaaattattcttttataattcagtcaaggtgagtaattttcctcaagtttaggatctgatattttgggttagtgctagtttcaggtgctttcaagttttgttttattttatttattgatggattcattgttgatgttgccaatacaaatgggattttcctttctctgtctaaacctctgcttattttgtgttgattaactgctcttattttacttggagtatttgtagttttctct

SEQ ID NO: 198555 - DNA, 388 bp, Homo sapiens
ataaagccttccatggctccccactgccctcatgagaaaggcctcaacacaaagccagccttctccagtgcggtagccatcccctccccacttttcacctcacctcctactaccccccacttatcaaacgggaatgtgtgtatgaatcctccctggaatctggttacagtttatgctcccaatcagtaaggtcagagtggggcctgagcctctgcatttccaacaagctccctggtgatgctgatactcccagtccattgaccacactttggataggaagagtctacacttgctctactcaacttctctccattctgtcctcaaacacaccacgcttccttccccaccagctggagggggctctgctcccaggccccagaggtcaagg

SEQ ID NO: 198556 - DNA, 327 bp, Homo sapiens
taagagagggtaagaacattatccagtgcaaatataacacacaatatggtaaaagctaccacttactgcctactgtgtcccagatgctgaattaggtactttatgtatattaacttaatttgtagggtagttacccatgcagtgagtggtactattcccattttacagaagtgaaaattgaggagcagagagattgaatagcttactagaggaaatgataagagtcagtatttgatctgctttctttgaaagaatagtgttagaaaacctgaaaagttccctgtaccaagggaacagagatgtctaaaaaaaaccaacctcactact

SEQ ID NO: 198557 - DNA, 239 bp, Homo sapiens
ttataaaatcatactgaggagaaaactgaggccctgaaagtgatctggatgacatggatagtagaagatttagattatggaaaagtcacttcttcctgctttaccatattgccttttccctattaaattaaaagtcaacaaactactgtgtgcctacgtagaagtactcaaaatggagaagtgaaaatcaagatctttgcacttacataactcatattcttgtgtgagtaaacagccaa

SEQ ID NO: 198558 - DNA, 438 bp, Homo sapiens
gtggcctctgcagggctactttgggcttcatcacagcatggtggcggcagctgccccagagcaaatgtcccagcagaagtgggtggatgtcgtgttcctggaagtcccgtggcatcacttctgctgtctcctaggtcgaagcagtcacaagtcccactcaggctgcagggctggggaccgaggccccagccacgtgtgaatggggaagcatgcacagcctggtttatgtctgcttcctgaaggtctgcaggaccctgggaggtgtctaagaaagtgggctagaaactctgcccttcctgtccctttaaagagcaagtgactgagcatactggttaggacgtagttcattaaagtgggagcacaattaagctggccacaaatgcagatgcctcccctgaagcttccacccaccctgccatggtgtcctagccttcccgc

SEQ ID NO: 198559 - DNA, 408 bp, Homo sapiens
ggctaattttttttgtatttttttagtagagatggggtttcaccgtgttagccaggatggtctcgatctcctgacctcatgatccgcccgcctcggcctcccaaagtgctgagattacaggcgtgagccaccgcacctggccatttcattgtagttttaatgaattatttccttaaggttggtgattttttgtgtcctaagaagtctgattatcccaagattgcaaagatcttcccctatgttttcttctaattttacaagtttaacttttatgtgaaggctctgactcattttgacttagttttcagcatggtgtacagtatttttgcataaaatatctagttgtttcagcgtctccccccattggtcgacgcggccgcgaatttagtagtagtagtaggcggccgc

SEQ ID NO: 198560 - DNA, 289 bp, Homo sapiens
aaagctttcaccgctcatggaatgtgtttcagtatgtggtgtgggatagtggatacaatatctctttcctccagaaacacggccaattattgtagtaccacatattgataaactgtccttgatttactgatttcaaattccatgtttattaaactataaattcctatgtatacctgtatctgattctagactctatgccagtaatacatttacttatgccaatatcaagatcataatcttttcattccagtggttttgtatcaactaataatattccgtggtaataata

SEQ ID NO: 198561 - DNA, 854 bp, Homo sapiens
aggagaccaggctgagatggagaccaggctgagcagtataaagtctgcacgtagaacacttggtgtctagtctctattcactagctaggaaacactgagcaactgggtccttagttcctcatctctaaaactaccaaataacaataacaatacctagcctgtctacctcacaagaccgttatgataccctacagcagtggggagcaatggaagcttcccaggcaagggaaggacagagctggagctctgcttagtaaggcaagtgaatgtaagctgggctgctggagaggaagatgaccaggcagaagtgtctgggaatgttagtggctcaaaccatggcactggcaatatgaaggaacaggcaaacacagaagatgtgcagacaattcaacagacgaccaagtgatgggaaggaggatgggggagagtcagagatgatcccaaggccctgatctggatcgggaaagcaggaggaaggaatggtaagggggccaggagggatctctttgggacacgctgtagagagagacatggggagtgggagggggagctggatctgcaggcctgatgctcgtgagaggggtcagagttagtgttatgggctaaactgcatccccctcaagttcatgttagagacctaaaccccagtacctcagaatgggactctatttggacacagggcctttaaagaggtaattatggtaaagtgaggtcatatgggtggaccctaatcctacatgactattgtccttctaagacaaaagcaggacacagacacgcacagagggaagaccatgtgaaaacaccaggagacggccatcgacaagcagacgagagaggccctcagaagaaac

SEQ ID NO: 198562 - DNA, 597 bp, Homo sapiens
agagtatccagacatagaagggtaactggaaacctggacctgtcttcctctacaggactgtgaagtatttccgagtggtgctgaccgtgggtggagtcagcatcgcggaagaactacagtggagggaatgacgccccccaactcaggagttcaccagcaaacaggaggcacggaacacaaagcagctaaatcgtggggcagcaagtgtcacaggagacaggggttacaacgggagtgtgtgatcacacctacggccaggcagacccttcaccctccacaggcacccatgaggctgccctgtccactggaataactcatgtgtgaggggaaatccctggaaatggttaatttatgaagtgccttaaggagtctgacaaagcagaaaaaggaggagggtcaagggtacagattgaaaaagaggcagaaaagtgtgggtgcctggggagctgttaggaaagagacagttgggaccgcagtctggggactatgccattgccattttgtgtgccacccttcctgcacttatgcctctacccagataatgagtctacccactgatgactcctctctctagtacagtccgctcctaatgagcat

SEQ ID NO: 198563 - DNA, 188 bp, Homo sapiens
attccaatgatctcctgagataattgtttatatttatgtaattcgtgatagagtaatatctttatgctgttacaaaattttgttcacgttcctcacctacatgtgctgatgttcttgattaataactaaatacatgtatttttctaataaaggatatttaaattcttaaaatatataatatcgttgac

SEQ ID NO: 198564 - DNA, 1014 bp, Homo sapiens
ttggggagagggttaatgggagataatccattttgtgaaatgtatttgtttagaaatttagatcatttgtgattcctccccaaactcggtctcaaaaaaaataaaaaagagtttcactcttgctgcccaggctgtagcgcagtggcacgatctcggctcattgcaaccttgacctcctaagttcaggtgattctcctgcctcagcttcctgagtagctgggattacaggcgtgcactaccatggctggctacttttgtacttttagtagagacggggtttcaccatgttggtcaggctggtctccaagtcctgatctcaggtgatccgcctgcctcggcctcccgaagtgctggaattacaggcgtgagctgccatgcccggcccccaaactcttttgaggtaattctggacaaacctttgtgaaggtcttggaggtagaaacgcttgggtggtggctggagatgagtgaaagtagggaagaagcctgctcccgctggacacattctctctagggtgcaccttctcccagggtcacgaaggctgggatgaaaaagaaagtagagagcagtgtgagcttccccatcagagtatcagcagtcagtggaggaggagccagaatttgtggggcctgaaactctctaattctgagggccctctttcagaaaaagaatacaaatttaggtatcaaaatgaaaatttagaatgaaaaagaagtcactagttgtacattttgaaaagctaaaactacaaacaactcaaaacctagaaccatataacacagttctttctttggcacacaaccttacactttccccctgcatttttggttacctattctaatctcttcacgtagcaattttgtaacattttatgtaaaaagactagaaggccgggcgcggtggctcatgcctgtaatcccagcactttggaaggccggggcgggtggatcatgaggtcaggagattgagaccatcctgcctgacacgggaaaccatgtctctactaaaaataca

SEQ ID NO: 198565 - DNA, 570 bp, Homo sapiens
acttgagctagggtggtcagagaatgttgctgtggaggaagtgacattaactctgagaacagaatgaaggagaaggaaccaaacatgtcaagaactctctagacagagggagaggcctgaagtggaaataatttaaaatattgctctggctgctgtttggtgaaatgattgaaacgaggtcaagcatggaaatcctggaaccagtttggaggctactacaacaggctttctagtgcagataagaactttgaatcagatggcagcagtacaaatggagagaattggatgtaggaaggccttccaacatctcattactatttataactttcttaagaagcagaaagttataaatggaaatgagtgtatcctatttcaaaagcggaatatcaggagcagaggggacactaaggtatgtaacccaactgagtaagtgagtgctgtatatgaaagttcatttctaaggtaccagtagcacataccaggaagtagtagcaggaaaggtaagttggaggatatgacatctgctgagacctgaagcacgaaagccagtgtgtaaagcaagaaaatgag

SEQ ID NO: 198566 - DNA, 113 bp, Homo sapiens
aaactttctatctgcaagtcaaaatatagaagtgataggaaaaagactaataaatatggctacatagtgataagaaagactttttccttccagaaaatgtggcaagcaaagtt

SEQ ID NO: 198567 - DNA, 111 bp, Homo sapiens
agactgctgtgccgtgcactttacatacttattccatgtacttccacagcaaccctatcggtagtactgtcatgatgcctcctttacagataagaaaactagggcggggat

SEQ ID NO: 198568 - DNA, 478 bp, Homo sapiens
ggcggtaccagaatgtgtaacaacgacccagcatagaaaacaggaagcatcagttaaaatgggaaattgctgtgggctggattactgtaattcctcgtcttacttagaagttggcatagagcagggtcctttatccacagcgtgatgtctcttgcttttctatgccttgataattttgccctttctttagggtggtgcattgctaagctgacaggcttttaggctggaattgctaccttttactatgcttagaaattgtgtttttaaagagctgtttgttttttctctgtctctgggttaaaagcagtctagctccactgctggttctggttccctcctcctgccccctctttaggtctaagtaggcgagattgagcacacagagggactcacagctcagcttaataataaccccgcagtaagtgacatagtcgttgtacactagacagatacacagaggtaagttctccaaagcaga

SEQ ID NO: 198569 - DNA, 494 bp, Homo sapiens
tgaagagtccatctgcgtgctggggagcagaagggacttctgcgtgtaccacactttgaagaatgagctcaagctatgagttagtttccttccagggtagagaactgatgtttgtgtctctgcagtgatggctaatataggactcctgagttatgaatttgaaggaaggaaaattatggcaccttttatgctaaggaaggaataataaaatggtttctgcatacttctcactgtggccatgtttacaagcaagaagacgctgtgctttcagatcccacagatacctctccatctcattttaacagggttataaattaatgcaaaacagacacgttcatgtatccagatcatgtcatccaagaattacattacaacatgggtggagagttggcagtgctcacccaattttgacattcttgagccctgagggtgagagtgagtgtttataggagcttatagaaacttctatgacatccttagtttaaaaaaaaaaa

SEQ ID NO: 198570 - DNA, 452 bp, Homo sapiens
ctgagcactctcagttatctaatactatcttccccccattccgagcactcttagttatctaatactgtcttcccccaattctgagcagtcttagttatctaatactgtcttccccctattctgagcactcttagttatctaatgctatcttccccccattccgagcactcttagttatctaatactatcttccccccattctgagcagtcttagttacctaatactatcttcccccatgtctcctcctggcgaggacacccagtatgctaaatgcgtatgaagctttccagttagtgggcagggggaaaactctgatcgtgcagccagtccaaaccagaggctggggcactgtacacctaccttagagtcgagagaagagagaaggttggtgggctataaggttaatatgtcaagagatttcaacttttgaacacaacaaaagcataacaac

SEQ ID NO: 198571 - DNA, 226 bp, Homo sapiens
tcaatcacagaggcacatgatcttgttcagcagcctagaaaaccaaggcccagcggagccacccgtaggcacccactccccatagcctggcacacacacacggcagagccacccacaggcacccactcctcatagtccagcacacacacggcagagccacccgcaggcacccactccccatagcccggcacacacgtggaccatgccaccctccacgtgcgcctgg

SEQ ID NO: 198572 - DNA, 300 bp, Homo sapiens
agcagtgtgcaacacgctaataaatattcaagccaatgtctttcaaatgttattgtgaatcatctttccctccttccttcccatggttcagtcatcttgctggctccaaattttcaccttttgtctcaggcctcagctgcctccagtttactgcatatgactgcaattgtctttgtctcctttatccgcttcactgtgtctcattttcctaaagtatctggcacccacttttccacaacattgttcctttgttccaggaaaaaaaaaaaattggaggcagcagaaacacagttccaaagg

SEQ ID NO: 198573 - DNA, 609 bp, Homo sapiens
tgtaaaaaatgtcattggaattttggtaggaattgtaccgaatctatagatgactttgggtagtatggacattttaacggtactcttccattgtcttccttaccttcctcctcctcactctctggccaaactccccttgtcagccccattcatgtccccacctcctctgtcaagtcttcctgggataatctggcttctcactctcccactcctctgaattcgtcaagacagccagagctcggtgtagacctgtatcccagctttcgtattctgtatgttttccctagttagcctcagcccctgcactaaaaaggaagcctcttgagctcggcacttggactgttttacactgaagtacatcattcacatcccccagtgtgagccaaacccacacaccactggccagatactgggactgagaggtccatgagggccctgctgcatccacgcaggagtagggaaccaaatagaacaagagcctgacgcttgcggctttgccatcagagggtgaatggcataaagagacccaagtgtgcaatgattaaatcagggtaatcagcatatccatcacatcaaatgtatcatttctttgtggtaggaacatctgcc

SEQ ID NO: 198574 - DNA, 331 bp, Homo sapiens
tgatccaacaagtctgatatattctagctacctcacagaggaacaatattgaaatgtcatagaagatcacaccaatcacttaccaatcacaactctggttaaaccaccgaaaatatcattactaaattatgagaactgaaaaaagaaaacttccttttaaggacaacaaatatacatgagacaccattccttccattatccagcaatgccacacagttcttcactggccggccctgactttctgctgtggtgcttagggctgtgaaaactccaccctgggcagagcaaccattcagacactggacctgaatcaaaatttaaaaaataaacc

SEQ ID NO: 198575 - DNA, 470 bp, Homo sapiens
ttttttgagatggagtctcgctctgtcacccaggctggagtgcaatggcgcgatctcggctcactggaagctctgcctcctgggttcacaccattctcctgcctcagcctccagagtagctgggactacaggcacccaccaccacgcccagctaattttgtttttgtatttttagtagagacggggtttcactgtgttagccgggatggtctcgatcttgatctcctgacctcgtgatctgcccacctcggcctcccaaagtgctgggattacaggagtgagccaccgtgcctggcctggaatgcatcttaaaaacaacactgtgccataatttaatggtcagtattgtttctttctcagcaaaacataaaataatgatagctcttacaatagatggcattttaagatttaacaaaatttggtacgtgcctttgtctcctgggcataatgcctggcacacagtagcaatc

SEQ ID NO: 198576 - DNA, 297 bp, Homo sapiens
catgactacctaaaagttgtctgagggaggctgtgcactgggtgatcttgtgaggcaggtggacgtctattctgccaagatcttgtgggcccagtttgagaatgggttttaagttttagtccttttacacttcctttgcaggaatgtagcttttgaaatagaagcaaagtgttgtgaaacctttgacattctgttctttaacacttcctcctcagcctgaagatctcagcttttgcttgggcgttacaacaccccacggaatgccacacggaatgccgcacaggatgcccccccgga

SEQ ID NO: 198577 - DNA, 286 bp, Homo sapiens
gaagatgggggaggggtgagtaaaattcacagtctacctgatctactataaagttaatttgaagcttctttggtgtggcactaaaagattctcttaaagctatcttgttgtttcacttttagcaactgccaccacaacactgataaatacaactatttatagagtcctcaggtgctaaattggcagagtgatatgtacttttttaattattattttttattatacttttaagttctagggtacacgtgcacaacgtgcaggtttgttacatatgtatacatgtgcc

SEQ ID NO: 198578 - DNA, 339 bp, Homo sapiens
ttatgcctttgaagtattgagtggttaaacaagtgtgactaaagaaatcaacaaaatgcaattgtgcttatgtatctcaagaacaagtgtttctttaagtaccctttagctaccacccaactcttattcccattagtcagtgaactgctatgggaaactgcaatgagagtcatcctaagtcagggtttctcaacctcagcacactggtattttatgccagagaagtcattattttgtggggctgttctgtacatcgtatgatgtttagcagtatccatcaggcctaactactagaagctagtagcacatcctccgtgttgtgaaattaaaaaaaaaaaa

SEQ ID NO: 198579 - DNA, 262 bp, Homo sapiens
gaaaggtgaggtgacaggaggtggcataatggtcattgttaacatttatgcaaggttggttgtaggttaggtgttctaatcgtgtattaagtcacaaaatcctcacaacaatcctctcaagtagtttattatctttactttgtaaacaaggaaacatatccaaataagttaaataattttccccataagcacaaagttagcaagttagggattccaatccaagtactctcgcttcagatcccttgatcttaaccttacctgc

SEQ ID NO: 198580 - DNA, 434 bp, Homo sapiens
gagctttaaaactagacaccaaatagtaagtttattattatccatatgacagctttagaaactctcatataagaaaagttctattgggtgtggcggctcatgtctgtaatcttagcactttgggaggccaagacgggaggatcacttgagcccagaggtttgaacccagcctaggcaacataatgagacccttgtctcacatacacacacacacacacacacacacacacacacacaaaaacacacacacacacacacacacacaaatagccaggtggggtggagcacacctgtggttccagtgactacggtggctgagatgggaggactacttaagcccaggagatccaggccgcagtgagtcctgattatgccactccagcctaggcgacacagcaagattctatctcaaataaataaataaataagaaaga

SEQ ID NO: 198581 - DNA, 543 bp, Homo sapiens
ccataccacatagcctaggtgtgtagtagactgtcccagcccatctaggtttgtgtctgtcccagcccatccaggtttgtgtaagtgcactctatgacattctctgtgatgcctcatgacatgtttctcagaatgtatctctatcattaagtgatacatgacggtatttcctttagaatcaggaaaaaattaacttactaaacacaaccaaacaaaacaagaaacataattatagacttagtaagctatacatcatccctgcttctctcaataaagcaaagggcagagcatcctaagtcccatcagacctcccctacgaagtgctacagaaagcacagaaactgtccagctttgcccacaacctcaactccttggtagggacagaaatgtctgaggggcaggtcacgtggcaggtatctgggtagggaatcggccttttgaaagatgtgatgtggcagcaacgtggatctgactaaatttctggttaacctccaggctgtctgcctggccccatcctccacattctctctagagtatggcaaa

SEQ ID NO: 198582 - DNA, 414 bp, Homo sapiens
caggatttacatattttctatgtacatgaactgaattattataatcagcaatatcagtgaaaggtgggtggtttggccttgaagacttttctatgctgtctagggttctataacttgagattttcaggacaactgcagagtccagggtgagaagagcgtgaagtcatagccatgttccttttctatattatcagaaagcttttgctaaaaggccatagaatggaggatggtaactggctattctccgtctattttgagaacaggctgagagggaaggagctttcctgttttactggagagggcaaaactgatgagaaaagaaaaggtaatggggaaaattacaaaaggccacagaatgtgaaatgaatagtaaatgaaattcagaaaaggaacactgaaatagaattgagaagg

SEQ ID NO: 198583 - DNA, 598 bp, Homo sapiens
atgatgctttagaagttgaaagtctgtgagaatattttcttttttctaacaaaacacaatttcaagttattttacagacagaagatattattttcaattcccaaagtaggtgttgttcagtagcacttctgacctgcaaagttctcagaaatgataatgaataaaaaacaaccttatcttggaattataaaacaacttggatttaaaaaccaacttgatatatggtaggtaggaacaagggctgggtataattaaatataataaaaatgactaaggtacctagaatgttgctgttacataaagtttttattttttagtgatctatattttagtgctttttaaataattgtttgcagagtgacttattctctgtttacataaagtattttttgtcgtttcacaaaaaacaaccataatgtggtattttcctaaaatgtcttagtgtacttaggactttggtgtttactctgccagcatcagaagcactacagctgggcttaatccaaatcacaagcaataatgtctacgttggttggataggattcaataagatgactaaattctttcctttcctctcattccaacaatttcttaccat

SEQ ID NO: 198584 - DNA, 363 bp, Homo sapiens
gagagaaactgagagaaacagagaaataaacacaggaataaagagaagcaaaggaagagagaaacagaaacagacatggggaggcagaaacacacacacatagaaatgcagttgaccttccaacagcatggggcctgagggcggtgacctccacccaatagaaaatcctcttataacttttgactccccaaaaacctgactagaaatagcctactgttgacggggagccttaccaataacataaatagtcgatttatgcatacgttttatgcattcatgatatacctttgttggaattttttgatatttctaagctacacagttcgtctgtgaatttttttaaattgttgcaactctcctaaa

SEQ ID NO: 198585 - DNA, 723 bp, Homo sapiens
cttacatcagtccccaaaaatgcccagctcagctcaacacctgagcttccaggcttccatggcagcctgggattttgaacaggaaaagcagaggaacaggaaaagcactgtggcatctgcctagatatgcttttctgagctcacccaccctcaactgctgggagcttctagaagcttagagctgtgccctcacaggaaagtgctattgtttccagaaaacttcctttctcatatttaggctcagttttgagagttttggtttgatgactgcctgagccaagaacccaaggccccgccttaatacaggatgacactgaaaggccttccagctccagacctcccattgtggatgcctgaggcctcagttgcaatcttatgatgggtcagggtctccttctggtgggtgatgcttctctcactcctttcagattctctgtgcatgaaaatgtttatctcaaagtctactttcagggaacccaaactaagacggccagctgtcaccaaaatgagccaccatagacctgaggtggccactataccctggaatgcatcagcgaatttcctaaatttccactgtgagcatccaaatgcccaacgatttctgagagatccttgtattcttataaaatgaaaagggatcctgaaatgccaggtgctctgagtcctgaaggagaggtggaggcagatcttcctgcaaggattccacggaaaagggagcagcct

SEQ ID NO: 198586 - DNA, 233 bp, Homo sapiens
cttcaagatgctgaattccaaagagccctaccacccttgtcctccctccctttcatctcagaatgcagatcagaggcctgagtgagcagcagacaacacttgtagatggcctgtggatgctggaaccacaggccgctgaaggctccttgggcttcaggagaaccctcagagtctaaacagcctgggaggaagaggcagtgacaggcattgagtcagccactccagacatgcca

SEQ ID NO: 198587 - DNA, 641 bp, Homo sapiens
ttcagccatctgttaaaggttgctcacgttcacaaccagacagtaacaaccaaataaatcatgccacatcatttcatataataaaaaagcacagaaagcaacaggaaatcttttgttctatggtatcttcaccaccatttgctcaattaagtccaattttgaaatttaagagataactaggtaattatacgtcatggtgcttccccaaactcatgaattattttatgcccctttccaaaattagattctaatttctccccaatcaaaaggattccccattttattttattatttttagaagacggtgtcccactatgttgcccaggctggtctcaaactcctagacgcaaagaatcctcccgtttcaacctcccaaagtgggaagactccttaagcccagaagtttgagatcagcctaggcaacaaagcaagaccctatctctatgaaaaaattagttggacgctgtggctgagacaagaggaatgcttgagcccaagagttccaagttacagtgaacgatgattgtgccactgcagtccagcctgggcaacacagcaagatccatctctaaaaataaataatattttttttacaatgttctagacaatgtcaccacaattatatgtcatacacatttggg

SEQ ID NO: 198588 - DNA, 475 bp, Homo sapiens
tgtaatacaaggcccttgggggagtctttgcattccattaaattatccattgagatgaatgtgtgtcatgtgacttgttagaccacataacctgtccagggaaatgggaatgtcttggccatcctagagtcctaggtctccacgtgaagtcaccacttaatcagtgtctgtcctgtggttatcaactgcgtgtgtggcgtggccttgctgcctgcatggggaggtccagaatgtggttcctgaggctgggaggcgagggcaggaagtctttggggcacagaggtccttgtgtggttttcgtgggaaggggtcagccattgaggcagtagtggaggaagctgagagggcagaggaagggatgggacgcggtatttggggtcttttaaatctgatgtaaagcaaatctgcgccgggaaaattctcaccaccattttaaacaactcattgatggagctcagtctcagattttatgtgt

SEQ ID NO: 198589 - DNA, 610 bp, Homo sapiens
tgtccttgcgatagtttgctgagaatgatggtttccagcttcatccatgtccctacaaaggacatgaactcatcatttttatggctgcatagtattccatggtgtatatatgtgccctttcttatttcacatcgttgactttccgaggcagtaagagggccacctctccaacttgtcctcagttttagagcacttccccatctatgaaggcacagttttcttctccatctcttctactaggctgtgctctccctggtgcccagcacagtgtgggcaccaagtaggtgctccataaacacgtgaatatacatatatgtatatactgtatatgcatgttttatacatacaaacatgtttatttgtagcatatagttggcattcaataaacgcttgttttatgtagtcttaacacacacatgcatatgcatgctttatatatctagataaagtatgtttcatctataatacataataggtgttcagtaaatgactggtatatacgtaatatgtataatatttcatgctgctgagcaaatgaataggtaaagaacaatacggtgtgtgtgtgtgtgcatgcatgtgtgtgtgtatgcgtgtgtgtgtgtgtgtg

SEQ ID NO: 198590 - DNA, 236 bp, Homo sapiens
ttatgagcctaaaactgaagacaaattagttgtctatttttaggaagaaaggtaagtaaaatgtggcaaatagtttccacaaacccatggacctatttttgttttttttttttttttttagacggagtctcgctctgtcacacagactggagtgcagtggtgccatcttggctcactgcaagctctgtctcccaggttcacaccattctcctgcctcagcctcctgagtagctggg

SEQ ID NO: 198591 - DNA, 466 bp, Homo sapiens
tgtgggtgcaacattcagggaatggttactgaagtgttccaggcaccagagctcaggcaagaagtggaaaactgcgcaagatcctgcaccattcaacggctaaaatgacttttaaaactacctggtgaatggcaataccacatcaagccactaggtggcaaagcagactcggagaacgacctctctgccagcaggcgctgaagcagctacccgttccccatgctggtgaccaggaacttcagcttagctcagtcatgcagttcgcggaggatatcaaacagagtcaacaaagctttgcaatcaaacgtgtctttaaagggaatccaacttgtgaacctggctcttgatattcatttgaagctgcaagggggaaaagatgttacctaatatggagcaatggctcttattgtgaacaaaacatctctgaacaccaaaaccggaataaaattctatttaaaaagggaaa

SEQ ID NO: 198592 - DNA, 227 bp, Homo sapiens
gatttgtcagaaatgcagaatttcaggccccaccctagacacctcagacctactgaatcactatctgcattgtatcaagatccccaggtgatccacgtgccaataaaggtgaatactcactttctagaatattttggtggttcactgactcttccattcccgaatcatccactatctgttaacacactttccttgttatagactaattatcatattcaattgtttaa

SEQ ID NO: 198593 - DNA, 518 bp, Homo sapiens
ccgggtgagcgcacactggggcactatgatgatgccgggtgagcgcacagtgggacactatgatgaggctaggtgagtgcacactgggacactatgatgaggccaggtgagtgcacactgtggcactatgatgaggctagttgagttcacactggggcattatgatgaagctaggtgagcgcacactgtgacagtaagatgaggccaggtgagcgcacactgggacggtaagatgaggccaggtgagcgcacactgggacactatgatgaggctaggtgagtgcaccctggggcactatgatgaggccgggtgagtgcacactgcgacactatggtgaggctaggtgagtgcacactgcggcactatgatgaggccgggtgagcgtacactggggcactatgatgaggctaggtgattgcacactggggcactataatgaggtcagatcaacgcacactggggcactatgttgaggctaggtgagtgcacactgggaaactatgataaggctagatga

SEQ ID NO: 198594 - DNA, 456 bp, Homo sapiens
aagaattaattagatcttttacgctctgtcgttggttctaagtcttggaaatccagtgtgtgttttagagttaacagcccatctcaatttggactagacccgtgccaggtgcccagttggctgtgtaccctcatgtatataggacagcaaagttctgtagaaaagaacttcaggccaggcgcggtggctcacgcccgtaatcccagcactttgcgaggccgaggcgggcggatcatctgaggtcaggggttcaagaccagcctggccaacatggcgaaacccagtctctgctaaaaaatacaaaaattagtcccggcgcagtggcgcagacctgtaatcccagctacttgggaggttgaggcaggagaatcgcttgaacccgggaggcggaggttgtggtgagccgagatcgcgccactgcactccagcctgggcaacagagcaagattccatctc

SEQ ID NO: 198595 - DNA, 1301 bp, Homo sapiens
agcctcccaaagtgctgcgattacaattcaaccatttaaagcttacaattaagtggctcttagtatactcagagttgtgcaaccatcaccacaatcacttttataatattttcatcacctccccacaaaaaactctgcaccacttagcagtcatcccccaatcttcacttccccccagccctagacaaccactaatatactttctgcctctataattttgcctatcctggacatttcatataaacagagtcatacaatatgtgaccttttgtgtctggcttctttcagtgagcatgatgttttcagctttcatccatgttgaggcatgtagcagtacttcattgcttttcattgccaaataatattccattgtatggatatgccacattttgtttatccattcatcagtttgtggatatttgggttattctcacttttggctattatgaatgaatgctgctatgaacattcacgtacaaacttttgcatgtacatacatttttctttcttttggatatctggtagggagtatttttctccttgttttacaaataaggacattgaggcacagaaagtttaagttatttgcctgggtcacacagcaaataagtaacagagtcataattagaactcaggtagtctgcctccaaagtctgtgctgttcatcagtacctctcctgaacgcttccttatagcagctactgtgccaggagccagagagactggggagagcaaagcagacatgtccctgtccttgtgaaacttacagggagaccatggcgcaataatcgaagacacgggaaataactaccatgacagctgcgttaaggattacagtcgagagttgcaaggttctggcaggtagaccaatgggctatgggacttgtcatcatcagagtggccagggaaggaaagcttccctggagaggaggtgcttgctctaagatctgtaggacatgtaagtgctaaccaggcagagatggaggaaagcagcagctttaaaggatgcaagactcgagggtgcggccagtatagtatgcaggcttctgaagtcaagcatttactcatctattactcagcaccccataggcacaaggctccatggataatgggtcctagggacactgctaactgagaaaaatctctccagccccaggcaggaacacatcttgctgtcagagatcactgatgtcccagtctgagagacccaaattcccatccctgcctctcattttcaacatcaaaaggctgctatgctttagatctaaaacccaggatggcatttttcatctcctctcctc

SEQ ID NO: 198596 - DNA, 494 bp, Homo sapiens
tgcctgatttcaacaatatcagtcattatgatacatttaaattgactaaagcatcccgattaaaaggcagagattgtcagactggattaagaagcaagacccaactgcatactgtccattttaaatacattttgcactatgtagtgcattttggctacagtgcatattggcttctatgtagcagctttttttttttttttttttgagacagagtctcgcactccagcatgggcaacagagagagaccttgtctcaaaaaaataaaatggtgaatgtaaaataaaatggtagctcacgcctataatcctggtactttgggaggccgagatgggtggatcacttgaggccaggagttacagaccagcctggtcaatatggcaaaactcccatctctactaaaagtacaaaaactagctgggctggtggtgatgcctataatcccagttactcaggaggctgaggcagaggtcacagtgagctgagatcacaccact

SEQ ID NO: 198597 - DNA, 201 bp, Homo sapiens
gcacacagtgggcgctcacaattggtgatggatgcaggcatcctacacccatgttatcgctgtccttcccagggctcctatagcacttgttaactctgctaacgaagcatttaccaatcttattttataattatctcttcccggccgggcgcggtggctcacacctgtaatcccagcactttgggaggcctagggggtgga

SEQ ID NO: 198598 - DNA, 323 bp, Homo sapiens
ttacatctatttctggcccaagactgtggcttagacagaatggatggtggtggtaccatgactgagatcgcgccactgcactccagcctgggcaacaaagtgagactccacctcaaaaaaaaaagaaagagctctcaggatgcagagaatggcatggagtaaagactgggtgacgcattaggaggctgtggcagagatacaggcaggagatggtaagggtttggaaccacagtagcagcaacagggggcagagaacagtggttgatccaggagtcatttaggaggtgaaactgacaagacatgacgatgcaatggatgttggg

SEQ ID NO: 198599 - DNA, 368 bp, Homo sapiens
aataaaagaattagccacacatggtggtgcgtgcctgtaatcccagctacttgggaagctgaggcaggagaattacttgaacctcggagatgggggttgcagtgagctgagatcgcgccactgcactccagcctgggcaacaaagtgagactccacctcaaaaaaaaaagaaagagctctcaggatgcagagaatggcatggagtaaagactgggtgacgcattaggaggctgtggcagagatacaggcaggagatggtaagggtttggaaccacagtagcagcaacagggggcagagaacagtggttgatccaggagtcatttaggaggtgaaactgacaagacatgacgatgcaatggatgttggg

SEQ ID NO: 198600 - DNA, 132 bp, Homo sapiens
ttatgatataaaccaaatggcctaaccatacttgtaacaaaattacagtcatccatcttaacttatgtgcatgatttaactcattggagccctgatgaattgattacttgggaaaaaaacaacaacattatt

SEQ ID NO: 198601 - DNA, 636 bp, Homo sapiens
gaaatttacctctgaggcaggtatggctgaagctttacgaaaagagatggggcccgtgccaggccttagacgtgcgagaaggagggcgtgtcaggaagcagaaacagtatcagcaaaggcgctgctgggaggcatgtgggcagtgtttggggaacggccaggggctttctgtgtcaggtttacagcatctgtgggaggctgcgttggtaaataagcccagagaagtaggctggggctacttacattaaaagtatgcatggctttgaaggccagctgagtggtataaatagaaactacaaatagtatcacatttattgaggacagcttgtgctgccaaaagagtttttaaaatttttttggattgtgtaattggtggataaagaattattgacctaaatgtatctgatcttagagtgttttagtatgctagattattggaggtgaaatggctaagtcaaaggtgatgagtgtttttgagactcttaatgttaattgcaaaattaacctctaaaaaggtaggccgggcgcactggctcacgcctgtaatcccagcactttgggaggccgaggcgggcggatcacgaggtcaggagattgagaccatcctggctaacacggtgaaaccccgtctctact

SEQ ID NO: 198602 - DNA, 1072 bp, Homo sapiens
agtgctgccagtaatatatctaattgtacctggttttccagttttgtgatcattgtattttataactccatttacttttgccagcttaatagttgttttgaaactatagtccttacttggctagggaggcaatgaattttttttacatggtagtttactatttacatatatttgagtataaaacatctattcatcttctctgataattagctgatggacttactttgtatatgctgtccactgtccacattattagtggaactaattatgtagtgtcttatcgttacgagttcatctgtattaggtacttaaagctgtacctgcatataataaacactcaataaaagtcaattagctatttttatttcaggctatgaaatttgctatgagtatagcagtggctgcacattttttgactggtttatcaggactcttgtttgcagttgatttattaaaagtgaatcttaggaaaacctggcagcaaagagtgtaatagggttctgtctcaatttattgagaggcttctgaatattcactctgatgttcagtgtgctttttttctacaaaaaaaaccacacgtgaccatagacaggtctcaaattttagtttcatccatgaggcagataccaatccaacatttccttctggctgcaactcttttgagtctggctgctttttctcagctttccagattgatctagcttgtagtatcagtaatttatatttattgctgagtaatgtttccttgcatagatatgccataatatgtttatccattaacctgtcagtggactttcaggtcttttctattttgtggctattatgactgaagctgctgtaacatttatgtacagatctttgtctggacatttctcatttctcttggttaaatatataggagtgaaattactgggttgtacgataagcgaatgtttaaagggactaccaaaatgtttctcaaagtgattgtatcattctaatttcctagctgagtcttccagtttctccacatcctctccagcacttggtattgctagtcttttaaattttgccattttagtggatatgaagt

SEQ ID NO: 198603 - DNA, 654 bp, Homo sapiens
cagtctccccacctccaatatccaaagttctgtcaaggatcacatactacatttggttctttattatagactttttaaatatcgttgtataccattgtgattctatcgtctcctttaataaagaggagaaccagaaaaatgaaaggtcataagaggaatgaggtttggagaataggtgaaaaaaggcatcataatgtttataataatgtttgcctgttcagagaaacaagaatcacagataaagtcacttatatgtagataagagaatgctgtattactttttgctattctattcactgatcatttttctaagaactctgtatgcttcttgtttaactcttatgtcagcatgtatgagaaaactgagttaaagagatgttaagtaactcattcatgctttactagaaattggttgatgagggacataaacctaggccggtgtgattttagattgcttcttttaaccattgtgttgtattgccttatatttctaagtaatttatgttcactgagagcaaataatagtctagctatgacttagaaaagtaaaataaagatgttgggcagaaaaccattttattaggggtttttttggaggagcagattaattgtttctgtattctttggactagtgtgaggtcctctgttcttttt

SEQ ID NO: 198604 - DNA, 189 bp, Homo sapiens
gcacctggccaacccaccccttctttacatattgcattagtccattctcacactgctataaagaaatatccaagactgggtagtttataaagaaagagggttaattggcccatggttctgcaggctgtacaggaagcatggcagaacctgcttcttggcagaaggcaaagggggagccagcactttaca

SEQ ID NO: 198605 - DNA, 515 bp, Homo sapiens
atctgatcctcatggctaatgcatgctgaacagaacacagggcagcaaaaattgaccccagagaaggaaggaagagggaacgggaaaggagagtttggttatcattgctcttggagaaacaagatgcatgatgttttattaataggcacaattcctttatgtaagtaacctgataaaaggtagtaggttgatttcatgctctgctgaagagaagtgggatggctttctaccctgaagccactagggctcttttaggcactgcatggagcatatttgcttttttcctttatataaattgcaaatagcatcttagtcacataaaagagttggtccagctccctgcaaaaatgctctgttatgtccagtgtgcatttcatatatttcacatgctccaggggctgtcagctcatgcagtcatatccaacattgacattgactatggcagtcacagtgacagcagttttgttctttcatgccatttggtactccacaatgcactacttaacccaagacaa

SEQ ID NO: 198606 - DNA, 450 bp, Homo sapiens
ctcccaaactattggtccaataaatgaggaggggccactacttaggaaaattgttctatatttagttttaacacctttatagagatgcaactgaaataccacacaatctgcctgtttaaaatgtacaattcagtgacattagtgcattcacagagttgtgcctccattaacacaatttagaatattttcagtacaccccccaaaccctttgaccctcaatcttcaatcccccataccccctccaaccctaggcaatcattaatccactatagacttgtctatagtggacatttcacttaaatggaatcatgaaattatgtcattccggcttctttcatttagcataatgttttcaaggtttatacatgtaatagcatgcattgatactgaattctttattgttgaataatattccattgtatgaatataccacatttgtttatccatcag

SEQ ID NO: 198607 - DNA, 265 bp, Homo sapiens
aacctcacaacaagaaaaaactgaacaaactgaaaatcaacaacacttcttagaataaccagagaaatgaggtcacagggcaaatcaccacctcaaaagctggggacagacatgaatacagagagccacagtttacaaggtacaaaagttactgctgcagccagcagctggcaggcacaaattgctagaggctgagtgtggacttgcctaagagttagagaccactgggggcccactcctttttttttttttttttttttttttt

SEQ ID NO: 198608 - DNA, 164 bp, Homo sapiens
ctgactatttcaaccttttgagtttctgattcatccaaagaatcagaacattgactaccaatgagaaagcttgctccctattcattttggaacatattctactgaaagtgtcttcttttcttttctcttttttttttttttttttgaatcagagtctctctctg

SEQ ID NO: 198609 - DNA, 385 bp, Homo sapiens
tcaaccacagaaccatgccaatgccagtggactctggccccagacttgctcctgtgtacccaagctccagttaaaccccatggacctaagttctaagcccattccagaggcatacctgccccacggtccaaggcttcaggccttgagacaaggcctagggacaaggcctgtttctgtggagcctggcgcctggttgagccctgtgggcccaggtgccagcaatgtttacccactgacccaggcaccaagccagcctgttggagtattctaacatccagcctgcccctgaacctcatccagaatctctggataggctgacttgtgaagagttttcccttcctgagtagtctatgaggactgaaagagctgccatttctttaaataa

SEQ ID NO: 198610 - DNA, 336 bp, Homo sapiens
agatgccggtatggaggatacaagaccagttttgtgtttcaattgcttttggatgtatacagaggaatgtagcaaatatttgctgagtttctattatgaaataggcaccatacaaggcactttatagagacactctcctttaattcttactgataatccttactatgtgttattacttcccattttatggatgaagaaattaaggttcaaagaggttaaataacatgtcagaagctacggagtttgtaagtaaaaactcagggttttgaacgcatcttttaagcttcaaagcagatcttacccagtgcatcagtggtcgacgcggccgcgaattta

SEQ ID NO: 198611 - DNA, 172 bp, Homo sapiens
taaaggtaacaggagcgaattctgatataataaaaatgataaattataaacatattgctttccctagggggaaaaaaagtaagagaaaaaacagctaagtgagaccgagccttgggtacaaatcccgagggaccacccatccttttgtagctggatgtctaataggttcatg

SEQ ID NO: 198612 - DNA, 460 bp, Homo sapiens
tttggagatggaaactttgggaagtaattaggtcataaccctaatgagtggtattagtccccttagaggaagacacatgaaaacatcctctttctctgctctccaccatgtgagtatacaataagatagccatctgtgggtaggtgctggctcacacctgtaatctcagcattttgggaggctaaagtgggaggatcacttgaggtcaggagcttgagaccagcctgagcaacaggatggtctcagtctcctgacctcttgatccgtcagccttggctgggattttatgctaggattacaggcgtgaggcaccgtgcctggccaaaaaaaaaaaaaaccactttttaagaaaaattagccaggtgtggtggcatgtgcctatggtctcagctactcaggaggttgaggcaggaggttgaggctgcaatgagccatgattgcaccactgcacttaaccccg

SEQ ID NO: 198613 - DNA, 583 bp, Homo sapiens
gcaaaggcaatcaactgtacctaagaggtggggagaggcttgaaagaggagatgctcttcaactgattctttaaggatgagaacaagtatacgaggtagaagaggtggtggtagaagagatggtggcagtgcttgctggtaaagacacagttataattaatgtagatgatcggcaggaacctaggaaggaaagataaagccaacttgtaaagggcctcctcagccttgtaaatgagcttaacaatgggagccatctaaagtttttaaaaagagaactgtcagattttaaaaggagaactgatgagttttacttttgagaaactgctctgggtggggaaagatttgaaggactaattctctgttactggagagggaccctgagaagctgagccaagatcaaatgccataggaatgtaaagtggcacatagaaggtgaggggagaggtatgatgacttcagagaggattgagtggtgcctttgagacaagagaaagggattagggtgggtgcgtgattcttttcaacaggaagaatctttctttgaggtacctgctggaagccaggtggtatttagcaatctgat

SEQ ID NO: 198614 - DNA, 669 bp, Homo sapiens
aggttgcagtgagtggagatcgcaccactgcactccagcctgggagacagtgtgagactctgtctcaaaaaaataaaagtaaaataaaataaaataatcactctgaatgtagtgcagagaatcttccagggcagggccagcagaccacagcccatggcaggttctggcccactgcctgtttctatatagctagcaagctaagaatgctttgtatgtttttaagtggttgaaaaaaaatcagtattttatttcacatgaaaattatatgaaattcaaatttcagtgtccagttccagttctattgaaacagagccacactcttgtgtgtattatctgaggccgcttttgagctgcaacagccaagctaagtagttgtaacagggagcatatggcctgtagaggctgaaagatctatactgtttggccctttacagaaaagagttgttgatccctggtttgggatagaagtagggagaccagtgaggagactgttgcaagaactgatggtgccttggacagagcaggaagaaatggtcatatatgggttatgtttgaaaggaagagctggtagactgtattaatataggaagagtcagggatgatgactgtgtttttgcactgagtaactggaagaatgctattcttctttactgagatcaggaagactga

SEQ ID NO: 198615 - DNA, 1349 bp, Homo sapiens
ctatcagctggaccagcatgggttcaaattactgcaataccgcaagcctttccctgaaagttgcaagtcatcaatggattccagagtttcaaaggagttacatcaaatagattctgccagtgtaattattgtctaagtgggcagacagatttctggtacttcttactctgccatcttcacagaatcctattttaaaactgatactctaactgtattccctataattgggaaagctgaaaaatattgagtgaattaagcagagatatagaagatattttaagaaaacaaaacacccaagtcagacttttagaaaactataacgtctgagatgaaaatataatggaagcaattaaaagcagattagaaatagaagaataaagggttatgaacttgaagacagcaataggaactacccaaataaaacagacgaaacaaaaacttgttaaaaaattaacagagcctcaatgaccttggaaagacttcaaatggcctaatacacatatatcggaatctctcaaaaagagaaagtaggagggacagaaaaaacattaaagcaataatggctaaaagttttacaaatttaataaaagctataattccacagttccaagaagctcaacacgaagaacaagaaacaagaaaaccacacaaaggcacacaaaaaccaattggctgtaagccagcaaaatagatctttactctggcatcaccagttgagtccagtagcagcaggtgattctgttttagtttttggccctaacatttttgggaccaacatcactgcactctctcagaggtgccggcatcaaatggccagaatctcctcctcagaggtctctgtcccagctctacagggcgctctcctctgtgctactgaagcaccaggaccaacactagaccgtgcctcctcttcatgggtcccagtccaagctttctaggactctccttccaagcttctaaatgctgataaacctaatcccttccctttgctctgtagccctagataggagctgcttcctattataaccacctctgtgatgtcttaagtgttctctttttgcctgtttaacaattctttacattaagtactctacattaaatactactaaaataacagagaaagatgattgcaccttgttaggtaaaatcataagctttttctatcttttaaatttttttaatcaatttttttagagataggatctcactccatcacccaggctggtgttcagtggtgcactcatgcctcactgcaacctgaactcctggctcaagcgacacttcaccttggactccaaagtaacacagactgtgtgtgaatgccacccacacctggctacttttttttg

SEQ ID NO: 198616 - DNA, 414 bp, Homo sapiens
tacttctctatttgtaatggttacataatagtttatgatatggacagtctgtagtatggacaatcacagtttattaaaggacaaatcttaataatagttttaatgttgagtctaacattgagaaatcctttttcgacaactctcctgggatcgaacaagcataccacctaccttattatcacataccttctgttcagtgtttttcttatctttatgctttgcctaggtagggagcatgatttacttgatggattagtcaagctcatgaaataacaagccatgctagagtccattcctgtccctgtggcataactccactgcatgactttactagatttttaaagtcttttcccaacgtaccgctttaaaattagatctgctacctgtttagcgttttttttcctcctgtgatgg

SEQ ID NO: 198617 - DNA, 552 bp, Homo sapiens
gctatatcactatggtctgataggtttgtctgggttgggtcagagaacaaatccatcttcatgggcagggttggatttatccctaaatgaagtggacaatctgactgtcaatcatcctgtgaagaaatagatcccagatggccttgcacaaggataaggagaaatctttattctccttctgagctttatgaatattgggggggcctgaattttgataaaggaaaacattattgggacattcctagtgacttgtgtaaacttgccaaagctacacagagatgaaccagaagctaggcaggggagatttatgaggatgagcccgggggcactaagagaggtcacagctagttgcagctgtaaatcaacatttgtgatataattcccttccgttttccttaagtctccagtaagagcttgttaaaagttgcagtctgttttcagctgtgttgaagggacttataggtctggtccatgcttgggaaaggagagatcagcatttctttttgtctaggacagaatgatgatagcagtcaaaacagccagatgagaatg

SEQ ID NO: 198618 - DNA, 674 bp, Homo sapiens
taataagtaatcatcaaaacccaggcaaggaaaattgttaactgattaaaagtttgaattatattccctcaaaacccccaaaggccactagatagtttgaaagtatgaatgacatacagacttattttgcaaaagttttagttataatatacacctgatatcaaatcaggctttttaattaattgcacagaattatttctcctattttaccaaaggattcccattggaaagaataaggggtagaaattagtaaccttaaaaatttttttgagcaatttttcacttaaaaatcactgctgagattgttttaaatatagaatatgaaaaacatgagttaaatattaacctcataaagtcgtagttgaattggccaggcgcggtggctcacgcctgtaatcctagcactttgggaggccaaggcaggtggatcacctgaggtcaggagtttgacatcagcctggccaacatggcaaaacctcatctctactaaaaatacaaaaagaattagccaggtgtggtggtgggcgcctataatcccagctactagggaggttgaggcaggagaatcgcttgaacctggggggcagaggttgcactgaaccaagactgtgacacttcactccagcctgggcaaaagagcgaaactccgtctcaaaaataaaataaaatatagt

SEQ ID NO: 198619 - DNA, 276 bp, Homo sapiens
tccagcctggtgacagacggggactccatctcaaaaacaaaacaaaacataacaaaaacagatgttcaaacactgaatatgcatatatacatttatcaaaactcatctaactatctggacatggtggctcatgcctgtaattccagtacttcgggggttaaggtgcggggatcgcatgaggccaggaatctgagaccagcctgagcaacacggtatgacattgtatttacaaaaaaattttttttaattagctgggtgtggtggcacacacctata

SEQ ID NO: 198620 - DNA, 405 bp, Homo sapiens
accggcgaaaggagagcactcggattgcagaagccatcaggtgagctgtgctccttttcacacaccctggggtcctgcgtaggattaccaagtaaaaatacaggctgctcagttaaattcgaatttcaaacaaccaggaattttatttttagcataagtatatcctgtgcaatactcgaggtctgcttacatttttaaaatgttggttatttatctgaaattcaaattttaattgggcatcctatattttcatctctaaccatggtcctgccaaaattagggatgctttgccctctaggttagatcccactttcattcttttgatcggaaagattttttatttgctatcaaggcctgagtctggtagtggccatgtgttgtccacactactcccgccccttgcct

SEQ ID NO: 198621 - DNA, 826 bp, Homo sapiens
ccatggaaacaaacagagaagaactctatgatctcttggaaaccctgaggagactttctgtcacctccaaggtgaagttcatcgtcttcaatccgtcctttgtatacatggatcgatatgcctcctctctgggagcccccctgcacaactcctgcatcagtgctttgttcctgctcttcttctcggcattcctggtggcagattcactgattaacgtctggatcactctcacagttgtgtccgtggagttggagtgataggtttcatgacattatggaaagtagaactggactgcatttctgtgctatgcttaatttatggaattaattacacaattgacaattgtgctccaatgttatccacatttgttctgggcaaggatttcacaagaactaaatgggtaaaaaatgccctggaagtgcatggggtagctattttacagagttacctctgctatattgttggtctgattcctcttgcagctgtgccttcaaatctgacctgtacactgttcaggtgcttgtttttaatagcatttgtcaccttctttcactgctttgccattttacctgtgatactgactttcctgccaccctctaagaaaaaaaggaaagagaagaaaaatcctgagaaccgggaggaaattgagtgtgtagaaatggtagatatcgatagtacccgtgtggttgaccaaattacaacagtgtgataatgtctgcttggcatattttcaccttaggtcttatcaagaccaaagagattatgttaatgaaacaattaaattcaaagttcttcccttttttaaagataggaaacaggcattgcc

SEQ ID NO: 198622 - DNA, 600 bp, Homo sapiens
aagtgctgaggttacaagcatgaggagaaataaatactaaagtttgagagcccactagagcgactgtacttagcaacaatataatgtataagtcaaagtcactagaaaagaggactttaaaggatatggtgttagtctgttcttgagttgctattaaaaaaatacctgtggctgggtaatttataaggaaaagaggcttaattggctgatggttctgcaggctgtataggaagcatggtgcggtcatctgctcctggtgaggccctcaaagagcttccaatcattgcagaaggcagagggggagcaggcatcacatggcaagagcaggagcaagagagggagacatctcatgaactaacagagcaagaggtcactcatcacaaaggatatggcactaagccattcatgagggatctgctccgtgatccagtccctcctaccaggccccacctccaacactggggattaaatttcaactggagattcgaaggggatagacatccaaaccatgtcagatgccgacacataaaaatgataaacactcggtcaggtgctgtggctcacacctgtaatcccagtactttgggaggccgggtcagg

SEQ ID NO: 198623 - DNA, 411 bp, Homo sapiens
tctccactactgatgctttctacgtctcaaaaccacagctcaacagatgtgagtttcaactgtctttgtgcaggaaacatcctttcagtattgttgttttttttttctgatatttaaaaaaaaatttttcttttggtctacttgtggtattactgagaacagcatgttaaaatctccagctattattgtagattttctattttcccctttggttttactagttttggtccatatatttgggcattctgtcatcaaatgtgtatatcttggtaattgtagtctctccctattgtattgcgcaggacctatccttttggccctataatactcattctattgaagcaatatttggtgtgctattaatccagctactacaggccatgtgcagtgtggctcgtgcctgtaatcccg

SEQ ID NO: 198624 - DNA, 434 bp, Homo sapiens
tcagagaagtatataatttgtaacattttgtatataagaaacagatctgtgcattcatctctcagtgggctgctatacatgattcttttcttagcgtaatgcatagaagtagatttgcttgatgaacatatacagtcacacaccatataaagatgtttcagtcaatgacagaccacacataccactgtggtcccataagattataatggagctaaaaaattcctatctcttagtgctgttgtagccgtcatattactgcaacacatcattcatgtgtttgtggtgatgctggtgtaaacaaacctaccatgctctcagtcatacaaaagtagagcacatgcaatacttgataataaatgactgtgttactagtttatgtatttactacagtctgctttttattgttattttaaagtgtaccccttctacttatt

SEQ ID NO: 198625 - DNA, 486 bp, Homo sapiens
tgcatttcttcagaaggtacgctgtcctcacgggaaaccgcccgccactgcctgggtttggggctgatgaggccaggaagaaacttaatgcgtgcactctaacaaaaagatttcccagtaagttaagaaaataagacggtgggcaccaaagaatatgcgcatgccctgacatctccttgacgttcacgtacgtgccactcccagcagcatgtctgtcttgagaacctgcacagacacccttgatttaggctgattgatttgcaagagggcaggggaacatcagaggaaatgaggccaggagaaagcaaggatatcaagagaactcgcttttttctcccagagtgattgtttttgaattcttcactctgccttatttcagagtggaatagcaagctgtaggtctaaggcacatggcgaagaaactgtaactgatccccttgtcctaaagcgccttccttcatgctgcttctcccttcccatgtagtg

SEQ ID NO: 198626 - DNA, 425 bp, Homo sapiens
acgcatccagaacgctactactggcaagtcgtgttcttacacccaagagacattactgtgcgggacgcatgtgtgcgtgtgtgtgtggtgtatgcgtgtgctgtgtctgtgtgggtgcgtggtacacgtggtgcatgtatggtgtgtgtatggtgtgtacatgtggcgtatgtggtgtgtgtgtgcgcatgtggtgtgtgtgcgtggtgtgcaagtggtgtgtgtgtggtgtggggtgtgtatatacatgtgtgtacatgtggcatgtgtgtggtgcatgtgtgtgtggcatgctccccaacctggatgtcgagatgcacccgcagtttgccaccagcgaagagagccatcctggtagaattggagtgcagacagatttgatggtcaccgggcgtgtgggaggtgaacgtgaagcggccctccga

SEQ ID NO: 198627 - DNA, 338 bp, Homo sapiens
gcccttgggaatataattggtttcctaggttaaaaagaagctattttttttaaaaaaaagaaagatgtattgcgttagtagaatttttagatattttacttgtaatgagaaagaagaaaagactttgggatgttacaatttattagagtattaaatatcatacagtgacatgttacagttaacatttatcaataattcagagtggtcaacatggtatgatattaggcattatggacacacaaagatatcttactaatagagagatacaaaatgagggcagagacagcaagagagaaatgagggtggagtgcagttaatcagagaagtaggaggacagg

SEQ ID NO: 198628 - DNA, 241 bp, Homo sapiens
cagtttcttaaactcagttccagattcttcagctgcagtaaggtggagctacaattaaatgtgggttactgaggacttggtaggcagttgattacatatagtaaacatttattgtatgttaggttcattctttttgttttgttttgttttgtttttttgaggcagagtctcactctgtcacccaggagggagtgaagtagtgcaatcatggctcattgaagcctcaacctcccagactcaa

SEQ ID NO: 198629 - DNA, 978 bp, Homo sapiens
agtctaaactcaagggtgtagcagggttggttccctgctgagaggccttttctggcttgcagacggcactgtgccctcccatggcctttgctccgagcaagtgcagagaaggcgagtgtgagccttctaccatccctccttacaaagacactaatcctggagggccaaggccccacttatgacttcattcacccttcattattttctctgaggacccatctccaaatccagccacaccagggtttaggtctttaacatgaatgtgaggaagggaggccacaagcattgagtccatgacagacactgaaaagaggacattgtgttcagagcaagccatctgagtcaccttgcaggccctcagctcagcatcaaggattcagtgagtgtgcaggtgtttgagacggggcctagctgctgggctgactgtcactgtgcgggagagcttcaactggaaaccctaatcactagctttcctgctagtagaaaccaccagtttacttaggaatctcagctgactgggtgcctcagtcagggctgtgcagagaaacagcaggagagacagagattgagatctcaaggacttgccttctgcagtgggtgagtccagcgggcaggtctggactccgtggacaggcagcgggcacgagacttggccgtggtggacactgcaggccgcaggtggactctcctcagagaagctgcagtttgggtctcacaggcctctcagctgactggttgaagcccccacattctcaagagtgatcgctacttgaagtccattgattataggtgttaaccacatctataaaatgccttcacaggaacacccacagcagtgtttggacagctgggcactgtggcctagccgggttgacacatacggccagctggcacagtcggggacattttactttttttcagttatcgcctttaaccacgatgggtgaaatcacactttcctgtgcctaaataacatct

SEQ ID NO: 198630 - DNA, 595 bp, Homo sapiens
ctgtacatgagagttatctgagggctttaaaaaatataaggtcagggctttgccatccccccaactctgatttaatttaagtggtctgatatgtgccccaccgccaggtgattccaatgtccagcttagctgagtagcaccctgctaaagaaacctgaatattctgaatcatagagttactatgaataccatataaggaaaaatagctttaaaaattaagcaaaaaacaccctgctttacccttgtactctactttgtttcagtagaaacttccagtttttttatgtctaaattatcattattaatatcataatcactgtataatatatgtagagaatataaagaattgtctgcatctgttttacgacaattctgaagttggtctttaagaaataaatttttcaattgtctttctaataaaatacataatacgaaaaaaagtttaattctttgagcattccagtttgtattctgttaaaaccagaatcagttataaatagtaatattttaaaatgagtgatagtaacaaaagatggataggcccttttatctataaatccagggctttagagtacttttgttaacagcaaattaa

SEQ ID NO: 198631 - DNA, 284 bp, Homo sapiens
cattaagttattcagctagaacagggagagacaaaaagattaggaagggcctgttcctaactttaaggatttgatacattccttgagatggaatgataaacttgatgttttcataattgtttttgaattttaaagcaccatttatatgggtacgttgaaaataaaatgataaaactgtatattaccttcattactttccataaatgctaaagtttgggagttcataaactgcaggcaggtagaacagggcattgaagatgagatgggaagacaagactttcaga

SEQ ID NO: 198632 - DNA, 555 bp, Homo sapiens
tcgcgctttgccctttccagctaggtggaagttcacgagggacaaaaatcagatgaaataggctacctgcccgtctcttgagtcgaggcagggctttcagatgttcagatgccattttctcgtgtgttcgttttcgtagaaggaatgatgtcctgtgggaaggacactagattgagtgtcaggcaactttcatttctggatcttagtctttgaagctagagggttaggttaggtaatctcaaaacaatatgttatggggctagagtcttggttacccttgtgacccccagctgttagattcttagaaatgtgggagacttgaggggtcttctgagtccagctgtctctctttggagttaatgagattgaggctccgagagagggagggatttgctcaagttcacctagccagtttgtagcagagcccggacccccatcaaggtaccccctcacgcgacgatctttctctcaggctgcccgccgtgagggcagtggttatacagaaaataatttttttaaatgatgagaggaggctgtacctcagtcaccatcatt

SEQ ID NO: 198633 - DNA, 261 bp, Homo sapiens
aagtttgtggctattctgtggtaattatttctattgttggaaaatgttccagtgataattactgatgttattaatatccatgaaaaatattttaaaatactttctgttgctacatgtaaaatgtgaattactatcctagttcttctttctttctgaagattttagtctcatgtattttataatgaaattatctccatgttgtatagggggaaaattctgttgctatgattaagtgtaccaatttttaatataatgcttacc

SEQ ID NO: 198634 - DNA, 557 bp, Homo sapiens
cgaggagtccgcagaggcgtagcattgcaattttctgaagggaaggctatccacaactgttaattctgatctaaggaactatttcccttcttaacttctttgctaggttatctaaagggagatatgctttctcacatttgtttccttgaacttacttttaatgttgccttgtagggtcaaaactttagaaatacagctttctcaggaaacttggtcctcagatctttcagacattatcttcctttaagcttattgtcctcttgggaattggcaaaggattcccaccctttaaaaagataggaaattgtaaaatccacacttaaaaattaatctaaaattatttttcaggaagaatttatacaatggcaactaaatgccctgcagccaattatgtttatgattcctgcctcatctccaaatggtactagagtttgagtcatatgagaaaattaattgggttgggcttgattgtacatgtatatgtatataataatgttctggttataatgcagtttgcagtttttctagttacagctcaaggcaaagatgagaagcaa

SEQ ID NO: 198635 - DNA, 509 bp, Homo sapiens
ccaggcacctcctctactgtggtcagagagggacccagacagagcatgagagagcatatggtccgtatccctcagttcacaaacaggggccggggatttgatgtgattcatcccaagagcaagggtgcttctgtcatcacacctggattctcactgtgatatgagcaaaacatagcgtagtacagtcatgctttgcatagcgacatttcagtcaacaatggaccacatatatgtcatggtcctgtaagattataatgaggctgaaaaattcctgtcacctagtgatgtcatggtcattgcaatgttgtagcacaaaatataactcatgtgtttgtgtgtttgtgctggtgtaagcaaacttactctgctgccagtcatataaaagtatagcacatacgattatgtgcagtgtgtattatttgataatgataataaatatgttatttggcttatgtattttctatactctagccttattttagagtatgttctttctacttataaaaaaa

SEQ ID NO: 198636 - DNA, 357 bp, Homo sapiens
taacataggtaaatctcttaaattctcagaacttcaattcatttatatgtaaagtgaggagttgtaccatattggtagttattaacatgtactgtacttatgaatcagtctgaaaatcttgctaaactgcatattctgagcttttcttaatttttttttgttttctcggaaacgctgattctctaggtcttggttggagtccaggtatctgcaaattaaataagcacttgaagtgatagtatctgagtgtccgtaggcaaatgttaggagaactgaatcagatgttctttgaaagattttcatggttctaaaatgttctgatttaaaatccacaaagaaaaaaagcattgaaaatga

SEQ ID NO: 198637 - DNA, 377 bp, Homo sapiens
caagaaatgcagcagctgtcagatgccgttagtgattcaactgtgaaataaaaggttccaaccataatgcttaaaaaaaaaaaaaaaaaaaaaaaaaaaaggccaggcatggtggctcatgcctgtaattccagcactttgggaggccaaggcagaaggaccacttgaggccaggagttaagagaccagcctgggcaaccaagtcagatcacatctctacaaagaatgtaaaaaaaaaaaagaattagccaggcatggtggtgttcatctgcagccctagctatctgggaggatgaggcagaaggaccgcttgagcctaggagtttgaggttacagtgagctatgatgctgctactgcaactccagtctgggagact

SEQ ID NO: 198638 - DNA, 347 bp, Homo sapiens
gtatgaagttcaagcatactcagatacttgctctcttacatccttcctaaccctctgctaccctccctcctgggcttctccttacataaaaaagaagaaacaggataaggaggatatgtgttctcttttcttataagcaagaacacttctttatttcccgagaccacaaactcactattaaagcacatcccaacttaaaacatacagcaagctagtaaagaagtaagagaggcaggggatgagtgggaaaaacagctgccagtgataaagggggctgtctcatgcctgggagagctacagcggtccacattccatctcacagtcatggtgtacgaactagaagaaca

SEQ ID NO: 198639 - DNA, 286 bp, Homo sapiens
aaagtgctgggattacaggcgtgagccaccatgcccggcttaagtaactaaatattttaattgtaactaagtgaaaatatttgccagccctgagatgcagtttaagggattaagtaaatgtgggggaagactggggctaaagaagaggaaagaggggcacgcccagctacctaggaggctgaggcgggaggatcacttgagtccaggaagtggaggcttcagtgagctgagattccaccactgtactccagccggggcgacagtggaaagggtgctagaggtcatt

SEQ ID NO: 198640 - DNA, 192 bp, Homo sapiens
tagtaaagctggatttaagtgtggaactcaggaacactgatagaactgacgggtcttgctgatgatgaactgaagcaggaggatcctttaagcccaggagttcaaatccagcctgggcaacatagtgagatcactgtctcttaatacatatatatattttacccttaatacatatatatataaatacccaca

SEQ ID NO: 198641 - DNA, 343 bp, Homo sapiens
cagcccattatatttaaatagataaattgtctcagttatttcacactagctgtatgactttatttctgttatccccagcaactacatttttagctttaaagaatatttttattgcttttgcatcaatttcaagtttcaatatacaaaagagagtagtaactagttcctatgctcttcagtctgcttccccaagtaatcattctactgtgaggtgttttgtttttggtattggcattttggtattaggattcattattactagttatcaaggagactcattattacactgtgtcccctaatcatgtataaccagtggcctggcaaagcagaagacgacttcctc

SEQ ID NO: 198642 - DNA, 399 bp, Homo sapiens
ccccagaggggcgggccagctccatccctccatcacctcccgtggggcgctgggattgaggggctgccaggcccctggagctagggtgggggctgaggaggggcggcagccagccccaggcctgatgtaattactgctaacaaagtctccctgggggtctggctaaggagggggcctgtgggacagggaaggacaggcccggagtcattgtggggccccaggggtccgttttctcagccttgacaaacagctctgacaacggagcgcttgagcctgggcactggcctcggagggctgggagaggaggtagaggctggggctccgttgccggctccaccccaggggtacccttgagactgtcagctctggtggtgagccctgtcctggctgcacttgagg

SEQ ID NO: 198643 - DNA, 334 bp, Homo sapiens
aaccattcttaaatttgcagggtttttttctttcttttcttttcacatgacagtttttattatttttatgctggaacttgtataatcaagagttgtgctcttgaagatagtcaatcatcttggttgaatttacatgactttctttttttgagaagttgtttcagaacatgcctttattgtattatttcacacaccttcagcagaacctcatcttgcttcttttagggcagctttgatttctcgaaatagccaaaattcatctgaaatgaaatctaccaggtagaactggtaaaccaaagagatacctagattttttatgctgatggagatgtgg

SEQ ID NO: 198644 - DNA, 345 bp, Homo sapiens
agccaaacttccttcccagctttgcctctcctgagccaaacctccacctcagccagggttccatttcctcgtcctcctccctcctcttcctctgaaggtgcccatcctctcatctccttgactctttcctctcagcccaaaaacctgctccattgcatccagcctgaaaatccctccttaagccagcacctgcctctgctttccttctccacagaactattgagcaaatgagctacatttgccatcaccacctccttctctcctactcaactgtacaatctggtttttgctggcaaatgctctgtgctccttaaagtccccaacaatcaccccattgccaaattc

SEQ ID NO: 198645 - DNA, 319 bp, Homo sapiens
aaactgagcacagagcttaagtgccacacatatagtaagtagcagacccaggactacaaaccaagtcttctcattaaaatccatgtgcttggccaggcgtggtggctcacgcctataatcccagcactttgggaggccgaggcaggtagatcacagaggtcaggagatcgagaccatcctggctaacacagcgaaaccccatctttactaaaaatacaaaaaattagccgggtgtggtggcaggcacctgtagttccagctcctcaggagtttgaggcaggagaatggcgtgaaccggggaggtggagcttgcagtgag

SEQ ID NO: 198646 - DNA, 444 bp, Homo sapiens
aaaaaatgaaacagggctggctgggagtggtgactcatgcctatattcccagtgctttaggaggcagaggtgggaggctagcttgaggccaggaatccgagacaagcctgggcaacatagcaagactatctctacaaaaataacaaaaattagccagttgtggtggtgcacgcctgtagtccagctactctggaggctaaggtgggaagatcctttgagcccaggagtttgaggctgcagtgaggcatgaagacaccactgcgttctagagcctgggtgatagagcaaaaccctgtcttgaaagaaagaagaaatgtaggaatggagggagggaaaggagggagaaagggagggagggatggagagacagagagaaagagagagggagggtggaagcgaaaggagagagagagagaaaagaaaaaagaagaaattaaggaaggc

SEQ ID NO: 198647 - DNA, 308 bp, Homo sapiens
ctcagattggggggcagagttgaaggggctaaattgctcctgacgggcacaggtatgggattaagacaaaaaaggctgcgcaggcagggctgaggccaagctcaggaatgtggcaggtagggctgctggtgctctggcagggcccacgtgggcaggcagttcagcctgtgcccacaccaaggctggcacccagtcctgctcacaccctttcccgtgggctggggaacacaggttcagaaatgcccacgattcccagcagcctgagtagcccagtccatctccacagtgagaggcacctccacagcaag

SEQ ID NO: 198648 - DNA, 509 bp, Homo sapiens
ctgctgtactcaaagaacatccacacacacacacacacacacacacacacacacacgcatgcaacataaaaagacattgcaacacatttatttagaccacaaacaagttcttcgtttctgagaatatttttcttgaacaattgtaccgttactttttttaaaattgctttataatttcacaagagattcagtttttcaagtttctacaaaagcatttgtaacagccctcagttatctttgtttaataatcatgatgtttaatcaattgcgcctgattctacacaattatgaccacagtatgaagactggtttgttcacccagcttgactttaggcatttctaagagatgctcccttaggaaaataattggtttgctgctgagatgacaattaagaaaaagactaattatcttgattttgagaaattacaagttacctatgttgggcacacgcttagtagaaatttccatgtaaagtatgcatttcttctagggctttggttgatgggaa

SEQ ID NO: 198649 - DNA, 400 bp, Homo sapiens
ggccttaagggttcctcatgcctcggcttcccaaagtgctgggattacaggtgtgagtcaccatgcttggcaaatagctcctttttataaagaaacattagtaccctggtagcatggaaatgctaataatctttatagttatgaggagagcttagaaaccttgtgaatctcacttctcacaatactatcattattaaatggtatttatttatctctcatgtagccaacataagataaaatgttaatacatgtaaacaaaacctgctttgagtaataagtaattagattctgattcatccaataaatctgtgctcatccatgtcatgacgcatggtatccgataattttatttttgcatataatcataatcacagaaataacatgagaagtcaatagcaga

SEQ ID NO: 198650 - DNA, 428 bp, Homo sapiens
cggatcgacacccatctgatgctacggaggtctgtggttcagtataaactttaggattatttattctatttctgtaaagagtattattggtatttcatagagattgcattgaatctgtagaccgctttgggaagtctggacattttaacaatattgattctcccaatccatgaacatggaatatctttccattttgttgtattttcagtttcttgcatcagtgttttatagtttttattgtagagatctttcacttctttggttaagtttattcctaggtatctttttatatttgtagctattataaatgggattactttcttgatttctttttcagattatgtgctgttggcatatagaaatgttgattttgtatcctgtaactttactgaatttgcttatctgttctaatagttttttagtggcat

SEQ ID NO: 198651 - DNA, 833 bp, Homo sapiens
ggacaggacaagagccagtccagagagagagcagggctgatgccaagaaagagccaggctagtgccgaggctgaggcagtgtcagagcatgtccagggcagggccggggccagggacagaaccgagccagggcacagccaagacagggtagggcagggaaatagcatggctgggtcagtactgggacagggcagagcagggcaaggcgatggtagcggcagggcagggacaggccaatgcagagccatgtcatgccggggccaggacacctccaagtccacttcaggcccagggctatggcaggacaaagaccagggccaggatcagggccaggtctgtgctagggccagctccagatgagggtctagcgaagactagggtgagggccaaggtaaggccagggcagggtcaaaggcagagtagggccaggtcagggtgatgacacatccagagcacaacagggcagggtgatggcaagaccaggggcagaccactgccagctcagggccaaggaaaggccagtgcagagccaggaaagggtctgggtctgaacaaggcagagcagggccagggccatggcagagtcagggcaggtccttgacaggaccaggttccaggccagggctagggcagcagcaggggcagggcctggataagggcagggcagtacagggccagatccatggcaggcgcagggcaaagccaggcccattgccaatgcaccagccctccctacaaggctcctaccacctggccactgctgcagcccgtccatcgctgtaagcctgaaccccaaccctggctgcagccacctgccctcctagtgcggccgc

SEQ ID NO: 198652 - DNA, 398 bp, Homo sapiens
atgagacttagctctgttaaatccaactaacatacttgagactcagaattctggtgagggcttcctgccacaaatctgggaaaggataatatgggacattccacgatctaagaaaagggtcctcagcatacagatctggtagcaatgaaaaaaggaaactcgtctctttctgcaacattatttgaactgaaccccgagggcctaaaggataatttatcatgaaggtcttagctaagtctaggctgagacaaaagcgtaacaggcggggtttcaccatgttggtcaggctggtctcgaacttctggcctcgtgatctgccctcctcggcctcccaaagtgctgggattacaggcatgagccaccgagcccggccaacatgaagttcttaaggatggaag

SEQ ID NO: 198653 - DNA, 466 bp, Homo sapiens
ggagatatgccaggtttgatatagaaattggttttatttctaatatattaagtgcttgctgcaaatgtcataatccagaaagattgttctgtggtccctggatctaggagagaagacgccactgacttgctctccttggttgtccaggaaggccaccctaagaaaacaacaaaaccttgatttctttagccacgtgtgtgtgtctgtgtctgtgtgtaagtgtgtgtgcatttgggtcctcacctgatgaagaaaagtgagaaatctgtttatttgtgggtacaaggtgtttcacagtttatgaaatgcatctgtgcttttccatgatcatatttaatgttcaaaacggtatgagaatactttgtctagtttacaattatgtaaactaagcttcagaacagttaagtgatttgcctaagttctcctagttagtaaagattggaaccaagactggggtaaacttgaa

SEQ ID NO: 198654 - DNA, 731 bp, Homo sapiens
ttttttgagatggagtctcactttgttgcccagactggagtggagtggtgcgatctcggctctctgcaacctccgcctcccaggttcaagtgattctcttgcttcagcctcctgagtaactggggctacaggcaccatgaccagctgatttttatatttttagtagagatggggtttcatcatgttggccaggctggtctcgaactcctgacctcaaatgatctgcctgcctcagtctcccaaagtgctgggattacaggtgtgagccactgcacccagccactttttctttgttctaagtacaattatctgtcacatgatagtgatgtgttttgagaaatgcgtcattaggcagttttgtcactgtgtgaacatcatagagcgtacttacacaagcctagatcgtagagcctactacacacctaggctataggtatagcctgttgctcctaggctacaaacttgtacagcaagtttctgtgctgaatactgttggcaattgtaacacagtactatttgtgtatctaaacatagaaaagctacagtaaaaatacggtataaaagtttaaaaatagtatacctgtatagggcactttacatgaatggagcctgtaggacttgaagttgctctgggtgagtcagtgagtgagtggtgagtgaatgtgaacacccaggacactactgcacattattgtagactttataaacattgtatactttggcttcattaa

SEQ ID NO: 198655 - DNA, 439 bp, Homo sapiens
gtaatattaccaggtgatgatacaagtaaacattagctgacaagtgtgctgacatcttccctaggtagatggctcttgctcattctttttaacctcttcaaatctaaatcagactccaaggcttagttcaaaactgatctccaaaaggccactttttggaggtaggggtatgtgtgtatatgtgtgtgtacaaacatgcacagttcttgtgcaaccaaagttggtaactgcatggaaggagtacagatcttagggtctaaggcatctgggttcaaatcttaaccctgccacttagtggctctttagtaaagcagtatcctcatttaacttctctcaaatgttactaagaagacaacctcctacacttggagaattatagcaaagatgaaagaaaacgatggtgtcagaccctaagatctgtactccatccgaagcagtg

SEQ ID NO: 198656 - DNA, 502 bp, Homo sapiens
gtaatattaccaggtgatgatacaagtaaacattagctgacaagtgtgctgacatcttccctaggtagatggctcttgctcattctttttaacctcttcaaatctaaatcagactccaaggcttagttcaaaactgatctccaaaaggccactttttggaggtaggggtatgtgtgtatatgtgtgtgtacaaacatgcacagttcttgtgcaaccaaagttggtaactgcatggaaggagtacagatcttagggtctaaggcatctgggttcaaatcttaaccctgccacttagtggctctttagtaaagcagtatcctcatttaacttctctcaaatgttactaagaagacaacctcctacacttggagaattatagcaaagatgaaagaaaacgatggtgtcagaccccttatcacaaaggcattcaataaattaccattagccccacaaagcattccctgtcgacgcggccgcgaatttagtagtagtaggcggccgc

SEQ ID NO: 198657 - DNA, 967 bp, Homo sapiens
gcaccgttgcccggggatgggtccctgagacttggcgaagtaggagccctgtgtgatcgtgcgtcagagtcggggctgagaccatgccctggccaggacagttaccaggacggtctccggaggccgggattcgcggagggtccaccagcaggaagaaaccccaggaggaagaaacctcagacagatcgccggggaggcagcgcgggatcccagcctcaggcgtgcgcggacggtgtgcggtgaaaatacaatgagaaggcagctgtctgcaagccaggaagaactcttaccaagaattgaatctgctggcacctttaacttggacttgccagcctgcagaactgtgaaaaacaaatgtcttttgtgatcaagtgccaagatgacttactagaagcagctagtatgctccactctcgtgaaaaggaaatagactggccagtaaacactagcacttcaactggatcttccaagaggacatgttgggattcagcaaggaagcaacagaagccatggagaacaaaaacagcaagacacaacagccacccacccaggattgggtggagtcaggggaggatccttaccacaaagaaatagtgactgagagagagccccatggccccatacttctgtcacggacctttgtaatcataggcacaggtgatccaccctgagtccctccccctggggccttcagactaacaaggagagctgcatagaatctgggcagagctccagatcaggcacatgagaagtcccaggggtcttagacccctaagcaccccagtgctagttgccatagcttcaccaacaagaacgccaagttctctgcatgccaaaagttagtggctacattcatggttctgaggagcagagggacttcatgccttgcctctggttaacctctccaggcaaggcacactgacctggaactccagaacagccatgaaacacccatttgacctcttca

SEQ ID NO: 198658 - DNA, 749 bp, Homo sapiens
caggccggactgcggactgcagtggcgcaatctcagctcactgcaagctccgcttcccgggttcacgccattctcctgcctcagcctcccgagtagtgggattacaggcgtgagccaccgcgcccggccctgttatgattgttaatactaccttacatctaaacttgttaattaattataaaataacacacagcaattcaacatattctttctcattaacattcattatgaaaatatattccatatcttagcctacatatcaagtgtcttgttcatttcaaaaatgggaaaaataatgggaaccatggcagaatatccaggttatggcaaaccactagatttgaacaaagcacaaaaccactgatgtggacaaagtagggcctacactcctaatagtttgctatgcacactgctggatggagaacagtcagttaccaaggctgacctcttgccaaagcctaaacataaatgggtctgacgctcggttatacaagtgcactaggtaggagccaacgttaagtagaaatctggtttgggatttgtcttcaatttgaaggcagatttttttcttaaacataaaggactaattgactaaatatataatacataaacacaattatctaaaattaactgtttagttcagttattgtattgtttctatctttgcttctatcttctctatttgtgttgtttctatctgtattgtttctaatctttcttcagcacctccaaaagggatgtaatctctc

SEQ ID NO: 198659 - DNA, 252 bp, Homo sapiens
  misc_feature (66)..(66): n is a, c, g, or t
  misc_feature (82)..(82): n is a, c, g, or t
atgtcgcttccattcttctaactttcattgtttaatttttcatgcgtttccagctggtacattatntttctctctccctttncacagtctttacaatttcaaaagcattaagctttgtatctttcacgacccagcaaatctctgtgagtatgaaatctgaactttctctcaaacttgcttctctattacaaaattttaatctatatcatttcccggagcgttggtttaaaaagcaaaacaaaacaaaacaaa

SEQ ID NO: 198660 - DNA, 609 bp, Homo sapiens
gttatcctgcataaatccccagtggtgtggcagctccaaattaaggtcagtgttcccttcacttaccggacacctcaaaattagtaccttgtagaattaaagaatccaccttggaggctgccttccagaagggataatctgactcttgtccaagttgaacaggtttactgggaacaaaacaactgcctctgggtttatgctcgtctgctcttttaagcagtgaaatgcttgtgtccaggagccaagtggcagtaacctttgtgacttcaattcttccaagaataggtgtttcttagtagccctgattgaattagaactcaagtcccagctggttgccttccactggccagaaactggctcctggaactggctcgatggcctggcccgactatctcaagaaagctgcccctcctgcccagcaactgggtctcatccaagggcaccttgtcccattgctgtgttcctttttgtgagaaccccatcctgaaactgcataattgcaagcttagaaaaaaaatagaattgccataagatggggcaaaattagaatagcttttgggtttgaaagttaaaactcattttaagtatgcacagacaattgtctgagct

SEQ ID NO: 198661 - DNA, 466 bp, Homo sapiens
ttcagaatgtgaccgcatttggagatagggcctttaaagagacaattaagttaaaatgaggcttttagggtgggccctaatacaatctgattggccctaatacagtctgattgttgtcccataaaggaaattgggagacagagacaggagggctgtgagaacagaggaaagaccctgtgaggttgtagtgagaaggcagctgtcttattctggttgggctgctataacaaaaattccataaacttgagtggcttaatcctggccattttaataggcatatctaataatgttggtatctcatcacggcttcaatttgcaattccccaatggctagtgctgttgaacatcttttcatttgcttattttccaacccctatattctcactagttgagtaattgtttcttattttagttcagatgtagaacattgccagcctagagtcaaggtaaggaagttgaaattggg

SEQ ID NO: 198662 - DNA, 320 bp, Homo sapiens
tgagaaagtatacatgaaaggaaattcagttttgaacaataccacattgaggcttacatgtacagaaacttaaccttggaattgttgaaacagaagtcctgaaagcccagagttcatctatcccactcttcactgtcagtctgccctctgaggccttctcaccaagggtctcatccagcttctctgcttgattacctctagtgatgaggagctcactctcttacagggcacttccttccatatttgtgcaggtttaactgtttaaaagctccttcgtctgttgaagagaaatgtgtttctttcatcttctacccattgaa

SEQ ID NO: 198663 - DNA, 93 bp, Homo sapiens
gccagcatcaggacctgacagggcacctgggcacctggctcctgagatcagtacccactggcctcccttggttttctggtattgggttttttg

SEQ ID NO: 198664 - DNA, 665 bp, Homo sapiens
ttgggattttcatcagagagtccttttcagctttggaaggagctaataactgatttgtatactggttacaaaaatagagttaactttctaaaatacccctgaagatttcttacagacatttcaccgtcacatatggcagcattcactctgtgctggtggaggaaagaaataccaaatagggattgtggttttctttgttatgagtttgaaggtgctaggcaggaggatgcttgaccctaatacatctttcatgaatgcaagtggtctctggagtctcttatttaaaaaaacaaatctaaggccaggcacagtggcccacgcctgtaatcccagcattttgggaggccgaggggtggatcgtttgagctcaggagttggagaccagcctgggtagtatggtgaaaccccatgtctacaaaaaataaaaaaattggcctggcacggcagctcctgcctgtaatcccagactttaggaggctggtctcaaactcctgacctcaagtgatctgcctgcctcggcctcccaaagtgctgggattacaggtgtgagccaccatgcccagccaagtctgcatgtttaatactgtagctgctccattatatttcatcaaattgcctttttggttgaagctagttccagttgggtttttcacttggtactagaa

SEQ ID NO: 198665 - DNA, 674 bp, Homo sapiens
aaagtgctgggattacaggcgtgagccaccgcacccagccatgcctggaatatttttgtaatggaaaaatgaaatgggagaagtcactgttcctggctttgaggcttactctgaagccacaaatcaacattgcggcgatggcagacagacgcgtctgtggagagaagagaggactcaggccacacaagagagaccagcggagctttgacagaggcagaaaacccgttcatcagatggtctggagcacctgggcagcggtaggcaaagccctaagccctcgttctacagaacagctcatcagaatgcagggcctttaggtgaaaacctttgtggcctggggctgggcagagttcgtagactcgccacccaaaccacacccataagaggacaggtggacccaacttcagagctctgagcatctgagctgcggactgggagaagatatttccaaaccacctatttgacaaaggactcatctacagaatataaaaatacagtcaaaaacaaactgaaagcaatccagttagaaaatgggcgagagcgcagggtcctctgcctacgaaaaccagagacctttgttcacttgtttatctgctgaccttccctccactattgtcctgtgaccctgccaaatccccctctgcgagaaacacccaagaatgatcaattaaaaa

SEQ ID NO: 198666 - DNA, 133 bp, Homo sapiens
tggctctatccttcactgttgataaatactaatgtatttattagcttcctagatactgtgtaggtcacaaaataattatgctatattttaatgttttgtattcattttttagtgtatggagatttagataagg

SEQ ID NO: 198667 - DNA, 526 bp, Homo sapiens
caaacatggagtttgtcaataaaaaagttcaaaggagaaaattacctggaggagacttaatgtcaagcagggataccattggaagccccaaggaatgtgctactgagtctctgatcctggtgctgtttttatcagccgatatgaacaaaaggaaaataagtgcagatgggcaggcaacttcctccaagcactgcctggtggaatacatggagccacttggctgatcttcacggaggagatcgcggatgtcttagttccctgactaagccagagtgcttctgaagatccaatgagcatctggattcattcagtctgcatactgctggaacaaccatgcatttgaaagccatacagacccagattcgaattctggtctgctactcagttgtgtgatatgggcatgcattgccattcctacaaactctggcctgtctcctcatctgtaataatctggtacaataagctgggaggaggtattggagtaagtaatccatattctttcctcttgtataggaaaaaaaacaca

SEQ ID NO: 198668 - DNA, 436 bp, Homo sapiens
agcttggctgggggccaggggttcttccccagccatgcgtttggagccccaggcaggcaagatcctgccatattccacacatagatataggtatctctagtcagcagaagggaaaaggaaatgagtagatcaggtatgtggggcagagggcgcagttatgaagaccctggaagcaatgtacatcacttctccccacattccttggccagagctcatttgtgtggctccccgttggacgcacagggcagggagtgggggtgctggaaatgtatgcctaggctgggaacccactttctagaagcagcattctgttccatcataggggagcaggaatcgtgcagggacagctggccatccctggcacacaacggaagacggtggaggacgctgctcttggtggcgaggaagtgaaatttgtctaagctctgaggtcaac

SEQ ID NO: 198669 - DNA, 869 bp, Homo sapiens
gacacagcccctcccctcctgaccagcagcccatctacttcagagagttccgcttcacgtctgaggtccccatctggctggattaccatggcaagcacgtcacgatggaccaggtgggcacttttgctggcctcctcatcggcctggcccaactcaactgctccgagctgaagctaaagcggctctgttgcaggcacgggctcctgggtgtggacaaggtgctgggctatgccctcaacgagtggctgcaggacatccgcaagaaccagctgcccggcctgctgggaggcgtgggccccatgcactcggttgtccagctcttccaagggttccgggacctgctgtggctgcccattgagcagtacaggaaggatggccgcctcatgcgggggctgcagcgaggggctgcctcctttggctcatccacagcctctgccgccctggaactcagcaaccggttggtacaggctatccaggccacagctgagaccgtgtatgacatcctgtccccggcagcccccgtctcccgctccctgcaggataagcgctctgcgcggaggctgcgcaggggccagcagcctgccgacctgcgggagggtgtggccaaggcctacgacacagtgcgagagggcatcttggatacagctcagaccatctgtgacgtggcatcgcggggccatgagcagaaggggctgacgggcgccgtggggggcgtgatccgccagctgcccccgactgtggtgaagccgctcatcctggccacggaggccacgtccagcctgctcgggggcatgcgcaaccagattgtccccgacgcccacaaggaccacgccctcaagtggcgctcggacagtgcccaagactgagcc

SEQ ID NO: 198670 - DNA, 858 bp, Homo sapiens
ggtaacatagtgagaccctgtctctacaaaaaattaaaaattagccaggcatggtggcatgtgcctatagtcccagctacctgggaggcagaggcaggaggatcatcgcttgagcccgggaggtagaaactgcagtgaaccatgatcacgccactgcactctagcctaggtgacagagcaagaccttgtctcaataaataaataaataagtaaaataaaataaataaataaataaataaaataaactaggcctgtcccaaggaaaccaggatttatgatcaggtgactcctggcttcattttaaatttcttggacctgcctgtcttctcctcccacaaaacaccctcaacttacaaatcagttctcactctcagtatctactgcatttagtgaaagggatgcaagagagagtgttgcatggtgagaatactcttccttaggatcattcctggaagagactcagcacactgggctggaattacaggccaggatacagattagttctgacagattaaatggaggctgggataaaacgatgggatgaaagagtaattcctccttctgtcttcttttttccatacttcagtgactttctaggaggaaactatggagcttaaactgaagaatgaaaaatcttttgactacacttttagttaatcctttcaaaaataatgttgagccctgtgtcctttctctaataaaattaatgtttgcaggagtgttttttgtatcatcatgaattgtggaaaaaatttgtaaaccacattattatataaatagaagtcctggccaggcatggtggctcattcctataatcccaacactttgagaggtcgaggcaggcagatcacttgaagc

SEQ ID NO: 198671 - DNA, 567 bp, Homo sapiens
aaaaatagaatggatttttaaaaaaacttacattctaattaggtctcaatgctgcagagaaaatagtgtaccagtgcaaactctacactgtggtataaggcacaggattttcccgctgcgcttccaaggatagggtcatcctattataactgtttaataataggggattgtgtgtattttcttatatatcttcttgcaattccatgtttctgaagtgtgagattcaggtcaaggtcaatgtgtggccagttgtttataaagtattaagaatctcatgaaggagaaatacagtttagatgtagattttcttacgataactcaaattatgtttaaatgacaaaaactaggtaggtattgaggaggtaaatatctctatttttcatttcttaacattacactacaatatgtgtaatatttagaatttgaattaggaagaactttaacttttttattccttagggtattactgatctctaaacaagatgtttaattagcagaattatagcatcttagataaaattggttatttttaacttaatcacgtagttgatgctacagaaatgaatt

SEQ ID NO: 198672 - DNA, 677 bp, Homo sapiens
gctagatagatgacagatggatgataggtagatagataattgataaatagatataaatgaccgatggacaggcagacatagatacattgattaggtagatgatagatggatagatagaagatagatggtggatgggtgggtagataggcagatagacagttagaaagatagatgatagatagataggaaggaatttattaggggaattggctcataccattgtggaggccaagatgtaccacagaaggccgtccgcaagctggaggcccaggaaagccagtatcgtggctcagtccaagtctgcaggcctcaggactgggaagctgttgatgtaactcttagtttaaggccaaaggtttgagagcctggggaactgctggagaactgggagttctaagtccaagggcaggagaggaaggcatcccacctccaggagaaagagggaattcaccttttctctgcctttttgttgtctggcaatggaatggtgtcatccatattgagggaggatctttaccactcagcccaccaactcacatgcccatctcctccagaaacaccctcacagacacacccagaagcgatgcgttaccagccatcccttaatccagccaaactgacacctgccgtcagccaccacacaggctcagaagaatcgtggttgcatggtgatggtc

SEQ ID NO: 198673 - DNA, 459 bp, Homo sapiens
ctactagtaatccatagtggcatcatctttcaagtccaaaagatgacaatatgtgaaaagaaaaaaagtggtagaagttagcattaattattcatatagcagatagtcttgacggagcagagtataaatagaaaaaagaaaaatcaaagagatgttcttcagagtttctatgttccaacaggttttgtgtgtaaggggccacttgtctccaatgatcatacccgtagaaaaatacagtacccttcgctcttattggaagataatggtgctgagaaacctagtttggtgatcaagccctgttcgcacaacctactaaatatgtatcccttaactctttgcaatttccaattatcaggcaaccatgcatgatgtaaggaaggttagtgtgacatcacttaagaatcttttccttactttaacttgtataaggtattaccttaagccagcagtccccaatcg

SEQ ID NO: 198674 - DNA, 458 bp, Homo sapiens
agaaaaatgggctagatttaaaagggcatgtcactgaaggctacctaaatatccaattaatatttgaaaaggtgtttccttactaatttcatcagtaatcgggggatgaaaagcaaaaacattactacgcactctgcaaatggactcagatgtgaaagactagaaatcccacgtataggcaagaatgtggaacaatggaaactatcaaacttgtggtagaagtgtaaattggtacaagtattttagaaaactatttggtattatctactgaagtttaatgtaatactatgacccagcaattctaggtatatatcctcagaaatgtgtgcacacgtggaccaaaacacatatacaagagtttatggtagtatcacttatgatagccccaatgggtaaaaacccaaatgttcaacaatagacagacaaattttggtatattcatacaatggaatagctgc

SEQ ID NO: 198675 - DNA, 614 bp, Homo sapiens
tctgttcaggttatgagcagttgggcatgttgactagaatatcaaggggtcacttgtgaaattgtaagtttcatgggtagcgaaaagagatctgacctagaaagcattgtgctgagtgctgacctcttcattctgttttacgttaccccatccctgcttctgtagcacctgtctgtgtgttctaattattggtgtccttgtctttctcgcccatggaaacttgagggcaaggaccaagtctcatttctctatatgtccctggtgctgaacacagtgaccagcagggtgagggaacacgtccatgagcacacgaatgcttctttcggcacaagtgcctgaggacatatcttcatgcctcacctctacaaaagaaagaaagaaagagagagagagagagagagagagagagaacgaaagagagaaagaaagaaagaaagaaagaaagaaagaaagaaagaaagaaagaaagaaagaaagaggcatagtagttgattgctaagtgttctctgcttgtttgatgaaacacctgccttcaggaagacaatttctgacagatcgggctctctttttgttagtactgtgtaagttctttatgtagacgagtgctgtcgagt

SEQ ID NO: 198676 - DNA, 421 bp, Homo sapiens
cagctatcataactatgctcatcaactaaaaaggaaactttcagataatatgctttgctgaaatgaggaagtaaatgaggaaggaaatgagaaagagcagaaatggggtcaagaaaacaacaatccagtctgggcacggtagctcctacgtgcctgtaatcccagcactttgggacaccaaagtgggcagattacttgagcccagaagttcccagccagcctggtcaacgtggcagaaccctgtctctgcaaaaaaatacagaaattatccagatgtgatgatgcacgcctatagtcccagctactcaggaggctgaggtggaaggatctatagtgcctaggaggttgaggctgcagtgagctgtgatcacaccactgcactccagcctggatgacagagtgagaccctgtctcaaaaaaa

SEQ ID NO: 198677 - DNA, 784 bp, Homo sapiens
ggaaatggtttctctcggatgcctcatctcctactactttccccctttgcagcttctgtctactttctaaactgggataaaggagagaaaaagtttatttttcttaaagccatgctcagttctgtctaaatcagaacagggtcaccattgacaccactctcacccttggtaattcttcatctctccagtgtgaattgaggaatcctttgagtcttattatcaagccagggaactttatgaagcaatccactcaggtcttttatatcactgcataacttctgttttcactgtgattaaaataagataattgaaggtgttcatgtgtcatactcaaaacaattttgttttgctggacatatcctaatgaccaaggattttgtccttttgttttttgagatggattctcactctattgtccaggctggagtgcagtggcacaatcacggctcactgcagcctatacctcctgagctcaagccatcttcctgcctctgtctcccaagtagctgggactttaggtgggcaccaccacacctggctaattttttaaattacatttttttgtagatacggaggagtcttgctatgttgcccaggctgatctcagactcctgaactcaagcgatccttccaccttggcctcccaaagtgctgaagttataaacatgttgccactgtgcctggcttattttgtctctttttttgatcccaccctatccctttgagtgtggtgagatgcatgggaacagaaggctgtattccctcaaatgagttaatttggaaa

SEQ ID NO: 198678 - DNA, 396 bp, Homo sapiens
cttgctcagatcagatactcagtaaaagatatgaggaacaaattcagaaagcttaaagaacttgcctctgagtcatagcattgaagtgatagaacttctaattggggaaacttgataagtttaatgccactccaagatggctgtattacatattcaaatctaagaaatcttcatatacaatgacagaaattagggtgaataggattggtttaggatagaacttcaactgagaattaagccctaaggttttaaggcatacattgtaatgaattcatttatttcctatgcagctagaaggtactagctgtgtacattattgggagatttgcaatgtagtcactcatcgttttctttggagcttaattctcttgtggaatcctgattgggaaaggctgg

SEQ ID NO: 198679 - DNA, 331 bp, Homo sapiens
ttcactgagtgcccactgggttatattctgggagccgaggccacagcagtgaacaaagcacacaaaaccccccgccccatgggggctccgttctagtgggtccatttatcatcaaacatctattaatatctctagaatgtgcccatcaggacaccatccagatgctgctgcgcttttccaggccacacagaggggacaccctccaggtgcatcctgcatgaatatcaggctcaaccgtgctttcagggtaggaagcagagggcatttgaagagtcctttcccttccttcattcatttgttgtctccttgaataaatgctgttgaaaaccta

SEQ ID NO: 198680 - DNA, 474 bp, Homo sapiens
tttgatgtagcatacctttcttgaatacggtttagaatcttcctgctggttggtcttatttcaatagatgccttctttgctgaaatgaaatccttgtaaacaaggagtgcagaagaaataccaaagcaaaaaactaaagctcaagttgaagctttgcaaccaggtcttgaatcctaagaaggcactgctcagacgggctggtgttccacaaccaaccacaattatttgaatacaaataattcattcataattcatgaggccattttcattttacacattttaaacctttacaccttttagttggggaacttctaaacttacccaagattgagagactagtagaattaaccatataatgtataatatagctgcagacagataatgtataatgtatctgccacccagcttagacaattattaccatgttgccaatctcatttcaccaaccagtgtgaagagaggggtaccgagctc

SEQ ID NO: 198681 - DNA, 266 bp, Homo sapiens
tgtaatcccagcactttggaatgccgaggtgggagggtcactcaagctcaggcgctcaagaccagcctggccaacatagtgagagccctggttttttcaaaaaatttttaaataaattatctgggtgtagtagtgcacacttgtggtcctagctactcaggaggctgaggtgggaggatagcttgagcccaggagttcaaggctgcagggagccatgattacacttctgcactccagcctgggtgacagagtgacaccctgtctca

SEQ ID NO: 198682 - DNA, 323 bp, Homo sapiens
tccctctcctccatctgctgacaaccaccatcctactttctgactactctgggaacctcatacaagaggaatcatacaatatttgtcctttcgtgactggcctgtttcagcgcaacgtattcaaagttcatccatgttgtaacctgtcaggatttccttcagcatcttaaaaatataatttgaatatagtttttttttttttttcaagaaaccaactatttacaaccattacaaagtcctacaatctgccacatcagttttacacagggaagggaattagaagaagggaatcacgtcaatcacagacatcctgtcgagcatgt

SEQ ID NO: 198683 - DNA, 796 bp, Homo sapiens
agagaataaagggaggaaacacgaactgaggtggggtgcaggagccaaggcaggccctcaaagtgtgcatcgatgccttcaaaagccagctgcagtattcggccacctgcgatccctgggtgcccgccatcagcccttgctcctctctcttgccttggataggacagaagttgacacttgggggctcttggagaaccatttggagcacgtggaactcaagagtgaatcacttattttttgctgtgtggcagcagggcctccctagacaggacatattcgggggcttgcagccaggtaggggagtggaagtacctcctctcaccccacacacgggaattggagatgaggcagccgatcctgcctgcttgagtctcagctgtcattttccaggctggcagcaccagcaggagaacccgtgtgtccgccgggctttctttaaaatgcaccgagtgcaacccagtcctccttgtgtaaactttctccaactggccagatggtttgcttctatttaaggcagtgagagtatttcctacggcctgctgccccctggcctttgttttgccccgggaaggccattcctcgaaagggaagctgagcaggagttgcacttcccagcagcagggattgtcggcgcccacccccatggcaggcctagaaccctttgccaagtgcctctgcctggagggaccgtgtttgtaacttgactccctctgtcccttccaaatctgcttgtgctgtgttttcttagatggtcatgaagtctccccctactctcccagcccagttccagctccgc

SEQ ID NO: 198684 - DNA, 302 bp, Homo sapiens
attgcgccactgcactctagcctgggcgacagtagcagactccatctcaaaaataaataagtaaataaacagttaataaggttctgaaaaataagtaaagtaatagagatagagataaaattgtataattgctcagggaagcattacagcaggatattccccctgaatgttaacttcagctgaatagttgaggattgtaaactccgctgaaggagttcttagtacaatttaaatagccttaccagaagcacaccaaccaatgttacctcttctagtggtaatgtaagcatactttaggcaat

SEQ ID NO: 198685 - DNA, 730 bp, Homo sapiens
taaagttgtgacagggttgtaaagcaaggtaagaacaatctcatgagtcaaatgaaggtaagcgctcctggaggcaagggagtctctatgaagaggaatcagtattttctgagtcaatcaaattaaatcctttcatgtatcccattttagtttggggggacactactctttcattatcaaactcttactttcacatactacacaagactgtgaattcagctgagtttggaatttggaaacctatataattaaactttgaatttgatctttgactatctcaaccctgtggctgcaagaaaggagatattcttttagctggttttcaatctatgccctaaattagaattttgagaatgtcattccttttttatttagctgttcagcgtctttagaaacaacacctccagcccattcctgataccaatttataagagtcaggatttttagctagaaacaaaaaataaccaagttcaactgatgaagcagaataggacattattacaaggatttgggggtagttcatagaatcattaggaatcctagacaattagggacagggctttgcaccaaaaactatgctcaaaatcacaccatagaaatgatctaatgagaaccccactgtggccttcaccaaacaaaagttgttgcaacctgcactgcacacagaactggctctgtgtactaaatgccactaatagcatagcttccattactgatacaaagtttagtc

SEQ ID NO: 198686 - DNA, 482 bp, Homo sapiens
gtaaatagaaaaaatataactaaatggctcctaggtccctgctagcgctaacttctcgtgtgatcagtgcttctaaaattgcaatgtgtccaggtggggaagttcatttaccccctatctggtttacgctcacttaagggagtgatttctttcctctgaggctctcatcttgcccattattcagagtgagctgcctcctggtgtgctgtcaaaatacatcagcttcaaagacaaacacacacctttcaatcccagtccaagagagtttactgtataatttatgataatgttaagtctgtttctcataaatgttaatggtgctacattttttttcatagatgggtaattctcagaaaagcagctggatgttaaaagttacttttttttttttttttaacataaactgcctcagccaacaaatctgattaaaacaaaactctccaggattgcaaggcacaaagattctgctaatgttagtaagt

SEQ ID NO: 198687 - DNA, 502 bp, Homo sapiens
atctatcagctcaaattaggtgataaagctaaaataagtaggaaaaataagtataagggtatacagtatctaagcttacatgcctttagcacgagacgaaaaaaattaaaatataataataacaaatatatgggaaaattggaaaatcaaactcaatattgaacgaagttagccacagcctgagtggggcaccagattgaaatcaattagaagaattaattaatggcatatcttgaatccaagaaagaccaatcacctataagggattcaacctgttcattttgcagtgagaaaaatcactcttgatagtcacagctttgagttttatacccttgcccaaatattcagtcgatatgtaaatttagctgttgatgtggtaattctaatatgcttgggatgatacagttgttttttttagtgagttttcgttgaaatctttttttttttttaaccctggaaagattcagacttttgtacagaaataataaagcttactttacta

SEQ ID NO: 198688 - DNA, 312 bp, Homo sapiens
tctttcttcagcccaaaccagttttatcgctctgtgatttcctgtggcccttgatctatgccagtggctcatatacttggttcatccagggatcctttcaaaatcctgatacccacattgggctctaggacaagatttctcaaactcagcactattggcatctcagaccggatcacttttcattgtgaggggctgtcctgtgcattgaggatgtttagcagcatccctggcctccacaccactaggtgccagtactcctcccacccccaagtggagaaagccaaaaatgtctccagatactgtcaaatatcc

SEQ ID NO: 198689 - DNA, 726 bp, Homo sapiens
acctatagtcccagctactcaggaggctgaggcaagagaatctcttaagcccaagagtccgaggctgcagtgagatatgatcacaccactgcactccagcctgggtgacagggctcatccctaaaataataggactcgtctctaaaaataaatgcatgcagtcattcatttattgatcactaattatgtaccaatcactgctttacactacattttacttgttttatatcttctaatcaaattacaaaccttatagtgtgagaattatttgaatctccatttacaaatggggagacaggtgaagagaggttaattagcttggacaaagttacacacagatttcaaaccctgagcttactttgctaactacttccttgaggacacagcttagacctgtttcatggaggcacaaataaagacatgcatattaacagacacacttcattatctgaacatttctttcctctggaatacataacccaaaatgaaatgatataatgttctctttagtgagaagaggattctttgtcatgttcttggcctatttaaagccctgtaatgcagtcctaatatctcacatatccgtacagctgctaaaatcatctttcatgcgtagcactttgatttttgtcactctgtgttctgaagcctgccagtcgttttgttctggcatatggcatcctagaagggcaaatcctaattaggactattactactatattaata

SEQ ID NO: 198690 - DNA, 630 bp, Homo sapiens
gtggccttcctccacctcagctgcaagaggctttcctcttttactaatccacctcagcacagaccctttacgggtgtcgggctgggggacagtcaggtctttctcatcccatgaggctatatttcagactatcacatggggagaaagcttggacgataccctgctttcaagggcagaggtccctgcggctttccacagtgcattgtgcccctggtttattgagactagagaatggcgatgacttttaccaagtatactgctgatggacacgcccccactgatattgtttttaatgcagcgtgggaggggaggatatgacacgcgatatcgcaagtagtagaaacacccctttgatagtgttcttaatattcagggaggaagaagatgatgttactcccaatacagacggatgtacaccctctgtacaccgagggtgtacacccgtctgtgaaggagttcgtaatctccagaggtggagatgatattactcacaatatggtaaacaggctgtgagtccatcgcggatcctcagagccaggtggggaagaggggctggctgtcagtcccctcctcgcggggggtgcctcccccactgctatggggatcccaagagccagtgggggaagaggt

SEQ ID NO: 198691 - DNA, 224 bp, Homo sapiens
gggaggagggcggagaggaaggaaagtggagaaaaatgcagactcagaagcagtccatataacagctcaaaaagagctagccggcgatattatcacaacgatacagtacaaatcaaagcaaaaataaaaataatttggccgatacagcaggctacactgccaagaacccagatggcggccttcctgcggccatccgcacgggcctcctcaccccccatctctcc

SEQ ID NO: 198692 - DNA, 466 bp, Homo sapiens
ataggctataacatagagcctcggtgtatggcaggctatgccatctaggtttatgtaggtatactctatgatgttcatacaataaaatcacctaagaaagcatttttcagatcatatccctaccctatcattaaatgacatatgacttcatatatattcattctgtgaaagaaacttaactcacgtctaagtcaatgggtgaaattactgacaactcttatttctatgaactcaggatgagtttaatgaatgcatttccctcactctattctggtctgcaagactggacacaatacaaagacaataaatatggatggtttatggggaaataaatcatactcttttcaggaagataatattaaaaagtaataggattttataacttacatttacaatttttattagagatatgtacactactgtttctgtattttgtctaagaaaacatgaatctaaaattggtaaa

SEQ ID NO: 198693 - DNA, 280 bp, Homo sapiens
aactctgtctcctgggttcaagtgactctcatgcctcagccaccctagtaactgggattacaggcacccaccaccacgcctggcctcgtatttttagtagagatggggttttgccatattgcccaggctggtctcaaactcccagccccaggtgatccgactgcctcaccctcccaaagtgctgggattagaggcatgagccactgcgcctggcctggtgactaagtagttttctaagagattaataaagccttgggaaattggaatggggctcatttta

SEQ ID NO: 198694 - DNA, 337 bp, Homo sapiens
gggcaacagagcaagactctgtctcaaaaaaacaaaaacaaaatgaggttattagaatgggccttaatctagtacgactggtatccctatgagaaggggaaatttgaaccaagacacacacacagaataccacgtgaagatgaaggcagagatctggctgacacgtctgtctataagctgagaaataccaaggcttgccactagaccaccagaaccaggagagaagcgtggcagattctccctcacagccttcagaggaagctgactctgctggcacttttacctcaaaggccaggccccagaactgtgaaataatacatctctcttggttgagcca

SEQ ID NO: 198695 - DNA, 127 bp, Homo sapiens
ctgacaatcctcagctgccaaacatccctggaatggccttctcctaggcatcttgtcccagaagagaattaaagcctggattaagtaaagttaaatatataccaactctatgacccaacaatgtcac

SEQ ID NO: 198696 - DNA, 406 bp, Homo sapiens
cactttgggaggtctcagtgcctgaggatgggcagagagacttggttgagctgacatgtttgggactctgaccatgtgcctggtcttaaacgggtggtcatgacctcctgttacagtagaggccgtgcagtccttagcaggggcagacgcacctccgggtggtcgtgacctcctgttgcagtagaggctgttgcaatccttagcaggggcaaatccacccctgcaatctggtcccatcttgttccattttcaagggccttgctcttcaggttcccccttcccccttgtcatctggtctgagggagcatgtccacccccagcgcaacacgaacagcagcagccaggctttccctccctcccgccatctcctgccgctctgccttccttgccagcctcactctgctct

SEQ ID NO: 198697 - DNA, 697 bp, Homo sapiens
gatgaccagaggtcactttcattgccattttccatttggtgggttttggccggcttctttacctcagcctgctttatcagcaaggtctttctgacctgtatcttatgtgacctcctatctcatcttgtgatttagaatgcctaacctgcgaatgcagcccagtaggtctcagccttattttacccagcctctattcaaaatagagttgctctggttcagatgactgataaattgattgaatattgcttaccagtggtttgagcttccttgctgtacttagctagtgttttattaagtaaggctatgtttgtactaggaacactaatttctgaaggggatataaatttttccagtttatatgagcagcacttagtggtcattaaattggatactactacattaagaaactaccattgcagaattctctatgagtatggcattataatccagattggtttaaaatgttagctaaactgaatcaaagaaactgtactgagttcctattaagcagctaacttgtttatgttcaattgttgcttagaagcctttgtattctgtttgagttgttaaaacttcagacaaactaaattcaacagagttaactgaacaaagaatgatttgcagatcagcagcctctggaactagaataggttcagagtgactctggggtagctacatggttggatagtatttgtgg

SEQ ID NO: 198698 - DNA, 433 bp, Homo sapiens
gcccacctcagccttccaaagtgctgggattataggcatgagccacagtgcctggcccaggctgggatatattttatatcctggacttttaagtcacaattttacaaaaagctctgcagatgagttttgaggatttgctgagtggggtgcactgcctgcctctgagttttgaggggggctcacgtggtttgggcaccatcccggcctcaccccagcaccccctaacccccggagtgtgggtgcgagtggcactgacccaggagccctgtcctacctggatgttgatctcgttgtgccattcggtgatctccaccacttcctgctccaacagcttgcgtgaacgctcgctgccctccagggctgagcgcacctcctccagctccgtctgcagcaggctcaagcgccgctcctgcaggttgtactgcttccgcag

SEQ ID NO: 198699 - DNA, 251 bp, Homo sapiens
tctaacttcccaccttcagcaagcccaaagggtattttaattttgtccccatgtggcataaaagtacaagctcctttgctagaggccaaaaagctactacagagtagctgcagccttgttcatgttttctgctctgaatttttgtcctctctttttcctagtctccctggattttctttactctctttagttttggactgtgaattttaaaaagatgctttcatagcatctttaaatcaagcatttttagg

SEQ ID NO: 198700 - DNA, 435 bp, Homo sapiens
tgggtggggacacagccaaaccacatcagcagggtagtggtagaaagagcatcaagtgaatttggccctttgtaaacgtataaaaagacaacaatataattacagctgtcttattaacttttttttaaaaactttctattttgaaacttcaggcttaatagaaaagtttaaaaaatagagaattcccatatccccttccctgagctttccctgtgttaaattcttgtataaccataatagagttatcaaaactaagaagtcatcactggtactgtataattaactaaactacagagtttatttggatttctccaatttttccactaatgtccttgttctattccaggattcactgcaggatcccacattgcacttacttagttgttgtatctttttggtttcttcagaccagtgacagttcctcagtatttccct

SEQ ID NO: 198701 - DNA, 827 bp, Homo sapiens
  misc_feature (710)..(710): n is a, c, g, or t
  misc_feature (722)..(722): n is a, c, g, or t
  misc_feature (816)..(816): n is a, c, g, or t
cagtaggagttagttagcaaagagccgaggccgggcgcgcgaccctcgtccttctgcccctggccgcacactttgcgcacatctctttttctgcatggtggatattatttttcattatccttttctgggtgctatgggtgatcattccaagaagaagcccgggacggccatgtgcgtgggctgcgggagtcagatccacgaccagtttatcctgcgggtgtcgcccgacctcgagtggcacgcggcctgcctcaagtgtgccgagtgcagccagtacctggacgagacgtgcacgtgcttcgtgagagacgggaagacctactgcaagcgggactacgtcaggctgttcggcatcaagtgcgccaagtgccaggtgggcttcagcagcagcgacctggtgatgagggcgcgggacagcgtgtaccacatcgagtgcttccgctgctccgtgtgcagccgccagctgctgcctggggacgctgcgggagcacgagctgctctgccgcgccgaccacggcctcctgctcgagcgcgccgcggcggcagccgcgcaccccggcccgcttcccggcgcccgcggctgcatctgcccgacgctgggtcgggccggcagcccgcgtgcgcccgcacgtgcacaagcagacggagaagacgacccgcgtgcggactgtgctgaacgagaagcagtgcacactctgggactgctacgncgccaaccgggnccgagctctcatgaaggagcagctggtggagatgaccggcctgagcccgcgggtcatccgcgtctggttccagaacaagcgctgcaaggacaanaagaaatccat

SEQ ID NO: 198702 - DNA, 412 bp, Homo sapiens
aatatattttctgttactaaatgtataatctatagtgaaaacaaacatatcttcagcacatgtaaggcaaagcttttaaaaatataaagagaatttagcaaaaggacaattacaatgaaagattttaaggtatcactctcactctatgattggataagttatcaaaaatccataacagcaacaaattgaacaaaacaataagatgattcactaaccaactttgaatcctcatctgtctccatatttcaggccaaaaagagcattctaataagtcccaaaaggtaacctttgatatatgccatagtctgttttgcataagaaaggaaggaaagggaatggaggcaaggatgaaagaaggaagggggaatggaggaagcaaggaaagaagaaaggaaggaagaaaggaaggaga

SEQ ID NO: 198703 - DNA, 470 bp, Homo sapiens
cagtaaatagttctgcaggctcaagggcttgggaggggaccaaggcattcctagaagtttaagaaaagattccattgtctccatttcctccctccttgtccatgtgcccatgttcataaaaagataaaatgatcttctgggcatccatcagtgaaaaagagtttttttttttaaaaaagtctctgaggccaggcgcggtggctcacgcctgtaatcccaacagtttgggaggctgaagcagatggatcacttgaggtcaggagtttgagaccagcctggccaacatggcgaaaccctgtctctactaaaaatacaaaaattagccgggccgtggtggcgcatgtctgtaatcccagctactcgggaggctaagggaggagaatctcttgaacctgggaggcggatgttgcagtgagctgatatcaggccactgtagtccagcctgggcaacagagtgagactcgtctcaa

SEQ ID NO: 198704 - DNA, 436 bp, Homo sapiens
caatataaatggtagtccatttgcaatctgttccactttatgggcaccacttgtaagtcatggtagctgggcaggttggggtggagggacaggaaagctaaggccaatagcagctcctgtggtggtgtgtgtgtctgtagcagtgcaggtgcttcgaggttccctgggcccaagaggacgaagggtctgcaccaactgatagtggcacccttgggtagtttgaattaattacctgttatgatcagccccctttgataaaagttttagggtgttccggaaaaccttgtcactcggtgatggtttggtgtaagggtctggttagagcaggatcagatgatatttacatgtttcatatgctgtaacagtacaattctgatacttcagacagatatttaagcaattcctaacagtacattttaaacatcaaattgaacca

SEQ ID NO: 198705 - DNA, 545 bp, Homo sapiens
ggcagggatatgggggaccccagtggcctggtcagtctgtcgtctgtgacgctatccacgacctgtggccagatggccagctacccactgactctggtgcgcaccaggatgcaggcccaagataccgtggagggctcaaatcccaccatgcgcggagtcctccagcggatcctggcccagcagggctggctagggctgtaccgaggcatgacccccacgctactgaaggtcttaccagcaggtggcatcagctatgtggtgtacgaagccatgaagaaaaccctgggcatataggctgtgagctggacgacacagcctaggcagaaatgggacaggaggacctgatgacccctggccccaaagagccctcgaggcctcaaggttcaggccctggggcagtttttggtggcaaaagcaggctgggggtgggggtggggctctgggtcagaagattcctgaagctggggttggtggtgggtggaggggggcagtgctgggtcagaaaactcctgggactccctccccagggtgcagcctgagacaag

SEQ ID NO: 198706 - DNA, 312 bp, Homo sapiens
tccctgttgaacatgctaagctcaattctcaagtattccctagttattaataaatagcagaaatagcaactttgactgtatggcacttccatgttaaaagtgcattctcatttcactgccagcaaactctgtcagtttattaaagagctaaaaatgaaccctgaactgatttgatctattgcctagaaaatatgaaacaggcctaaaaaacaaatcttgtattattttaccacattcgatgcaggtttaggtaatatcaaggctgacaggtcagactgcttttcctttctataaacaattgatgccaaattt

SEQ ID NO: 198707 - DNA, 341 bp, Homo sapiens
tcgcggctgcctagaggttccatctcagatgggttgtcacgcaggagtaactggaaattgataccactgcaataaagatgccaaaaacaacaaaatatttcagacactcatgacctctcttcacagcagcctcatctacattcaaagaaaatgtggttgttggagcctgcaggaaacaaaagcctgcccggggctgaaggctcatcagaccatctccaccagagagggcaccagtgcaggcacgcagccatactggctttacagcctataaaagctgagatctccaactttcagaattgtgaaagtttccccacaatgaattcggtttcactattgggctt

SEQ ID NO: 198708 - DNA, 1317 bp, Homo sapiens
cacctcagcctcccaaagtgcagggattacaggtgtgaaccactacacccagcagttagtgcaatttcattttaatacaagtgaggaaattaaggtatagagataagttacttgtaaagtagaaaagctagttagctgaagagcttgagttagtatcttaggcttttatattatttcttcccactattcctggcttccctggtcctcaattttaatttgtggccttaagaagcctggggtgccaaaaatgtttggggctatctgtatttcatgttactccttagccttttttttttccttttagttcttcaccactgcacacttggcaggatgtatcccattttaaaacttgacagtccatctccttcactcccatactgtagggctaggcaagcaaagcaaactgattctgcaatgcttctaatagttattcctgctcattattttagctagatgtattctaaagtctttatcccaaagagttgaatcaaaggttcttccactcctccaacctgattgtgctgacaagccactaagctgagccatctaatatacagggtggcagggatgaagtcaccgttactgtccaacagcttttattttaagctggtgtgggctgggcatatcaaagacaggcaaagaaaaataacttggagagttgccattgaggatatatccacagtgagccaacagcacccacacaagcagccctcgtctgtataatgccctctactgggtcttgagggagattaaaaagaaagatctcttccatcctggggaacctgagatatgacagcagcacacaaatacaggcagatttatagttctaagcagagttccagtagctaagctaagggaaggagagtcaggagataagctgttagctgaattttattaaagacagatgacttcactagtaaagataaagtgggacctcccgtggttgggctgcaatattttaagtcccaagtgactgctgaatactcgctttgcagttggaaaaataagctgtttttggccagataaacagtgtaagaggtcatctctgctctagaggaacatgtaacctaattgagacacttctacatataatgcaagatagcatatggttagtcaagtagtagaattctgagaagagaaaatctgactggactcattaggtaaacataagtggtggaaatggacatttaactgggccttgaaaggtgggtagtatttaaacagtgcagttacttaataagtgtccacaatatgcctggcattgtactaaaatacaaggtaaattgtatgtggctgcctctttcaaggagattacat

SEQ ID NO: 198709 - DNA, 1342 bp, Homo sapiens
cacctcagcctcccaaagtgcagggattacaggtgtgaaccactacacccagcagttagtgcaatttcattttaatacaagtgaggaaattaaggtatagagataagttacttgtaaagtagaaaagctagttagctgaagagcttgagttagtatcttaggcttttatattatttcttcccactattcctggcttccctggtcctcaattttaatttgtggccttaagaagcctggggtgccaaaaatgtttggggctatctgtatttcatgttactccttagccttttttttttccttttagttcttcaccactgcacacttggcaggatgtatcccattttaaaacttgacagtccatctccttcactcccatactgtagggctaggcaagcaaagcaaactgattctgcaatgcttctaatagttattcctgctcattattttagctagatgtattctaaagtctttatcccaaagagttgaatcaaaggttcttccactcctccaacctgattgtgctgacaagccactaagctgagccatctaatatacagggtggcagggatgaagtcaccgttactgtccaacagcttttattttaagctggtgtgggctgggcatatcaaagacaggcaaagaaaaataacttggagagttgccattgaggatatatccacagtgagccaacagcacccacacaagcagccctcgtctgtataatgccctctactgggtcttgagggagattaaaaagaaagatctcttccatcctggggaacctgagatatgacagcagcacacaaatacaggcagatttatagttctaagcagagttccagtagctaagctaagggaaggagagtcaggagataagctgttagctgaattttattaaagacagatgacttcactagtaaagataaagtgggacctcccgtggttgggctgcaatattttaagtcccaagtgactgctgaatactcgctttgcagttggaaaaataagctgtttttggccagataaacagtgtaagaggtcatctctgctctagaggaacatgtaacctaattgagacacttctacatataatgcaagatagcatatggttagtcaagtagttattcctgctcattattttagctagatgtattctaaagtctttatcccaaagagttgaatcaaaggttcttccactcctccaacctgattgtgctgacaagccactaagctgagccatctctgctaaagatacaaaaattggctgggcatggtggcatgcgtctgtggtcccagctactcgggaggctgaggcaggagaatggcatgaaccccgggaggt

SEQ ID NO: 198710 - DNA, 402 bp, Homo sapiens
tttgaagtaacctaacgatctatcacttggaaaatggataaatgaattgtggcatagttatatccaaaacacactgtgcacatagaaaagaagtgaacactactcagatttgcgtggatgaaactcaaatatattgttggacaacaaaagcgagtcacaaaagaatattatgtaagcctttcatataaagttaacatgctacatacaatattttgtttagggatatatatatatatatatgtacatgatatatattatatatcctataatatgattatattctatatattcactgtattatattttatgtatttttataatataagagcctaaagcaaaacatggtaatgttaaagattgatttcatgatagtagttacctctgagagggcatgagagggat

SEQ ID NO: 198711 - DNA, 104 bp, Homo sapiens
tttctcttcccctttcaattttcttgccctgccttcctccctctcttccttcttctcttccttcctttcaactttttgttcttcataggttgggttattccctg

SEQ ID NO: 198712 - DNA, 127 bp, Homo sapiens
aagctgaacttatttttccccctcatcactgttataatgaaatgaaaacaactttattcaaagacctgctactatacttccttttgcttaaaggcagtttctaagaacctaccaatgacattacatg

SEQ ID NO: 198713 - DNA, 1155 bp, Homo sapiens
tgtagttctctcccagagcacagttgagttgattgcttttttgagaaagcctctaagggatttgctgtctgtgtgcctattgggctgtctgtgcccctggctggagcagaaactgaggaaggaagatcctacggctcatcaagtaaaacggtcttttggggaagaagcattcttagaaatgctgcaccaagagttggaattgagaattcagaaaacatgatagagaaggaacaggaagaaaccatttggacatccaaaaataaaaggccagaatctcactttgttgcccaggctggtggtctctaactcctggacttaagcaatcctcccgcctcagcctcccaaagtgctgggatcacaggtctgattataaaaggagaattggaggcttaccaaacatctgaagagctttccagaagtttggtcacttctgaattagagaagttaaaacccaatcacctactaatgctgtgggaaagttctgcaggtgatacatcacaggggctcatgaatgtgtcttaagctgggtcattgaagtggaatgttttcacaagacctcctccacttgctactgtgtccggaattggtgggttcttggtctcactgacttcaagaatgaagccgcggaccctcgcgggagtggcaaatcaaaggcattgcagcctctttcatcactgccgattgctgatgccaaccatgtgccaagtgcttaatacgtcaccttaaatcttctcatccaccctcagagtagctgcagcatcaacccagtgccctgactttcaagacgactatgaaaacaccccaactgctgctaaattaccagcaacaaggatctgacattcttattcaaaagaaagaacaccgaaattgaccttaccctgacaatatgatggctgaaggatttatgatcacttataacatttgaaattgaggcggaacctgaagaataagactctggtgaaaggtcctatttatgcttttgatgtctttcacttggacatttaccacatgcctattggtaggtttgttacataggtcagttaaggtgatacaagaataaataaaacactatccctatcctttaatatcatttatttatggggtcaatcacagattttcatttttcaaaatctttgataaatgtcagaattatgt

SEQ ID NO: 198714 - DNA, 645 bp, Homo sapiens
tgtagttctctcccagagcacagttgagttgattgcttttttgagaaagcctctaagggatttgctgtctgtgtgcctattgggctgtctgtgcccctggctggagcagaaactgaggaaggaagatcctacggctcatcaagtaaaacggtcttttggggaagaagcattcttagaaatgctgcaccaagagttggaattgagaattcagaaaacatgatagagaaggaacaggaagaaaccatttggacatccaaaaataaaaggccaggtgaatacattcacaggggctcaatgacagtgtagtcttaaggcgtgggttcattttgacacgttggcaactgtctctgtcacaaagaaccttccctccacttgtgcattacctggttgatccgggaaattgggtggggattcctttgggtccttcaacctggactcttcaaacgacaatggtaaggcccggcggggacccccttctgcctggagtgagttggggcacacagttcacaaacggggcaattggcaaaggccttcgttttccattccctctgggcccggaatttgccgtggattggccacagaccccaattgtggcccacaagggggctttcaattagcggttcacacctctaaaatctttccatc

SEQ ID NO: 198715 - DNA, 593 bp, Homo sapiens
cagtccaggtaatggagcagagactggagcagagacaagttgttcccactgagctctcctcagattacagattgggagtggcaaatcaaaggcattgcagcctctttcatcactgccgattgctgatgccaaccatgtgccaagtgcttaatacgtcaccttaaatcttctcatccaccctcagagtagctgcagcatcaacccagtgccctgactttcaagacgactatgaaaacaccccaactgctgctaaattaccagcaacaaggatctgacattcttattcaaaagaaagaacaccgaaattgaccttaccctgacaatatgatggctgaaggatttatgatcacttataacatttgaaattgaggcggaacctgaagaataagactctggtgaaaggtcctatttatgcttttgatgtctttcacttggacatttaccacatgcctattggtaggtttgttacataggtcagttaaggtgatacaagaataaataaaacactatccctatcctttaatatcatttatttatggggtcaatcacagattttcatttttcaaaatctttgataaatgtcagaattatgt

SEQ ID NO: 198716 - DNA, 619 bp, Homo sapiens
aagctctctgtagctccggactaaagtcagttgtttgtgagcagaaaacggcagcagtcggctccaggtcatcactgagagcctgctgttattgcagcctgctcgaatctgatcccaagtatcccaccagctgctctttgactttgaagcttacaccaatctatgcacagaaatctatgcaccacagctacagcacaaccaagatactgccagggaagacgctagtggggcacaggtcgctgaatgtcgtagctgaatacagtagctaaggtgtctccatgaaaagtattatcgccagttgagtaaataaatgactcatggcctctcacttttatcccaactggaaaagcataagagctttttttataccaagatcaaacaaagccatgatttctgtttcactctgcattgggctaattgatgttttgacagttcaattctgataacagcagcgcacactctaattctctctgggaagtgaaggaaacactgccctgtattttcctgacttcaggcttatactctggtaatcttccaaaaacttcccatggctgcccatcttacttccaacaatccctgaactcaccgcagccccttaggctgtcccgcctcccacgtg

SEQ ID NO: 198717 - DNA, 612 bp, Homo sapiens
ggctttaaatcctgtggaagtggcattggtgacatggcagtctgtgaaggaaatggtatttgaagggggtcctcgtccatggatcttggagccctcccgattttttttggaattgaatgcggagaagacagagaagattggaatagcacaagtgtggctgccatctaagagaaaacagaaccagtacatctaccggatccaatgcctggatttaggggaacaagttctcacattccgaattggaaatcatccaggtgtcctgaaccctagtccagctgtagaggttttgcaggttcgcttcatttgtgcccaccctgccagtatgtcagtaactccagtatacaaggtgccagctggtgcccagccatgtcctctgccacagcacaacaaatggctgattcctgtatcaagactgagggacacagtcctggaactagcagtgtttgatcaacataggagaaagtttgataatttcagttcactaatgctagaatggaaatcctccaatgaaacactagcccatttcgaagattataaatcagtggaaatggtagcaaaagatgatggcagtgggcagacccggttacatggtattgtgaaaatatacaagtc

SEQ ID NO: 198718 - DNA, 226 bp, Homo sapiens
tgtagcatattgtggttaatgtaggtgtttcacagacctgcttatgtaccatcaagctttatcatattctaaagttcaaaagtgagttccaatatgcattattgagttgagttccaatatgcactattgtgttttcttactggaaatacaatttctgttcttaacaccatcaactaagctccctgtactgtgagaaaagaaagtgagtaaccgacctatgaaatcc

SEQ ID NO: 198719 - DNA, 327 bp, Homo sapiens
gtgaggtggagagaggaagaccaggaagccagactagcttaaagaggaacgagttaacagaagaataagcattatgacccaacacagaatacaaatttaataagaacccattttctttattaaaaattaaagacataatggccatttattaaaagccatgtgtttggcactttttgtagtggtttcacataattctaggggcatcccactgaagaagggtttacaatcctcattctacaaatggggaagcagaggctctgaaggatctccttgtgaattgctaattagaagctctggaaattacctatgttctgactcagccacttc

SEQ ID NO: 198720 - DNA, 371 bp, Homo sapiens
ctacaaaaattaattcaagatgggcttattcatttcactgagtgccattccacatgcatttgtggtgtgggtgaggcatggtagatgagattcacagcctaggctgcctgatagcggattccttacacctgagctgaaatgtctccaactagaccaaatgatgatcctcttttctcagaaaaacacaacacattagaccctcgttgatttttaaattgcctactgtatactgttttaaaaacttggatgcagtacatcccttttatctttattagaactgggaattggatgacagatgctgatccagggcaaaattgcatatatatatattttttaaatttactttaagttctgggatacatgtgcagaac

SEQ ID NO: 198721 - DNA, 385 bp, Homo sapiens
tagctgggattagaggcgccttccaccatgcctggctaattttttatttttagtacagacagggtttcaccaggttggccaggctggtcgcaaactcctgacctcaggtgatgcgcccgccccggcctcccaaaacgctgagattacaggtgtgagccaccacaccaagcccacagtatcaattctatgcattcttttctgatttcattaatctcattatcttcatttgatatttagtcaatagttactgtcagttatgtgttagttattatactagaaacagtcttttctccatctcctttaatccaatgatttgaacatttttattcctttccaatgtctgtcccacatttcttactgtatgtaggacatttcttactcaaat

SEQ ID NO: 198722 - DNA, 360 bp, Homo sapiens
gcctggttactatatctatttttaaagccttcgtttttttgctgttgtttgtttttgtttttttgtgtgtgatggagtgaggttgttgtatgtatcaactgtttgtgtcaataagctttgaaatgctaactccttaaatagtttaagacacttggctttaatttttggtgtggcaatcttctctttctgtgactagattttacttgttgatctctctgaaatctggagttggaagttactatttctttgcttacagataattgaagccgaccaaacttgttaaagtcaaaaccaacaacaccatgctttagtacacgcctctgggtttagtcacagactctggtaggttctgcaaatggc

SEQ ID NO: 198723 - DNA, 239 bp, Homo sapiens
aattagtatatcatcatccatacttctttcctctaagtacaaacaaaatattcagggcctactggtggcctcctcttttcattcccattctagctattatagggtttactcttgtgtttttttttttttttaacttcacaatgcataatggactttttctcagtaaatatagaactaagccagtttttaagtagctacaaaatataatttggatgtatcataatttactgtaatatttc

SEQ ID NO: 198724 - DNA, 646 bp, Homo sapiens
taattagcctttccgctatgttgtttattttgagcagagacacgtggttccttcgactgtgagaaacttgaggactgttcctttaaattagttacatttactgatgtaacttctcgttgaaccttgaaagaacacctgaggttgggcggggagttgaaattttgattctgcattttttttttttttggtaaagaatgaatgcccttttgagatgctctaccatgagtgagattgttcttcgcttctgtcttgttaatgtacagtctagagatagtaaactcccagtgttcaaattttgttttttatttttcaggtctagtttataatcaagttgtagagatttttctccttaagtgtttctaggtatctttgttgacatgtgtaggggcatttatgtcgccgtgtttttaaaaactggattaaatctttaaaaagaccacttaattattgaggcagttacgattatgttttcttgttaggtgaattaaaggtagtgttgccatggtgtttatgagttcatagtttgtctaatgcatacgcatatatatgtatttaatatgaaaagagcacctttatggagattctaaatggactaagacttagttttggccactagcatcatgttgtctgttaagagagagaagac

SEQ ID NO: 198725 - DNA, 962 bp, Homo sapiens
gggccttccgtgactttttctcagaagttatgtagtgtcaattctgccatattctattgtcagactagtcacaagcctacctagatttaaggagagagaacagaggcactgcctctctatgtgaggcataataaagaataggtgaccctgtttaaaaccatcacagtggacgggacatggtggcttacgtctgtaaacccagactcttgggaggccgaggtgggcggattacccaaggtcatgagtttgataccagcctggccaaaatgatgaggccctgtttctactaaaaatacaaaaattagctgggtgtggttgcatgcacccttaatctcagctactcgggaggctgaggcaggagaatcacttgaacctaggaggcggaggttgcagtaagccgagattgtgccactgcactccagcgtgggtgacagagcaagactctgtctcaaaaaaaaaaaagtcacagttgggaagctctgtcccatgaggttgcgttgggactcaggttagtttggttggggaggggcaatggcctctgccatttgcatcatgtgacttccatttctggcttcaaggtaactgagccctttgttgcatttcccagccagggaagagagggtggagggcaagcagttcctaataaaaaatgtggttcagaacttgcacaagttgccaggtgcagtgtctcacatctgtaaccccagcactttgggaggccaaagtgggcgcatcacttgaggccaggagtttgagaccagcctagtcaacatggtgaaaccccatctctactaaaaatacaaaaattagttggacatggtggtgcacgcctgtagtcccagctacttgggaggctgaggcacaagaattacttgaacccgggaggtggagcatacagtgacctgaggtggagcccctgcactctagcctgggtgatagagtgagaccctgtctccacaaaa

SEQ ID NO: 198726 - DNA, 353 bp, Homo sapiens
agaaggggatatataatacctatttaaaaattcctagcacttatcacagcatctgccatgtagtagctagggtgatcacctgtttctggtcgcccaacactttcttggtttaggcacagaagtcccacatttggagaactgcctcagtcctgagaaaattgggatggttggtcaccacaccacagagtgtttttgctgtaaggataaacaaaaggagaatcatgctcattaatttcatacactccttctttagatgccataggataagtgcattctgtcaatgaatttatcacataaaaagttacatttgaatcacaagcctcttttatgtgatcatttttactatgtgagca

SEQ ID NO: 198727 - DNA, 448 bp, Homo sapiens
tacaaagactttttgtattcaatttttcaaaacaataaatgaaaatttaaaacagaagttatagaacttgggcttaaattataataaatggaaaagttgatcaagttcattttcatagtccatctgcacaattagttcattaaaaatatatattgatatcaactattttctaagcactcaagagaaaaaaagatgaataataacattgttgctgcccaaacttataatctagatggtataaacaactaatacaaacacatatgaacagttgtaaactattaaatgtatgaaagtaaaagggacatgatgaaatcagaaatttatgggtcttgagaaatttgatagtcaaaatttttacatcaattatgcagaactgctgctaaaattatcagttattctatattagccaaatagatgacttcagttttctttttgggctctcttctca

SEQ ID NO: 198728 - DNA, 449 bp, Homo sapiens
aaacacatttacattagtttgccctttaaagattatttcctacttgtctcttatcaatgtgagtacataaaagagaccttattacaattaaaaacaatgatggtttagcagcagatttagataccttacattctctctttaagagagagaatgtaaggcctggtgcggtggctcacacctgtaatccagcactttggcaggccgaggagggtagatcacctgaggtcaggagttcgagaccagcctggccaacatggtgaaaccccgtctctactcagaatacaaaaattagccgggcgtggtggcgcatgcctgtaatcccagcaacttgggaggctgaggtaggagaactgcttgaacccaggaggcagaggttgcagtgagccgagatggtgccattgcactccagcccaagcaacaagagcaaaactcctatctcaaaaaaaaaa

SEQ ID NO: 198729 - DNA, 273 bp, Homo sapiens
ttctttctactaatatggaaagacttctaagatatattgttaaatgaaaatagcaaagtagagaacagagttatcagttatcagtgtgctgtccttgacataaggatcggggcacataacaatataaatgcataaatattagaagtatacacaatgaactaacaaaaggtgactagcaccagtgaattaggtgaactaagaacattagagagcaacttctttatggaaatctttttatagtatactgattgtgagattgtgaatacctgttca

SEQ ID NO: 198730 - DNA, 612 bp, Homo sapiens
ggtttattcatgtacattctctactgcagtcctagaattagctatttctccagggagtgctgggtgcctttaatgagaaatatgtgtgtacttctttacagaattttgctggaagtcccacccaacaactttcttttatgtatcatccatacccagctgcaaaagatgctagacaatataattttttagtgtggtagactttgtagagtactgttgttatggaagaaagataagctagatattatgaggtaatttacatttgttgataaggtgaataatgtgatagagaataacttcttaagaccaaaagcacaacttacattgatacagttgataacattaacaattaaatttactctagaatatatactattctcaaaatatagtcacagtgggagaagatttataactttcaaaagagaactggtgtcaaaatcaagagaagccacacctgatgaaccttatccacttctaggtttcatacagatgcagatatcatggattttgagctgatgccataatatgagtcttttgggatcatggaaaggaattagcgagtcttgaatatggaaagatgtgaattgttgccccaaaaggcaaactgaagtaggt

SEQ ID NO: 198731 - DNA, 227 bp, Homo sapiens
agcctggaaaacagagtgagaacctatttcaaaaatatatatatcacaacaagaatgaaccttaaaaacaggctaaatgaaaaaagccatattcaaaggtctacatattacatgattcctttagggattaagtcaccatttcccccaatcacaaaagaaggatgtatcaacaagatattattattattattattttttgagatggagtctcactctgtcacccaggc

SEQ ID NO: 198732 - DNA, 165 bp, Homo sapiens
gagcagcaaataatgacaaagatgatgagggaaagtactcctcctggaggtggggactcaaaggacagcagccagccccagcccacaggatgaggtaccagcactgccccctgcccgggcccctggggctccctgacccaggcctccagtgtgcctgcccccctt

SEQ ID NO: 198733 - DNA, 408 bp, Homo sapiens
gctgttggttcatttactcatttactgattccatatattattcctaagtcccaactacatgccaagcactgtggtgggtactggggaaataaaggaaatctaggcattgttcctgccatcgaggagctgagtacagttcagtagggagacaggtaagtgaccaggcacatccagaaagagtctcagatatatctagtgcccccagctgctgcctggcacagtgtggatactaaaatatttcttgaaggagtgctgaccatgtgacataaaagcatgcattaggaacatgtagtccaggctcagcagtggtggtgcagggtatttcaaatatatgccctatgtcattatgctaacataaacgtgctcatttgaaggaatagacacacttaaccatgatggcaccaaatg

SEQ ID NO: 198734 - DNA, 1250 bp, Homo sapiens
ttgctcccatccctgagatttcacttaatcaggacgcgtatttgtgaaagccaaagacagatctttagtctcgtcaccatacagcctttgcgttgtatcctgaggtctactggtgatcttttgctgtgtccttgtcattgtcctcaatgaaagctgccctgtgaggaggcctgagatgccggagctgccattcaggtgacagcagcattcccctagtcaaggagatgtgtcgcaaggccctcatggctgctggagttctgattccaggtgtacatagtgtgaatggaaccagcccagttctacagagcatcttgatagaatgctaatgattagttgctataggttgattatatttttatgactttttaatatatgaaccatctaagatgctttagactcaataatttaggacgattagagttaactataaattcttgaagagggatgctcaggaaggagggaagaaaatgcttccccacatggcaatcttagtcctagtctttgtcttttggttttaaaggaattgttttctgttcttaattgcggagtgaagatctagattgaatactggctgctgtagtcaaggatgagaacaaagttatttctgcctctaagtaatttctctccccagcctccaatttggatattttatctcctaaagaacggggcggcagtctttcaggagtaagttgttagattggtgcccctctgtcttatgacaggccagttctcatgactgagagtcgcttctgcaggcaaaaggcatcagggtggcagtggcaggcctgcaggccttccctggcatagattactgtgagttgtctgcctttgtgctaaatttttatttagaaataaattgaatctcacttgatttgtactttgagcctaacttgtttggtatttagaatgtactagttgaccgattagaatcattctgaattatacttctttatatgatagtagggtaacttgtagacactgctgcctctctgaattaggcatatcatttttatcaaaagtatttattgaggttctcttggggctgggcatggtggctcatgcctataatccgagcactttgggaggccgaggcaggcagatcacttgagctcaggagttcgagaccagcctaggcaacatggtgaaacccatctctaccaaaaatacaaaaattagctgggtgtggtggtgtgcacttgtagtgccatttacttgggaggctgaggtgggagaatcgcttgagcctggaa

SEQ ID NO: 198735 - DNA, 493 bp, Homo sapiens
aaaaaaaaagtgaaacatctaagccagaaggattaaatacatttatattctggccacttctgggggagttgcatcctgttctaggtttgggacactggagttctaatatttttaaggacacaaaagatgactcttctagcatgtgaagacagaagaaactggaactgaaccccttacataaaacctagagcctttcagatctgtcctattgttaataggagaatagaaaaaatgccacagaatgatctgagtaagcagcaatatagctcatcttgctcaagagctattttatgaaaagaaaataagagtcacaggagaaatcaaaattccaataaagatgtgagcccaggtctttcttatttcaaagctcttgatttttgctttggtctctgctggccttcctttctctgaattgtctttatgttatgtagagtaaagagagttttattcttgaacccagaaccaaagctatacacaaactattctcacaact

SEQ ID NO: 198736 - DNA, 456 bp, Homo sapiens
gcagactcagcattttcagggcgtctcccaagatctccaataaaggcaactaggcatcgactaggctaatcccgtgacggcctgttctgcggggacatcatcaccctggtgctgccctctcccccattctctagagaaaggagccccaaaagaacagataaactctgcctcctagaaagggaagtctctcaccgtcagcactgtggacatcgggactggatccatctctggggtgaggctgccctggcactgcagggtgctgagcagagtccctggcctccacccactccctgccaggagcaccccttagttacactgagctatgatcgcaccactgcactcgcacctgggcaacagagtgagactctgactctaaaataataataataacaagaatataagaataataattcagatccatgtccgataaaaataataaataagtaaagctgaggc

SEQ ID NO: 198737 - DNA, 566 bp, Homo sapiens
taaagggagattttcaaactgaaatgaaaatacactagacagtagctcagattcacgtgatgaaatacagagcctccagaaagataagtatacagtagtcttagttcattcagaatgctataataaaaataccacaaactgggtggcttaaacaacaagtatttgtttctcacagttctggagtctgggaattccaagatcaaggtgccaacaggttcagcatctggtagggtcccacttactagtttatagacagctatcttcttgctgtgtccttacatgacagaatggggtcagagagttgtctagggttcttttaaataaaggcattaataccattaatgtgggctccactctcataacctaatcacctcccaaaagccccacaccctaattctatcacattgggggtatttcaatatataaatgttaagaagacacaaacatttagtccagtgtaataggtaaatagaaaaagtttaactgtaattttatgtaactcttttcttctttcatatgatttaaaagacagttgcagcaattgttaaactgtgttgatgggttta

SEQ ID NO: 198738 - DNA, 492 bp, Homo sapiens
aattgctacattacttgaagagctcatagtttcgtgcgccaagtgcttaatgacatcacctgctttccatagtaacccagctgagttaaaaatatagaatgtcttggccccttgacctaagatcttcagggatcttggctacccaatgggttctcaaccattcacacatgttagttcctactctgtttacaacttcagctttcacatgcagtttctgctaagttggaaggagaaattatagcaaattaaagtgttaattagagaagtcacagggtaacactttttatttagatctctttgttcctctgtttgccatcgtacttgagaacaactccacagtcaccatctatagtgtacaaagtaaagtacttgtagggtacacgagtacctgtagaatattaagtacctatagggcacctgagtacctgtagggtctgtgtggcaacacagaccaccaagaaacccatcgtcaaaacggatacttatgcagct

SEQ ID NO: 198739 - DNA, 440 bp, Homo sapiens
cacaacatacctagcagacttgaccagagggaattgggaaaggccaaagtaaattattctaaaaaataagcaagcaaaccagaaaaggttaagatggagaggagcttagaggagcaagtgctcttcccatgctgggaaaaaggcagcgacagaaccgcctagtgggcaggtgagggcactgatcacgtgatagactggggcccactgcatctcttttctctttgggtcttgaggatggagaggcaggaacatgaaaacagtgagaaattttgaggttcacttcccttcttccacctctcacttcccccataacctcttccttttgatagtgctggaagaacaacccaaggccagccctcttgaagcaggcaaatagatgcttgtcctttacttcatgtataaagagattgttttctttctttactaagacagtcagagcc

SEQ ID NO: 198740 - DNA, 722 bp, Homo sapiens
tctttttgtaatttttatcggctgtcacggcatcattcttggtgatctcttctcttgtgctcaaaccagactttaaactcttcttcagctgtttgtggagcacacagtcccaagtacatgaagcaacataactttaggcaatgcaagataaataatagccctttcataaggacgctctggctttttattctataggcttgtatagaccatttcctttcacagtttttactctgtgggcttgtatggactgaccatttcctttcagtttttagtagatctagggcttttaaagaagggcttttcttatctgtctctttttttttctcttaatatgaagcataaaggtagagaagcttttaaattctatcctattggattttattaagatactgattttttttcttctgaggattcagtaagtggtatttttgaatacctaacatagccagaaattgttattaatattgatgcgacatagtcatagtttctgacatctttagagctaaaaagtttgtttaagtctgtatcatccaaccctttcgtttgactataaaagaaataggaagccattgagagtgtgatgctctgagattactgagtaattctgtgtccccaaaaagccagcgctggccatagatcttctgccttgtagctcgcagagattttgttttccattttactgctaggatttctgtgcccatttcaggaccggctcgattacg

SEQ ID NO: 198741 - DNA, 374 bp, Homo sapiens
gggtagcttgggcatagagaaggcctatgtggtgggttccagctgccttccaactttccaggctatgcccagatttattttctgtcaccttcattctctctccatagacactgtaaatgcagagcaagctgctacacacagccttcgtcttctactcatacacacaggagagtcttttggatgggaaatgtaggctagtagatcagttatgtttttctctaaatgctagggagacttcatgcttatgaaagctgttgtaggggtaatgactgccacaggacacttctaccatcctgtcatgacacctttcttagctctttctgggctggtaattaggaaaagagcccaagcatagtcaggcttcttgactatga

SEQ ID NO: 198742 - DNA, 676 bp, Homo sapiens
ggcaccccccatcctactttctgtctctgtgaatctggcgactctatggacctcctaggagtggaatcacacaggatttgtccttctgtgtctggcttattttactgagtgtgacatcctcaagatgcatccacattgtggcccatgttgggattccctcccttttttaggcaacaaatcacttttgagtgcttactgtataccaggccctgtcctcatgcttttcatgcactaattggatcctatgcagccctattaggtgggcaggattattatcatccccatttgatgggggaggaaactgaggcccacagctgcaatgtcacttgtcaaacatcacgcagttccagagcagaggggtgtgatcctgggcctcccggctgcacaacatgcccctcattctccctgacactctgttcagctccctggccagtcctggtgggctcttgtctgctgtgggagctggacccccacctgcccgtccctctttaccactgacgtatgccccgcggactcctgccgttgctataaatacaccatcagctggcgtctgcgactcacgcccggcagccaccttctctgcacagacagacggctggcacacctggctgcccagccctgggggataacaggctgctgctgccaggaacccctcacccctctgctgtccagacac

SEQ ID NO: 198743 - DNA, 379 bp, Homo sapiens
tgcagtacatcatcaaagccacattactctgatgatacggaatttatgagggatgtcccatatcatattatgcattaagttgaagtcaacaggggaggacaataggggacagaaattagaatgtgcaagacatttggagtcaattgaatctactcaattgcatgctggtaaaaacataaattgcaaagtgatatctattttttttcttcccacgagatattgctggagacaggaaagtattcaaagactcttgaggatactagagatttatctgaagtccaaggaagcaagtaagtttataattcaagatttttgggttgcatttatacaagaggtagactgtagtcttgtgatgattgtggtcttgtgatgatttgtg

SEQ ID NO: 198744 - DNA, 1148 bp, Homo sapiens
gggggttttgtagaaggtgctggggtttgaggggtcagtcggacacgattggcagggagagcactagagacaaggtgtcactatgttgtcttaacattgtctaggctggtcttgaactcctaagctcaagcaattatttcgccccagtctcccaaagtgctggattacagctgtgagccactgtacctggcctctcttcttctggacataaaaatgaatacatgaagctggatgcagtgagtctcaccctgttgcccaggctggagtacagtggcgcgatctcggttcactgcaacatctgcctcccaggttcaagcgattctccttccccagcctcccgagtagctgggattacagaaacacgccaccacgcccggctaatttttgtatttttagtagcgatggggtttcaccatgttgaccaggctggtctcgaattcctgacctcttgatccacccgcctcagcctcccaaagtggtgggattacaggcatgagccaccacacccagccaggaaaatattttctattttagctaaaaacaaaagtgtatatttaggaaagagatggaatagaccccatctcagaattcatatcaattctgaggataaacaaagaagcaaatccatggctgtgtctacacaattacaaacattcatttaagcatttaattacatgaattcaactaacaaagtaaattgtactaaaataaataaaagtcctttatttttcttttcagtcatataagtgatataaacagttgattagttgaggatattaaaaaattcttaatatcacattttgaattaataatatttgttatactctaattacaaaataacacctgcttgttatggaaaatttggaaaatatgagaaaatctcaacaaaattatccgtaaatccacctttcaggtataattgttgcttttttagtgtatgtctttggacttttctatgcataaattatgtgtttaaacaaaattggactaaagttgtatatattgtttgcaatttgttttttcctgctcaatattatgcatgatcagttttcctttattctactacatctaatctcttatgattgatatatacattgatgccaatgttttgtttttataaataaagctgaaataaatgtctttgtact

SEQ ID NO: 198745 - DNA, 1299 bp, Homo sapiens
gtctgtgaagctttgcagcagtacagcctagttgctggactgtgtcataagattgcagcatgcagccatgttcatagcaccacgccgaatcctttctggtgagggtatctcatattgtggcattggcattgtcgctgctgacattttgagtctgccccctctgtatctggtgcggagttgatcatgatgaggtgacagaggcagaactgccaaagtagagacaaggtgtcactatgttgtcttaacattgtctaggctggtcttgaactcctaagctcaagcaattatttcgccccagtctcccaaagtgctggattacagctgtgagccactgtacctggcctctcttcttctggacataaaaatgaatacatgaagctggatgcagtgagtctcaccctgttgcccaggctggagtacagtggcgcgatctcggttcactgcaacatctgcctcccaggttcaagcgattctccttccccagcctcccgagtagctgggattacagaaacacgccaccacgcccggctaatttttgtatttttagtagcgatggggtttcaccatgttgaccaggctggtctcgaattcctgacctcttgatccacccgcctcagcctcccaaagtggtgggattacaggcatgagccaccacacccagccaggaaaatattttctattttagctaaaaacaaaagtgtatatttaggaaagagatggaatagaccccatctcagaattcatatcaattctgaggataaacaaagaagcaaatccatggctgtgtctacacaattacaaacattcatttaagcatttaattacatgaattcaactaacaaagtaaattgtactaaaataaataaaagtcctttatttttcttttcagtcatataagtgatataaacagttgattagttgaggatattaaaaaattcttaatatcacattttgaattaataatatttgttatactctaattacaaaataacacctgcttgttatggaaaatttggaaaatatgagaaaatctcaacaaaattatccgtaaatccacctttcaggtataattgttgcttttttagtgtatgtctttggacttttctatgcataaattatgtgtttaaacaaaattggactaaagttgtatatattgtttgcaatttgttttttcctgctcaatattatgcatgatcagttttcctttattctactacatctaatctcttatgattgatatatacattgatgccaatgttttgtttttataaataaagctgaaataaatgtctttgtact

SEQ ID NO: 198746 - DNA, 483 bp, Homo sapiens
tcaaaatttcttcagtcttaatgtagtattgatatgtttattttgtgcttaattataaatttggttcattgacctccccaatcaaatatatagtcctacttattagctttataacctgagacaagtgactaaatctctctaggcctgtttgtttatctgtatgatcatactacctaccctacaaggttattgtgagtattgaatgagttgatcagaggtgtttggccccatagtgagttcttaataatattaactcaatgatgatgattgctactgatgttagctactagtagtaaaaacactggtagaggcttttgctccaaattaaagctgggaaagcataggtgatggctcatccctgtaattccagttctttgggagcccaagacaagaggatcagttgaggccaggagtttaaggttgcagtgagctatggtcacaccactgttcttcagcctgggtggcagagtgaaaccctctctt

SEQ ID NO: 198747 - DNA, 401 bp, Homo sapiens
gggggatctctctatgccaacttctgtgccaagtagagagataaagagaatgcatggaaagactatgattgccttagtgaagtactttcatatgaatgttagggtgtatgagagtgactgattttattgttgtacttactagtccctgttgtttccacaaagaaagatgccagcattgacattaacatcagggaggccataattcgttcactcctactgctttctttccttccttgatttcttccaatgcttcagcattcactcaacattaactgtttgcctactctctgccaagctccactcctggcagtgggatacagaaataaagacagagagacaaaaatccatgtctgtgttcccatagaagaaaaacaattttaatatgtaccatgggggaaacg

SEQ ID NO: 198748 - DNA, 200 bp, Homo sapiens
agctgaatagaatttagattaatggttgttcaggcagggagcagtggataggaaggaatggggtaatgttctagttctaggtcatatcataggtgaacaggtgtacattctattattaaaacaaaaggaaaacattttcagatcatcatagcaaaagttgatttatatgtatatataaatatatatttttttttgccaaa

SEQ ID NO: 198749 - DNA, 513 bp, Homo sapiens
ggagctcggtacccaagcttttaccgcgcccagcctggaatttttaagtagctaaagaattagatttgtttttatgtgaaagatatgattttgtcatagagttaggcacttgtgttactttggaccaaacgtagtctgctagaattttgagatagagctagatatgatctaccatggaacataattcagctatgtaatttcttaagtactagtatattatgaactgggaagcatttgaagagaaacagtgaaagcaaagctcctggtatttttcatgaaatgacaagtggtaaatagtatctattaaaattcactgtagttgctcagtgaaacacatcaatagctacatggtagctatttaagaaaaataacttaccacagactcaggaaactttacagtgtttgacttccaacagtttacagtatttatcatctgtgtttgtttgctgttcagatatggtagattcgtcatattaaacacaagcttcatgcggtaaatgtgactctaaaaca

SEQ ID NO: 198750 - DNA, 960 bp, Homo sapiens
agggtttattttcctctgatgtagaagggaaagaatgtgaattcaagtgaagagagcaactattacaaagaaacagctgagcatggaagttaactgccgggctatggaatagacagatttcaccttacaccttcttcatcttacgtccttgagcaagtttcttcacttcccagtctcagtttcttcttctataaaatagacataacaatgccccccttttttttgtgaggagtaaatgagaaaattttatgaaatacctaaaactggcatataataagtgccaataaatggtagctattgttaccaacctgccagcacaacttatgtttgtcccatttcttgagagtttataaagactttcttaagtgttactttaagatgtctgcaagcattctgcaggactacagaaaatataaaaatgagtaagaaaatgtcattgtgtcctcaaggatctcataaatcaaaaggtaaaaaaatttttacaaggataaaaattatgatacaaaacttaagatcactttagccctgttgtgagtcaggggtagaatgaagattggaaaactaatataaaggctgctgctcttgaagcttgaagaggatggtaacagttggcagagaatggcagagatggtaacagttggcagaggtggtaatggcagatagtgggaggcaaattaggcagcaaaagaaaacagaagacattcttcctgggaaaattggggtaaatatggaaggtcaggtttcaggaaatgtgattgtggttctgggtacgtaggatatgagatgttagagggaggaagaggtaagataactaataagcagatgttgatttatccattcattttatctaaacattagcaataattattgagtatctgagtagtaaacactgtgtcactagagacacaaaataatacttggcctgtaatcgcaaagagtttactgtctagtgaagaaaga

SEQ ID NO: 198751 - DNA, 413 bp, Homo sapiens
aagtagtttattcaaactaagggtagatatcttaatttaacagatatatgggggatgagtcagtgaactctgtgggaacactgagatcctaaatggtttttgatcctaggagtactgaggaacccctcattaacactgctggtgttggaagactatggtatgagccagagtgggggtacttggctgtagcagagtgggccatgacaggaattgagtggatttgttaaggaggtgggagatgtagagttataataacagatagacagatggccagacacactcccagacagatggccagacatcttccacttcctccatggacctttgttgtactgtgacttgttttaatctcaaggctcttgagaaacatagtgatatttctcatgcttatgttttaaaataaatattttgaa

SEQ ID NO: 198752 - DNA, 104 bp, Homo sapiens
acaaagctggggagggaggagacatgcttagctgtgtgtctggcacaaacttgggaaaacaagaagcatgaatgaatgaatgactgtataagatccactgaagg

SEQ ID NO: 198753 - DNA, 263 bp, Homo sapiens
cagtgtgctgagtatcctttggtcttttttctgtacctctacatgaatttgtgtggttttttatttttggggtgtaaatgagctcaaactcggtccatggctgtggggcctgctttcatccggccatgtatcatgcagagggaccccaccactgccatgggagttctgagcacatgccctgagctggggcttggcgaggctttgggagagatgggaagaagtcttcctggaggtggttaatttagagcaggttctggagaaga

SEQ ID NO: 198754 - DNA, 631 bp, Homo sapiens
gtacatgccaccacgcccagctaatttttgtatttatggtagagacggggtttcaccatgttggtcaggctggtcttgaactcctgacctcgtgatccgcctgcctcagcctcccaaagtgctgggattacaggtgtgagccaccgcacccggcttcaagtgaatcttgatgaaatatttgaagagaatgtaacattatttttattttgtattggttcagatgcatatagtcgactcagaatgatctttggtaaagtatgtgaagcacatctgatatgtcaggtctctcatttttgcactgatactaacaccacaatagattacagtttcataagatgtatatgattatatatgaaattcatcactgcaataattagatttagttaacattcttcatttcccacatttgctttaactcctctttcagattcatagtcttctatgtttacttttatgtttatgttttatgctatttctaggagtaggacagctatattaaaaatgacactgcattatttttatcatacagcagaatgtctgatctgttggcagaaatacatagatgtatatggcagaatgtatgtataatgtagtaatgactctatccgaggacattttatagccataactt

SEQ ID NO: 198755 - DNA, 488 bp, Homo sapiens
ttcttttcttttggtagagacggggcctccctgtgttgctcagggctttcttgaactcctaggctcaaccatttctcctgcctcaggctcccaaagtgctaggattacaggcgtgagccaccattcctgtaatggtcaacataagaatattgacagggcacaatttactccataacagatcccatgtttgtcatcagattggcaaaattttaaagtctgacaatgccaagtattggccaggtgtgacccagatgaaattcgtgctctagccaggtgtgtggtgactcacacctgtaatcccagcactttgggaggccaaggcaggaggatcctttgaggcctggaatttgagggagacccagcctgggcaacatactgagaccgcatttctaccaaaaacggaaagaaagaaacggatgctctgcaggggaggcagcatttgttcatatagaaataaaataaataaataaaaagaaattcaccctctg

SEQ ID NO: 198756 - DNA, 528 bp, Homo sapiens
atttctttatttttgagacagagtctcactttttgcccttgatgaaatggactggcccaatcatggctcactgcagcctcaaaatcctggcctcaagaaatcctccagactcagcctcctaaagtgctgggattacaggcatgagccacagcacctgacctagactgttttaaactagatttccctgagaaaactttcactggaaaaatcaaaattatcctgctgtcattaagagaaaactatctgttgtagaaaattacattcttttttttttcagacatgtcatataaatatttggacccctctctgagaacaaactacttaaaagtcatttcaatcattaacgaatatcataattgagggcctgtgctgggtgccagaaatctaccagtgagcaaaacagcacggatctttgtccacagtaaatttacagatcagaggaaacagaaaaacaatcagttaaataaaacaggtctgaaaattgcgtatgagaacccaaagcagaggtacctaatcaggtcaaaaaaa

SEQ ID NO: 198757 - DNA, 389 bp, Homo sapiens
actgggaatttgtgctgatggtaaatagatatggtttgaatcctggccactgcccaccagccatgtgaccaagacttaaccatattttttcggggtgttatgcagagataatgagatcaaaattgtaaggcatctagtactgacataataagctctcaacaaatggtagctatttaagtgttaataacaaatccttttcagatggtttctataacagtgaatttgcaaatagttggaacctctgaagtgcttcctctcctggactggaaaccccttgaggtcagtggccttgtctgcctattcacaatgtccgtctagcacatggtaggctcttaatatatatatatatatatatatatatatttatttatttattttttgatgaatga

SEQ ID NO: 198758 - DNA, 624 bp, Homo sapiens
tcctgatgttgttgtttgtttgttggtttgagactgagtctcactctgcgcccagtgtggaatgcagtggtgtgatctcagctcactgcaacctccacctcccggattccagtgatccactcgcctcggcctcccaaagtgctgggattacaggcgtgagccactgcacccggccctatatattttttttaattagaaaactcattctagaatggggacaaatgaggacagagacgtgaagagttaattctgtcagaacttaattaaacttttcattaaggttaacgtaaaacgaattttgctcagagtctagtaggtttcattaaactttcgaaacaccagtacttagacttcaaaagaacgcctcagggctctggtctccttcctgtgcacttagcacattgcgtgagcgtgcacgcatgcatgtacacaccaggaatgtgcgtgcaagctcagctcgtaggtagcagtgttaccagcgttcatcttcatgataaatggggcaaagctgtgagacggagtcagacaacctagggtccatcttgagaggcgtcatctgctgtgcaacctaaggcaacgcctcttcacttctctgggtccctgtctcctgctatgtaaagtgaa

SEQ ID NO: 198759 - DNA, 420 bp, Homo sapiens
agagtcagatttactcagaagctaatgatgcttaagctttagggcccctcatttgcatgggccccttctgaggccctggcactagttttgtactcctttcttaaacaagagccccccaaattgtatgggctttaggggtcacaaaacctggatctgtcccttctgataaaattctaattataaatgagtggatcaggcataaattttaaaattctgtaaaatgatggccggcatttcttcactccctagaaactttggaactgtttaaatttataataaatgcttaggtgtatatctatatctaaattatctattttttttaacttctgggaatcaagataaacatcgtaccaactaattatatgtttttgtaagtatagagattactttattccctctataatgttagtcatgttaaaa

SEQ ID NO: 198760 - DNA, 873 bp, Homo sapiens
  misc_feature (534)..(534): n is a, c, g, or t
  misc_feature (787)..(787): n is a, c, g, or t
  misc_feature (826)..(827): n is a, c, g, or t
  misc_feature (842)..(842): n is a, c, g, or t
cggcgggctggcctggcgcgctgcggcgctcgctcacccgctcccgaggaagggcagtgggccccgccgccgcctcccaatggcgaggctgcgggattgcctgccccgcctgatgctcacgctccggtccctgctcttctggtccctggtctactgctactgcgggctctgcgcctccatccacctgctcaaacttttgtggagcctcggcaaggggccggcgcagaccttccggcggcccgcccgggagcaccctcccgcgtgcctgagcgacccctccttgggcacccactgctacgtgcggatcaaggattcagggttaagatttcactatgttgctgctggagaaagaggcaaaccacttatgctgctgcttcatggatttccagaattctggtattcttggcgttaccaactgagagaatttaaaagtgaatatcgagttgtagcactggatttgagaggttatggagaaacagatgctcccattcatcgacagaattataaattggattgtctaattacagatataanggatattttagattctttagggtatagcaaatgtgttcttattggcatgactgggggggcatgattgcttggtaattgccatctgttatcctgaaatggtgatgaagcttatgttattaacttccctcatccaaatgtatttacagaatatattttacgacaccctgctcagctgttgaaatccagttattattacttcttccaaataccatggttcccagaatttatgttctcaataaatgatttcaaggtnttgaaacatctgttaacagtcacagcaactgggcattgnnagaaaaggatgccantaacaacagaggatcctggaagttaaaatta

SEQ ID NO: 198761 - DNA, 268 bp, Homo sapiens
aaacagaagaaaatgggaggttatggggcagtttaaggagcattagacaaacaagcagatacctagaatctggtttcagctctgcatttatttaattgtcatcaattgtccagtgaaccaagtttgcttgcctgtacagcgagaagattatactacataatctccacgttcttttgatagctggaatgtatgaaatgactctacttctgtgtaaaagaaaacaaacatgtttctagaaaattacttttaagtcgtcttccagagtgat

SEQ ID NO: 198762 - DNA, 428 bp, Homo sapiens
gtgattacaaacaaaaagagaagcaaaaactactagattttttgtgctatgatcttgtgggaccagactaaagtattaccaaaacaatcctaataatggcttatcttccattttgagatgggccttcactacagaacctttgggtttaattttatcaagcgacctttagtaatataacatataagtagcttttattatggctgcttgattctcaaaatctttttatctgcttcaaaaattaactgtattatgtacagaaaacaattcatggacattttataacaaaatattccatgtgtaggagtaggcatccaggaatagatctaaacagattattattattatataagaaataattcttcttcaaggtacatgtagagtacaaagtaaataatactttaaattcccctgaaatatagaaaacacct

SEQ ID NO: 198763 - DNA, 250 bp, Homo sapiens
aacaaaacaaacatgagagagaatcatacctgaatgagtcgtacgtgaatcctgggaggtgtgatccactggagtcattattgtaataatctaccactgcctgcactgagaccccagttattcatatccctcccaagactctgagtctcattccaccacagcatcaggctcaaaggccaggatctacatcaggtctggatagaaatggggctttctagctgggtatggtggctcatgcctgtaatcccag

SEQ ID NO: 198764 - DNA, 376 bp, Homo sapiens
ggcaccagcttctcaacgaatccatctctggaacacccaagttgggtgacctgccctttgtctgtcccctgtggcatcctgggcgtgtttctaacctaccatgtttacatgtcctgagaccccgctaacaccatcagctcctccaagccatgaaatacatacatcttaatcacttttgtatctgtggtgcatagcatggcacttagcctaaagtaggtgttcaagaaatgtttcttgaccaaagctgaactgaagtttgatgtgttataagtcatggctaggtacagtggctcatgcctgtaatccctgaacgttgagaagcttaagcttctcaacgccaagtcatcctcccacctctgcctcctgagtagtctat

SEQ ID NO: 198765 - DNA, 253 bp, Homo sapiens
ggcaccagcttctcaacgaatccatctctggaacacccaagttgggtgacctgccctttgtctgtcccctgtggcatcctgggcgtgtttctaacctaccatgtttacatgtcctgagacctgtgtaaaaggagggccaggacatcgcgacggggcttgcacgcgaagaaggaacgtcagcaggaggcaaccagtgccgcgatgggacgaatacaccggaacgcctggcacgactattggagcgagctctgac

SEQ ID NO: 198766 - DNA, 192 bp, Homo sapiens
gtggtaaaactgagaaacttttttgtgtttttcaaaacacattttcagttttttcactttctaaaagtaaataggctgggcctggtggctcaggactataatcccagcactttaggaggccaaagcaggaggatcacctgaggtcaggagtttgagaccagcctcgtcaacacggtgaaaccccgtctctac

SEQ ID NO: 198767 - DNA, 641 bp, Homo sapiens
gacaccggcattggagtgtgcctcatcagagctcccatgccacccccagtcacggagagttgcagacgagaaggggctgtggcttatgtcacagtcagacatctggtgtggactctgttctacccatgcctcctctgcaaggtacccagtaccatgaagctaggctatgcttcaagctgccagaatggatgcagaatttgcttgggagccatgtgaaagtgagctttaaccccactttcctactttccagttgtatggcatagagtaaaatctttattcctgatgagcttcaagctcctcatctgtgaagtgggtaaaataatatctgcttctgagacttattttgaagatcacacaaaacggacctaattggcctgcgataaacggtagctcttgacttttacacttcactgtttcccttggtactcaagttaatctcattttacctgaaggagacacagacccatagcctctgctgggagtgttctggttaaaggtaagccaaccaacccgggagagctatgggtccagaagccatttcaaaaacacttgatgcttcctgcggccctgcctgggggtcatgaaaacaagtccagttacatactctggccaggcagtcccactttgggaatgctatccgc

SEQ ID NO: 198768 - DNA, 976 bp, Homo sapiens
aatatattaatggatcaactttaaaattgttagttgccagtgatcttttttggaaaacaaaaatggggcatttgttgatttatttattttctgtctctaattagttacctcagtttgattgaagccagtggagttgtgcttttcctctacttctacttcctctcccccacctttttctgcccagtgtaggtgtattcttaaattcagacgggaagattctttcacatatcactcagttacctcccaatctgggggagtttttcttacaacttgataccagataccattaattttacattcctgaataaaggcctagtacccacgcatatttcaaccatgcatatatcaagttcaaccgagttttaataggggattaaaaaaacaagctgttaggtttccatgggcactggttctcataggttctattggtgataactgctttaacatggagcaagagtttgtgaatcaggaaatagaataaattaaaatttaaaatatatagaggaatcctcttgattgctcagcatgatgttagataaatgagtttgtcagaaaatatcagtatacgctgtttaccaatgttatttatttacattcttctaaagccattatggatattgtattatgagagctaaacctaaataagttatcctgttccctaggaccttctctgtaaatagtgaattttagacgagtagtctgtcctaaatcttaaatagaaaaaaaactaaagcgatttgcttaagccattgtacattataaagagctgttttgttttgctttgctttgctttgttttgtttttttaaagctgcattcagagccacaaaggaataggaaagtagggtagtgttggattctggttttatgtaactctaaaataaatgtatctctttaatatctcagttgtagggattttgtcaataccaaagcagactgagttgtggttttgtaaataaagttttttctaaaaatga

SEQ ID NO: 198769 - DNA, 783 bp, Homo sapiens
  misc_feature (53)..(53): n is a, c, g, or t
tttttctaaaaatgaaaaaactttatttacaaaaccacaacgtcagtctgctntgggtatgacaaaatccttacaacttgataccagataccattaattttacattcctgaataaaggcctagtacccacgcatatttcaaccatgcatatatcaagttcaaccgagttttaataggggattaaaaaaacaagctgttaggtttccatgggcactggttctcataggttctattggtgataactgctttaacatggagcaagagtttgtgaatcaggaaatagaataaattaaaatttaaaatatatagaggaatcctcttgattgctcagcatgatgttagataaatgagtttgtcagaaaatatcagtatacgctgtttaccaatgttatttatttacattcttctaaagccattatggatattgtattatgagagctaaacctaaataagttatcctgttccctaggaccttctctgtaaatagtgaattttagacgagtagtctgtcctaaatcttaaatagaaaaaaaactaaagcgatttgcttaagccattgtacattataaagagctgttttgttttgctttgctttgctttgttttgtttttttaaagctgcattcagagccacaaaggaataggaaagtagggtagtgttggattctggttttatgtaactctaaaataaatgtatctctttaatatctcagttgtagggattttgtcaataccaaagcagactgagttgtggttttgtaaataaagttttttctaaaaatga

SEQ ID NO: 198770 - DNA, 1064 bp, Homo sapiens
aatatattaatggatcaactttaaaattgttagttgccagtgatcttttttggaaaacaaaaatggggcatttgttgatttatttattttctgtctctaattagttacctcagtttgattgaagccagtggagttgtgcttttcctctacttctacttcctctcccccacctttttctgcccagtgtaggtgtattcttaaattcagacgggaagattctttcacatatcactcagttacctcccaatctgggggagtttttcttacaacttgataccagataccattaattttacattcctgaataaaggcctagtacccacgcatatttcaaccatgcatatatcaagttcaaccgagttttaataggggattaaaaaaacaagctgttaggtttccatgggcactggttctcataggttctattggtgataactgctttaacatggagcaagagtttgtgaatcaggaaatagaataaattaaaatttaaaatatatagaggaatcctcttgattgctcagcatgatgttagataaatgagtttgtcagaaaatatcagtatacgctgtttaccaatgttatttatttacattcttctaaagccattatggatattgtattatgagagctaaacctaaataagttatcctgttccctaggaccttctctgtaaatagtgaattttagacgagtagtctgtcctaaatcttaaatagaaaaaaaactaaagcgatttgcttaagccattgtacattataaagagctgttttgttttgctttgctttgctttgttttgtttttttaaagctgcattcagagccacaaaggaataggaaagtagggtagtgttggattctggttttatgtaactctaaaataaatgtatctctttaatatctcagttgtagggattttgtcaataccaaagcagactgagttgtggttttgtaaataaagttttttctaaaaatgaccattcttcctttaattttttgttatgcccacatattgtatgtaaaaatataaataaatggtacttaaagtatagaatataaggctaa

SEQ ID NO: 198771 - DNA, 1285 bp, Homo sapiens
aatatattaatggatcaactttaaaattgttagttgccagtgatcttttttggaaaacaaaaatggggcatttgttgatttatttattttctgtctctaattagttacctcagtttgattgaagccagtggagttgtgcttttcctctacttctacttcctctcccccacctttttctgcccagtgtaggtgtattcttaaattcagacgggaagattctttcacatatcactcagttacctcccaatctgggggagtttttcttacaacttgataccagataccattaattttacattcctgaataaaggcctagtacccacgcatatttcaaccatgcatatatcaagttcaaccgagttttaataggggattaaaaaaacaagctgttaggtttccatgggcactggttctcataggttctattggtgataactgctttaacatggagcaagagtttgtgaatcaggaaatagaataaattaaaatttaaaatatatagaggaatcctcttgattgctcagcatgatgttagataaatgagtttgtcagaaaatatcagtatacgctgtttaccaatgttatttatttacattcttctaaagccattatggatattgtattatgagagctaaacctaaataagttatcctgttccctaggaccttctctgtaaatagtgaattttagacgagtagtctgtcctaaatcttaaatagaaaaaaaactaaagcgatttgcttaagccattgtacattataaagagctgttttgttttgctttgctttgctttgttttgtttttttaaagctgcattcagagccacaaaggaataggaaagtagggtagtgttggattctggttttatgtaactctaaaataaatgtatctctttaatatctcagttgtagggattttgtcaataccaaagcagactgagttgtggttttgtaaataaagttttttctaaaaatgaaaaaaaaaaaaaaaaaaaaaaaaaaaaaaaaaaaaaaaaaaaaaaagaaaagaaagaacgagcgacgagaaaaaggataaaaagaacgacaggaacaaaacaaaacccagcgaaagaagagaagccaaaacagaccaacaaccgtagaagaaagaagggaacaacgcaaatcacaaaaacacgcgaagcgacagaacaaccagagggaagcaccaaggagacgaaaatggagaagaacaacaaagagaaagcaaagaagacaccagcacgacaaaccggcggtcaacgataggccagaaaacaacacga

SEQ ID NO: 198772 - DNA, 825 bp, Homo sapiens
atgcaaagctgtcaactctcccgtgacctcaggctttccttacccaagtctggcaaccactggagaaggaggcagattgtccttttccttttggtgttcaggatcagatttcagaggtaagggatttggtttggactaaaatggcccaaaacaggaagacaccagatcaggagcaggctctggatggagacaaagagcagccagccctgcgctgctcttttcacccccattttgtaaaggaggcaacaggaagacacagccctgccttacgaggaagctggaagaggagagaaggaagcaggacagaaggaaggggctcagagccgtcccaacacaacccatctcagtctccagccatgaggaccttggggcggccagcctccctctgacctgggtgtaagaaggagggcagaagggagtgtccccatcacaggaatcctcagctccttcagttgccctggctgctatggtcaccaccaccgaggctcagcaaatggactggcagctgggtggatttctcagccaccgccctttgtcctgggctccctcactgtcatgctcccactgaccctggaggcgcatccttggtcttacagctgggcaggtctcacctttgcttccaggccctgtatgcctgtgcttccaggagccagagagatgtccaggtaaacttcctggccacctccaggccctggctgcccgggagaggcaaagcagtggcagagcacagtcatcagagcaccacgtcatcctcacctacaactcaggacacccagagccacagtcatcagagcaccacgtcatcctcacctacaactcaggaca

SEQ ID NO: 198773 - DNA, 367 bp, Homo sapiens
atctgtgactgtccagtttactgctgtcaccgggcctggcatttagtaagttccaagttgtcacatgaacaaatgagaaggaggagaaccaatattttttgagttcctcctacaagctatggtctcatttcttcctccttaccttcagggaggtagagctttcagatgagaaaacagactcacagagacaagaaaatagtctaaggtctcccagccaagaagagagggagtcaggagtcaactccaacatgacacaaaacctctccatgacctttgcagttccatcctctgggattccaagtgatcccttgtagtctgtgaagtcactctgataggggcctccacattctggatattaagtgggtat

SEQ ID NO: 198774 - DNA, 463 bp, Homo sapiens
catccttgaggcttcatcagtttggccccaatccatgccttcccaatctcaaacatatctctttgaagggccttgtgcctcaatttcttcattagcaaacagtgaaatttggcatagaccagatgtccaatagaacactccatgagtttctattgtccactattctattctatttctgcattgtccactagagcagccactagacacatgcggatactgagtacttgaaattggctagttagactgggggactgaatttttaagtttaattaatttttatttaaataatcccaaatgactaatggctcccattttggccagcccaaagttagaagaatttttatcattctttgacttgtgatcttttacataccctagttttaaattatgtgtgcaacccattgccagatcctgaaatcaatgtattggggtgcaaataacattttttaatgaaatggcataa

SEQ ID NO: 198775 - DNA, 418 bp, Homo sapiens
ttaaaagttgcactattgtataaagaatgtcaaatattaggaatgccatttatatttaaggcttataaatcagattgaacacatggaaatgtttaaaaatgaaattgtatgatatccaggatttgctacaaaataattcggtggcaggaaaataaaccagaatggtgatacagatgaaataagattggctaaaagttgaccactgttgaagctacatgatgggcatctgggcatctaagttcattgcaccattcttttgacttatgtggaaaaaatccagatcatgttacatataaaaacaaaataagcaagaaatagagactaaactctttttctcactctcctaccccgtttcaggctgcctggttgtttggggggctctttcaaatacaatggttcaatagaacaactacgaccg

SEQ ID NO: 198776 - DNA, 913 bp, Homo sapiens
cggcttcagccattgtggagtctctaataaatcaggagcttttctttccctctggagcctttcctgtgcactcttgggatctacttgtcctttgcaaagtctagtacagccacctctcccatggggaaggagacacttagcatcctgggaccaccagtcacagctttaggactttagctttcctggaccagccctgatggcaccatgcattgcctggatggtatgcacggacccaggctcccttctgagactaagaacagacatttgcattcaggtattttgcatatgccattgatagcactgaaaagtaaaacaatagaacaagatactaaaatctgggaagattttcttgggactttcagtacatctagcttcctctctggtcacaagggtagacagctggggacttttctattactggggtagctcccttgtaattttccactttgaatcttacatctttttgtattaagttaaatggtgttttgctctttaaaatagccttgtaatatggctggtctgcactgctcgctttgtcttaaaagggaataaaattcttaaattgaaagcaaatcggagagggttctatggcgctctctgcgaggggccgagcgtggattcgggtctgatgattactttgactgcagaaacagtgggggctgtaatctccgaagcagcggacactcacagcgacggttggcccagtcctttgatttagacagcccttggctgtcttgcctggcctagaatccctattccattgaagtctggcctcaggctgtcttcttgggcagtgccatttgcatccaggcatggggagggcctctgtgtcctcagggtgccgtgtgtttgtggtgagagaggatgaacaggcagcagacaggggctcccgggcagttgctgggctgctgct

SEQ ID NO: 198777 - DNA, 1703 bp, Homo sapiens
ggcgaggttactcatcctgggctcaggtaagagggcccgagctcggaggcggcacacccaggggggacgccaagggagcaggacggagccatggaccccgccaggaaagcaggtgcccaggccatgatctggactgcaggctggctgctgctgctgctgcttcgcggaggagcgcaggccctggagtgctacagctgcgtgcagaaagcagatgacggatgctccccgaacaagatgaagacagtgaagtgcgcgccgggcgtggacgtctgcaccgaggccgtgggggcggtggagaccatccacggacaattctcgctggcagtgcggggttgcggttcgggactccccggcaagaatgaccgcggcctggatcttcacgggcttctggcgttcatccagctgcagcaatgcgctcaggatcgctgcaacgccaagctcaacctcacctcgcgggcgctcgacccggcaggtaatgagagtgcatacccgcccaacggcgtggagtgctacagctgtgtgggcctgagccgggaggcgtgccagggtacatcgccgccggtcgtgagctgctacaacgccagcgatcatgtctacaagggctgcttcgacggcaacgtcaccttgacggcagctaatgtgactgtgtccttgcctgtccggggctgtgtccaggatgaattctgcactcgggatggagtaacaggcccagggttcacgctcagtggctcctgttgccaggggtcccgctgtaactctgacctccgcaacaagacctacttctcccctcgaatcccaccccttgtccggctgccccctccagagcccacgactgtggcctcaaccacatctgtcaccacttctacctcggccccagtgagacccacatccaccaccaaacccatgccagcgccaaccagtcagactccgagacagggagtagaacacgaggcctcccgggatgaggagcccaggttgactggaggcgccgctggccaccaggaccgcagcaattcagggcagtatcctgcaaaaggggggccccagcagccccataataaaggctgtgtggctcccacagctggattggcagcccttctgttggccgtggctgctggtgtcctactgtgagcttctccacctggaaatttccctctcacctacttctctggccctgggtacccctcttctcatcacttcctgttcccaccactggactgggctggcccagcccctgtttttccaacattccccagtatccccagcttctgctgcgctggtttgcggctttgggaaataaaataccgttgtatatattctggcaggggtgttctagctttttgaggacagctcctgtatccttctcatccttgtctctccgcttgtcctcttgtgatgttaggacagagtgagagaagtcagctgtcacggggaaggtgagagagaggatgctaagcttcctactcactttctcctagccagcctggactttggagcgtggggtgggtgggacaatggctccccactctaagcactgcctcccctactccccgcatctttggggaatcggttccccatatgtcttccttactagactgtgagctcctcgagggcagggaccgtgccttatgtctgtgtgtgatcagtttctggcacataaatgcctcaataaagatttaattactttgtatagtgaaaaaaaa

SEQ ID NO: 198778 - DNA, 444 bp, Homo sapiens
gctggtgtgaatgagttgatgcaggtgctgtgtccctgtcttgcctcccaggtgtggtacagagaggacgtcagccactccaaccccgaagggtcctcctggtccctgctggacacccccggggaggtggttcagatcagctgtgggccccacgacctcctgtgggccacactctgggagggacaggccctggtccgggaaggaatcaacaggagcaatcccaaaggaagttcctggtccatcgtggagcctcctggatctgaaaacggggtcatgcacatctcggtgggagtcagcgtggtctgggctgtcaccaaggactggaaggtaagatggggatgaggctgggggatcacttgagcccaggagttggagactgcagtgagctgtgatcacaccactggactccagcctgggtgacagagcgagaccctgtctcaaatt

SEQ ID NO: 198779 - DNA, 5319 bp, Homo sapiens
cgcagtgctgctggggcattgcctgtgacaaccaggtctacgtgtatgtgtgtgccagcgatgtccccatccgccgccgagaggaggcctatgagaatcagcgctggaatcccatgggcggcttctgtgagaagctcctgctgagtgaccgctgggggtggagtgacgtgagtgggctccagcaccggccgctggacagggtggcactgccctcgccgcactgggagtgggagtctgactggtacgtggatgagaattttggaggtgaacccactgagaaaggggggtggacgtacgccatcgactttcccgccacctacacgaaagacaagaagtggaattcttgtgtgcggcgccggaagtggatccggtacaggagatacaagtcccgggacatctgggccaagatcccctcgaaggatgaccccaaggagctgcccgaccccttcaacgacctctctgtagggggctgggagatcacggaggagcctgtgggccgcctgtcagtgtgggctgtgtctctgcagggcaaggtgtggtacagagaggacgtcagccactccaaccccgaagggtcctcctggtccctgctggacacccccggggaggtggttcagatcagctgtgggccccacgacctcctgtgggccacactctgggagggacaggccctggtccgggaaggaatcaacaggagcaatcccaaaggaagttcctggtccatcgtggagcctcctggatctgaaaacggggtcatgcacatctcggtgggagtcagcgtggtctgggctgtcaccaaggactggaaggtgtggttccgaagaggcgtcaactctcacaatccctgcggcaccagttggattgagatggttggtgagatgacgatggtgaacgtgggaatgaacgaccaggtgtggggcattggctgtgaggaccgagccgtgtacttccggcagggtgtcacccccagcgagctcagtgggaagacctggaaagccatcatcgcggcccgagagtgtgaccggtcacactctggcagctcgtctagtctcctcagtgccggctgcttcttcggtgatgaggtgaggggtagtggcgagtctgcccccagcgacaccgatgcctcctcggaagtcgagagaccagggcctggccagattctccctgcagaacctctagacgattccaagaatgccacagggaactcagcctcaggcctgggggctggcaggaccgcagaagataccgtggaagatgcctgcccagccgagggcagcagggaggccagacccaacacgcaccccggcccggcccccaccccggccgagctgccctggaccaatattgacctcaaggaggccaagaaagtgcccagccactcggccgctggcttccccgagaccaccagcctctcctctctggggctcctcccactgggcttggaggagccgtatggggtggatgaccacccgctgtgggcctgggtgtcgggaggcggctgcgtggtggaggcatgtgccatgcccagatggttcactgtccaggcgggcctgtcctcctcggtacacatgctgtccctgtccatcacgccggcccagaccgctgcctggaggaagcagatcttccagcagctcacggaaaggaccaagcgggagctggagaacttcagacactacgagcaggccgtggagcagtcggtgtgggtgaagaccggggcgctgcagtggtggtgcgactggaagccccacaagtgggtggacgtgcgcttggccctggagcagttcacggggcacgacggcgtccgggacagcatcctcttcatctactatgtggtccacgaggagaagaagtacatccacatattcctgaatgaggtggtggcgctggtcccagtgctgaacgagaccaagcactcctttgccctgtacacccctgagcggacacggcagaggtggccggtgcgtctggctgctgccaccgagcaggacatgaatgactggctcgccctgctcagcctgtcttgctgcgagagccggaaggtgcagggccgcccgtccccgcaggccatctggtccatcacctgcaagggggacatcttcgtgagcgagcccagcccagacctggaggcccacgagcaccccctgccctgcgaccagatgttttggcggcagatgggaggccacctgcggatggtggaggccaacagccggggcgtggtgtggggcatcggctatgaccacacggcctgggtatacacaggcggctatggaggcggctgcttccaaggcctggccagcagcaccagtaacatctacacgcagtcagacgtgaagtgtgttcacatctatgagaaccagcgctggaaccccgtcacaggctacaccagcaggggtctgcccacggaccggtacatgtggagcgatgcctcggggctgcaggagtgcacgaaggctggcacgaagcccccgtccctgcagtgggcctgggtttccgactggttcgtggatttcagcgttccggggggcacggaccaggaggggtggcagtatgccagcgacttccctgcctcataccatgggtccaaaacgatgaaggattttgtgaggaggaggtgctgggccagaaaatgcaagctggtgaccagtgggccctggctggaggtgccccccatcgccctcagggacgtgtccatcatcccggagagcccgggtgccgaggggagtgggcacagcatcgccctctgggccgtcagcgacaagggggatgtgctgtgccgcctgggcgtgtcggagctcaaccctgcgggctcctcctggctgcacgttggcaccgaccagcccttcgcctccatctccatcggggcctgctaccaggtgtgggccgtggcaagggacggctccgccttctaccggggatccgtgtacccctcgcagccagccggtgactgctggtaccacatcccgtccccaccgagacagaggctgaagcaggtgtccgcggggcagacgtcggtgtatgccctggatgagaatggaaacctgtggtatcgccaagggatcacgcccagctacccgcagggctccagctgggagcacgtgtccaacaacgtgtgccgagtgtccgtggggcccctggaccaggtctgggtgatcgccaacaaagtgcagggcagccacagcctgagccgggggacagtgtgtcatcgcaccggcgtgcagcctcacgagcccaagggccacggctgggactacggcatcgggggaggctgggaccatatctctgtccgggccaatgccaccagggccccccggagctcgtcccaggagcaggagccgagtgccccaccagaggcccatggccccgtctgctgctgaggcccccccacacacctacatgcagggacggtgcccagtttgggggatcaaggctgagccattcttgtgctggagtgtgcaccgtgggagcaatgtggcccaggtggactcaggagggaacctggccccaaggctgcggccacttcagaggcactggctgagacggccctgaaatgtgaagctccgcggacactcccacacgtgtccccgtctgcgaggagtcccggggtgtggggcatggggtggggctgcacctcccagaggcccctcccacccttcccttcccctctcccttctgcctttccaggactagaaccgggaacctggagccctccgggaacgccggccctggggcagcagagccaggatggagccctcctgagctggcatctcagacagcacccgggcccgccacccctcaccaagagagatggccatggggctcagggcctctttaccatgtgcagtgaccatttctcagagcaggacttgcaaagaggctttaatttcaaaagtgaaggaaggaggccaggcgccgtggctcacgcctgtaatcccagcactttgggaggctgaggtgggcagatcacctaggtcaagagtttcaaaccagacgggccaacatggtgaaaccccatctctactaaaaatacaaaaaaaaaaattagctgggcatggtggtgggtgcctgtaatcccagctactcgggaggctgaggcaggagaatcgtttgaacccgggaggcggaggctgcagtgagccgagatcatgccactgcactccagcctgggcgacagagactccatctcaaaaaaaaaaaaaaaaaaaagtgaaggaaggagacagcagattggaaataacactggagtggatgggatgtcctcttccctgagggggccggggtaccagacgggaggctgggagaggatgagaggctgccccatggctggaggcagcgtccgtgtgtgcagtcaccatcatcaacccccattcggccccttccccagatgcgctggtgacaggggcttcttggatgtcaaatcatgttgtaggagggtgcagactgcgggcttctgtggggagcagtactactgtgtctgtcggcagtggccatgggaccctcagcccgtcctgtacatggagcagggtgcacagtcaccctccatcctgtggcgagaggctggcccggcccggccaggcgaggcagaaggtgtcggccaagtggccccgaccccatcccgcaatctctcagctgctttttattacctttgtgccccatttgggagtttgcttcctccacctggacactttgcccgggaggtcatcagagcccaaccccaggctctgctcggttggagaggggatgacttcaccaccacctgaccttcctagggtcctggtctcactgtcagctgggggtccgttgtgtgtatttgtacagttttgctgtatggggtttgtcacccaaaagctgatgctgagaaaggcctccctggggcccctcccgcgggcatctgagagacctggtgttccagtgtttctggaaatgggtcccagtgccgccggctgtgaagctctcagatcaatcacgggaagggcctggcggtggtggccacctggaaccaccctgtcctgtctgtttacatttcactatcaggttttctctgggcattacgatttgttcccctacaacagtgacctgtgcattctgctgtggcctgctgtgtctgcaggtggctctcagcgaggtacggggagggcgtcaccctgcagaacggcagagtgacgcgtcctctcgctgctgagcaccagctgtttacctgccctgcatcacttcctcggatactttactcaataagcatttcccctggagtgtccgtgccctggtgttttttatcgatacgttgattaaaacgcgtggttccccgtgtgcctgaagcagaca

SEQ ID NO: 198780 - DNA, 5606 bp, Homo sapiens
cgcagtgctgctggggcattgcctgtgacaaccaggtctacgtgtatgtgtgtgccagcgatgtccccatccgccgccgagaggaggcctatgagaatcagcgctggaatcccatgggcggcttctgtgagaagctcctgctgagtgaccgctgggggtggagtgacgtgagtgggctccagcaccggccgctggacagggtggcactgccctcgccgcactgggagtgggagtctgactggtacgtggatgagaattttggaggtgaacccactgagaaaggggggtggacgtacgccatcgactttcccgccacctacacgaaagacaagaagtggaattcttgtgtgcggcgccggaagtggatccggtacaggagatacaagtcccgggacatctgggccaagatcccctcgaaggatgaccccaaggagctgcccgaccccttcaacgacctctctgtagggggctgggagatcacggaggagcctgtgggccgcctgtcagtgtgggctgtgtctctgcagggcaaggtgtggtacagagaggacgtcagccactccaaccccgaagggtcctcctggtccctgctggacacccccggggaggtggttcagatcagctgtgggccccacgacctcctgtgggccacactctgggagggacaggccctggtccgggaaggaatcaacaggagcaatcccaaaggaagttcctggtccatcgtggagcctcctggatctgaaaacggggtcatgcacatctcggtgggagtcagcgtggtctgggctgtcaccaaggactggaaggtgtggttccgaagaggcgtcaactctcacaatccctgcggcaccagttggattgagatggttggtgagatgacgatggtgaacgtgggaatgaacgaccaggtgtggggcattggctgtgaggaccgagccgtgtacttccggcagggtgtcacccccagcgagctcagtgggaagacctggaaagccatcatcgcggcccgagagtgtgaccggtcacactctggcagctcgtctagtctcctcagtgccggctgcttcttcggtgatgaggtgaggggtagtggcgagtctgcccccagcgacaccgatgcctcctcggaagtcgagagaccagggcctggccagattctccctgcagaacctctagacgattccaagaatgccacagggaactcagcctcaggcctgggggctggcaggaccgcagaagataccgtggaagatgcctgcccagccgagggcagcagggaggccagacccaacacgcaccccggcccggcccccaccccggccgagctgccctggaccaatattgacctcaaggaggccaagaaagtgcccagccactcggccgctggcttccccgagaccaccagcctctcctctctggggctcctcccactgggcttggaggagccgtatggggtggatgaccacccgctgtgggcctgggtgtcgggaggcggctgcgtggtggaggcatgtgccatgcccagatggttcactgtccaggcgggcctgtcctcctcggtacacatgctgtccctgtccatcacgccggcccagaccgctgcctggaggaagcagatcttccagcagctcacggaaaggaccaagcgggagctggagaacttcagacactacgagcaggccgtggagcagtcggtgtgggtgaagaccggggcgctgcagtggtggtgcgactggaagccccacaagtgggtggacgtgcgcttggccctggagcagttcacggggcacgacggcgtccgggacagcatcctcttcatctactatgtggtccacgaggagaagaagtacatccacatattcctgaatgaggtggtggcgctggtcccagtgctgaacgagaccaagcactcctttgccctgtacacccctgagcggacacggcagaggtggccggtgcgtctggctgctgccaccgagcaggacatgaatgactggctcgccctgctcagcctgtcttgctgcgagagccggaaggtgcagggccgcccgtccccgcaggccatctggtccatcacctgcaagggggacatcttcgtgagcgagcccagcccagacctggaggcccacgagcaccccctgccctgcgaccagatgttttggcggcagatgggaggccacctgcggatggtggaggccaacagccggggcgtggtgtggggcatcggctatgaccacacggcctgggtatacacaggcggctatggaggcggctgcttccaaggcctggccagcagcaccagtaacatctacacgcagtcagacgtgaagtgtgttcacatctatgagaaccagcgctggaaccccgtcacaggctacaccagcaggggtctgcccacggaccggtacatgtggagcgatgcctcggggctgcaggagtgcacgaaggctggcacgaagcccccgtccctgcagtgggcctgggtttccgactggttcgtggatttcagcgttccggggggcacggaccaggaggggtggcagtatgccagcgacttccctgcctcataccatgggtccaaaacgatgaaggattttgtgaggaggaggtgctgggccagaaaatgcaagctggtgaccagtgggccctggctggaggtgccccccatcgccctcagggacgtgtccatcatcccggagagcccgggtgccgaggggagtgggcacagcatcgccctctgggccgtcagcgacaagggggatgtgctgtgccgcctgggcgtgtcggagctcaaccctgcgggctcctcctggctgcacgttggcaccgaccagcccttcgcctccatctccatcggggcctgctaccaggtgtgggccgtggcaagggacggctccgccttctaccggggatccgtgtacccctcgcagccagccggtgactgctggtaccacatcccgtccccaccgagacagaggctgaagcaggtgtccgcggggcagacgtcggtgtatgccctggatgagaatggaaacctgtggtatcgccaagggatcacgcccagctacccgcagggctccagctgggagcacgtgtccaacaacgtgtgccgagtgtccgtggggcccctggaccaggtctgggtgatcgccaacaaagtgcagggcagccacagcctgagccgggggacagtgtgtcatcgcaccggcgtgcagcctcacgagcccaagggccacggctgggactacggcatcgggggaggctgggaccatatctctgtccgggccaatgccaccagggccccccggagctcgtcccaggagcaggagccgagtgccccaccagaggcccatggccccgtctgctgctgaggcccccccacacacctacatgcagggacggtgcccagtttgggggatcaaggctgagccattcttgtgctggagtgtgcaccgtgggagcaatgtggcccaggtggactcaggagggaacctggccccaaggctgcggccacttcagaggcactggctgagacggccctgaaatgtgaagctccgcggacactcccacacgtgtccccgtctgcgaggagtcccggggtgtggggcatggggtggggctgcacctcccagaggcccctcccacccttcccttcccctctcccttctgcctttccaggactagaaccgggaacctggagccctccgggaacgccggccctggggcagcagagccaggatggagccctcctgagctggcatctcagacagcacccgggcccgccacccctcaccaagagagatggccatggggctcagggcctctttaccatgtgcagtgaccatttctcagagcaggacttgcaaagaggctttaatttcaaaagtgaaggaaggaggccaggcgccgtggctcacgcctgtaatcccagcactttgggaggctgaggtgggcagatcacctaggtcaagagtttcaaaccagacgggccaacatggtgaaaccccatctctactaaaaatacaaaaaaaaaaattagctgggcatggtggtgggtgcctgtaatcccagctactcgggaggctgaggcaggagaatcgtttgaacccgggaggcggaggctgcagtgagccgagatcatgccactgcactccagcctgggcgacagagactccatctcaaaaaaaaaaaaaaaaaaaagtgaaggaaggagacagcagattggaaataacactggagtggatgggatgtcctcttccctgagggggccggggtaccagacgggaggctgggagaggatgagaggctgccccatggctggaggcagcgtccgtgtgtgcagtcaccatcatcaacccccattcggccccttccccagatgcgctggtgacaggggcttcttggatgtcaaatcatgttgtaggagggtgcagactgcgggcttctgtggggagcagtactactgtgtctgtcggcagtggccatgggaccctcagcccgtcctgtacatggagcagggtgcacagtcaccctccatcctgtggcgagaggctggcccggcccggccaggcgaggcagaaggtgtcggccaagtggccccgaccccatcccgcaatctctcagctgctttttattacctttgtgccccatttgggagtttgcttcctccacctggacactttgcccgggaggtcatcagagcccaaccccaggctctgctcggttggagaggggatgacttcaccaccacctgaccttcctagggtcctggtctcactgtcagctgggggtccgttgtgtgtatttgtacagttttgctgtatggggtttgtcacccaaaagctgatgctgagaaaggcctccctggggcccctcccgcgggcatctgagagacctggtgttccagtgtttctggaaatgggtcccagtgccgccggctgtgaagctctcagatcaatcacgggaagggcctggcggtggtggccacctggaaccaccctgtcctgtctgtttacatttcactatcaggttttctctgggcattacgatttgttcccctacaacagtgacctgtgcattctgctgtggcctgctgtgtctgcaggtggctctcagcgaggtacggggagggcgtcaccctgcagaacggcagagtgacgcgtcctctcgctgctgagcaccagctgtttacctgccctgcatcacttcctcggatactttactcaataagcatttcccctggagtgtccgtgccctggtgttttttatcgatacgttgattaaaacgcgtggttccccgtgtgcctgaagcagacaaaaaaaaaaaaaaaaacaaaacaaaaaaaaaaaccggggggaataaagtgggggggcgaggaaaacaaggggaaacaaaaggggcccaggggaaacagaaggacaccgagaccgagatttgttggacaacagagggggaaaaaatcaggccggggaacccacataaagaggaggcgcgcaaaaataaattgcgaaagcgcacgggtcaccgcggggataatagaggctgcacaaaaaggaaagagaacaagagggacgaagagaacaaaaaagacacgggggagaaa
